United States Patent Application Publication US 2004/0123343 A1 - sequence listing, part 49

SEQ ID NO: 175164 - protein, 921 aa, Oryza sativa
  Clone ID: PAT_MRT4530_73036C.1.pep
MATEAERGGGAARVDEDGGVPAVGGRNEGVDEIGEDAAMPKQAMPKREEMADRDEEQILYDTIAEGSSQYWNEEEGNEDPNQYLNEEGNVERDAEGNQQGHVERDVEGNQEEEASGSQPSVGQKRARGQRGAAKKLEGRHIITEVEEDGRPSAPAEAAKNYVRHSGWVVRDNVPVSTVYWRRTRARGDHESFVPDSEKEMLWTTMLETFTLPAGIEDKVKRWTLKKMAEQFQSFKGELYKKYILKGQTPNFDTFPKLRDHWDEFVAYKTGEQGQAMMERNKENAAKKMYHHHLGSGGYSVAMLKWEEMEASLIERGIEPATANWPERSKFWYYLGRETIEVLGTFRPDRDRDELTLALQTPEHPGRTRGKGVIPWKIGFKEDIHTHRSRMRSKRDTEAKIADLEFRVSSYDLSMQEEVARKVDERMAAHRSHDPQPTIPPAMVSPSGNRSSCASTGQVVSGMAIPTDPSGTYHSRPIPAGYSKVEVELVEGAYEDLELDYPGGDGSCTVSSSCSASTVSTSGSSTDSSSGSCTDSSSGSYTYSSASSSSGTFKVKGPPAPPPAHTRATKKAKVDAAKNKDPGYDCTQEELDAYVASEVKRQFKPRSPEKKIPVDPSVRNFFRGMSAPVKEAIKLSDYERTLKKASSGKSKPVPQLGEQPNQEIKPLVTGEDMTIEEFIIDTSLTTDQLLGVEPLEKAELKDMYKLGKPLVKPELVQSLPTQMYKFHQLYMEMSATGREMIGARIRDPDFLQGDDILWINFKGIYQVYQLDALDVSIMSCWILMEIQRARRRRVFDTEFIDPRRVNVAMLDQYPQETEDNLVHLLKAQHYKTFILLPYNTEFHWVLLLFDLSACTVNVYDSMDKKESTFDKVFELIDRAWYRFRHLVRGNWRERLRRRFKFPFIRMRDNLTTHKEFITAVQE

SEQ ID NO: 175165 - protein, 885 aa, Oryza sativa
  Clone ID: PAT_MRT4530_73037C.1.pep
MAPPAAAAAVTLGGKGAALTPAAVYALSHGLADPAIDPSALQRLSTRGPSPQDTPASLRGLALSPPESRAAAAVLLNKLLVTAGDSSALVTAATATGLAGSLDLAAALPPASRDEAAVAAASAPVAVALAAAIDCCASPLVRVADAVAALSCEAARGDVAAFDVPTSGDGLSAKDEADVAADVKMLLFGSKLVGAAGGADAASFTKVPTVNGIFREAVRALHARVRIELNAPVKLGKRDAVQTGEGKEEALVALATQLARPVQAMLKLSVARARLCVARIDDAELRKKLTDGVEIDDLKGMLGKVTIDSDAVSVLRGVYNSLLKFRDILAWEAAVAMAVIEMDSSIEKPQACEENEAGSSTENPHASGEKPKGDKKSKKKKTLGKGTSAVLMLLRDLVTNGKEVLSVNSALLAEWGTELSLLFDPKCPRLVSLVDKVKEIVETNEVRRLPKIPKGTRDFGKEQMAIREHAFSIITGVFKMHGAVSLDTPVFELRETLMGKYGEDSKLIYDLADQGGELCSLRYDLTVPFARYVAMNNISSLKRYQIAKVYRRDNPSKGRYREFYQCDFDIAGVYETMEPDFEVIKVLTELLDQLDIGTYEIKLNHRKLLDGMLEICGVPPEKFRTVCSSIDKLDKQTFEQVKKELVDEKGISNETADKIGDLVKTRGPPLEVLLELRKEGSKFMGNAGSVTALNELEILFKALDKANAIGKIVFDLSLARGLDYYTGVIYEAVFKGTTQVGSIAAGGRYDNLVGMFSGKQVPAVGVSLGIERVFAIMEQQEMEKNQIRATETEVLVSIIGKDLILAAELVSELWNAGIKAEFKLTTRIQNHLKYATQSGIPWMVLVGESEISSGKVKLKNLAASQEEEVDRTEFAQVLKQKLRNP

SEQ ID NO: 175166 - protein, 367 aa, Oryza sativa
  Clone ID: PAT_MRT4530_73038C.1.pep
MAAESYWQYQYAAVDPRQQAPAPVPVPTPALMWQQQQQQAGYQPAVAPVAPPMAAPPLPAGPPPSFKRQRPEYFDMPSGQGNSLFHEAMSPHYVHRLNNQMSYAAGANQSAIPLGGMARYSVGMDSGIHGATRTESRTLYVEGLPSNCTKREVAHIFRPFSGFREVRLVNKESRHAGSCNLLCFVDFSSPPEARAALETLQGYKFDEHDHESSNLRTQFSLTPRRRPIGWYGCVDNYWLDGNKVDGAEKLFNHVLCDLNYIYSSVDDCNEYIHGASAHIVCRLISWCKTAPVPFLTKRISMAMLAEKCCVVPGRCYVTESPATTTGHTYRLVALLETTICMCFLEMDKLLHRLRCIFVASAGHVVIE

SEQ ID NO: 175167 - protein, 785 aa, Oryza sativa
  unsure (1)..(785): unsure at all Xaa locations
  Clone ID: PAT_MRT4530_73039C.1.pep
ERERANERGRTRVPECLLYQQMADRDEEQILYDIIAEGSSQYWNEEEGNEDPNQYLNEEWNVERDAEGNQQGHVERDVEGNQEEEASGSQPSVGQKRARGQRAAKNYVRHSGWVVRDNVPVSTVYWRRTRARGDHESFVPDSEKEMLWTTMLETFTLPAGTEDKVKRWTLKKMAEQFQSFKGDLYQKYILKGHTPNFDTFPKLRDHWDEFVAYKTGEQGQAMMERNKENTAKKKYHHHLGSGGYSVAMPKWEEMEASLIERVEASSQGTFRPDRDRDELTLALQTPEHPGRTRGKGVIPWKIGFKEDIHTYRSRMRSKRDTEAKIAYLEFRVSSYELNMQEEVARKVDERMSAHRSHDPQPTIPPAMVSPSGNRSSCASTGQVASGMAIPTDPSGTYHCRPIPAGYSKVEVELVEGAYEDLELDYPGGDGGSCTVSSSCSASTVSTSGSSTDSSSGSCTDSSSGSYTYSSASSSSGTFKKXKRQFKPRSPEKKIPIDPSVRNFFRGMSASVKEAIKLSDYERTLKKASSGKSKPVPQLGEQPNQEIEPLVTGVAPIEKAEVKYMYELGKPLVKPELLQSLPTQMYKFHQLYMEMSATGREMIGARIRDTDFLQGDDILWINFRGIYELYQLDALDVSIMSCWILMEIQRARRRRVFDTGFIDPRRVNVAMLDQYPQETEDNLVHLLKAQHYKTFILLPYNTEFHWVLLLFDLSACTVNRQRAGYHPVTIKIATAERTGDEETPGHPHDVMKAIITGIPIPAIHLLHHHVHQVDIHGDVLEMMIVD

SEQ ID NO: 175168 - protein, 169 aa, Oryza sativa
  unsure (1)..(169): unsure at all Xaa locations
  Clone ID: PAT_MRT4530_7303C.1.pep
AASAVAGAEVGRRSMAQKRSXLADGEFFLVLQGQVSPHGYXNMYTRGHCKLSLDQYXLLSAHRHPLYRGFYLSSGGTWHLTRGCIGFRSPAKEXVICSAGPGESIGYVSVVQGCIASISWIALVWLIYLHSLLSYVLVNLFLASQFSSIGRGSLXGLYLFRLNCLARLD

SEQ ID NO: 175169 - protein, 80 aa, Oryza sativa
  Clone ID: PAT_MRT4530_73040C.1.pep
NIHGSLLKSLAPAHILVWAPLWHGWMGLVPFYQPTTGLVLVQSNIAHLAHALPYIFGAISCLYNKCFTLLYYTTYIPTHC

SEQ ID NO: 175170 - protein, 1124 aa, Oryza sativa
  Clone ID: PAT_MRT4530_73041C.1.pep
MPPPPRHATPPPPRPRNATPPPPPRRRANHRPDAATPPLTNENENDRTNESENEHVNVRCRENVNENENDRTNESENENDRSKTSENEGTNVNENKRTNVNENERTNMADRDEEQILYDTIAEGSSQYWYEEEGNEDPNQYLNEEGNVERDAEGNQEEEASVQEDGRPSAPAEAAKNYVRHSGWVVRDNVPVSTVYWRRTRARGDHESFVPDSEKEMLWTTMLETFTLPAGTEDKVKRWTLKKMAEQFQSFKGDLYQKYILKGQTPNFDTFPKLRDHWDEFVAYKTGGYSVAMPKWEQMEASLIERGIEPATANWPERSKFWYYAHGGTLNPADGSLVFGDQIREAARRLTDAVEASSQGTFRPDRDRDELTLALQTPEHPGRTRGKWVIPWKIGFKEDIHTYRSRMRSKRDTEAKIADLEFQVSSYELNMQEEVARKVDERMAAHRSHDPQPTIPPAMVSPSGNRSSCASTGQVASGMAIPTDPSGTYHCRPIPAGYSKVEVELVEGAYEDLELDYPGGDGETHLRDTSHAIILWRRRYIILPGRQAASRAPSPPAPPSPPQDPAPSPPHAPPAPSPPQAPASTPPQDPAPTPPRAPTPTPPQAPLPAPSKSTAPPAPPPAHTRATKKAKVDAAKNKDPGYDCTQEELDAYVASEVKRQFKPRSPEKKIPIDPSVRNFFRGMSAPVKEAIKLSDYERTLKKASSGKSKPVPQLGEQPNQEIEPLVTGKEMTIEQFITDTGLTTDQLLGVAPIEKAEVKYMYELGKPLVKPELLQSLPTQMYKFHQLYMEMSATGREMIGARIRDTDFLQGDDILWINFRGIYELYQLDALDVSIMSCWILMEIQRARRRRVFDTGFIDPRKENVAMLDQYPQETEDNLVHLLKAQHYKTFILLPYNTEFHWVLLLFDLEACTVNVYDSMDKKESTFDKVFELIDRAWYRFRHLVRGKWRERLRRKFKFPCAKQKQGTNLCGYYMCEYCHCLANQIITTRELDFIRMRDNLTTHKEFITAVQEQLMGFINEEILDPKGEFYYDGNTIHRGVTNRDYRGFLHQCSLDWGLLDSDYLRKMAGGHTHRTEAELKAFLDSCMEEIEGRTITGSCSKAQDYVNLQAAIYEKASKVVNKN

SEQ ID NO: 175171 - protein, 284 aa, Oryza sativa
  unsure (1)..(284): unsure at all Xaa locations
  Clone ID: PAT_MRT4530_73042C.1.pep
RCATPAPCRALRRRRATSPPGHAPRRHAGTGPSRRRPLPPHRRPAAATPPLRCRHDIERINVNXRERANERERERANEREREREXANERERTSLQKRRCRSRPSSRSGSXPRRNSRRQMADRDEEQILYDTIAEGSSQYWNEKDGKEDPNQYLNKEGNMXRDAEGNQEGHVERDVEGNQKEEDSASXPSAGQKRARGQRGATKKLEGRHIITEVDEDGRPSAPAEAAKNYVRHSGWVVRDNVPVSTVYWRRTRARGDHESFVPDSEKEMLWAPMLETFTLPAGS

SEQ ID NO: 175172 - protein, 1224 aa, Oryza sativa
  unsure (1)..(1224): unsure at all Xaa locations
  Clone ID: PAT_MRT4530_73043C.1.pep
MKPSRRPFHLLQPPAIATLAAAAPRRCRLRVRRVVPRPGRHSTRPFRRPRTASTVDPSSTTAVVASNHCSSPPQPSPHKSAATLGFAALPRTPAATPNPQTITGAPFPPPTRATTTSTASSGLFSPLRSPISLPNRSNIFPRSCRPSAVAPPWSGVVGTPFPSPPVPVAAIFSAAGRLPVVVSPSPSSGAANKAGGEKRLPLSGGINIRPIPPQFKFPPVLRYSGETDPKEFLSIYESAIEAAHGDENTKAKQLRDVFVLNFRGTYEEPKTQQYLLGIRQRPGESIREYMRRFSGEEDSKRRQAIQAEYDKASVAAAQAQVQAQVAEPAPLAVHQSQPAIQGQPPRPSQAPMTWRKFRTDRAGKAVMAVEEIQALRKEFDAQQTSSYQQPVRKKVRKDLYCAFHGRSSHTTEQYRNIRQRGNVQDPRLQQGAVVEAPREAAQEQAPPAEQRQDGQRRVIQGLQPSTTSKGDLAVINRAVHNVEAEPHDRAKHAPKXPQVDDADPARLVSXGGDIGEREVENIMEVLKKNIDILTWGPDEVGGLNKAYPNDDFPLPRIDQLVDSTVGCKLMSFLDAYSGYHQIHMNPADIPKTAFITLFGTYCHLRMPFGLRNAGATFARLVYKILYKQLGRNVEAYVDDIVVKSRKAFDHASDLQETFDNLRTAAYAKYKKLAGQIAALSQFLSKAVERGLPFFKTLRGAEKFTWTPECQAVFDELKQYLQSTPALISPAPGSELLLYLAASPVAVSAALVQETESGQKPVYFISEALQGAKIRYIEMEKLAYALVMASRKLKHYFQAHKVTLSKWVAELSPFDLHFVARTAIKSQVLADFVAEWTSAFALEPEPVEQPWVMYSDGSWSHKGAGAAAVLTSPGGVPIRYAARLQFNTTNNAAEYEAILRGLKKAKALGVRRLLIRTDSKFVASHVDKSFEAKEEGMKRYLEAVWSMEKCFTGITVEHLPRGQNEEADALAKSAACGGPHSPGIFFEPSEDEAEAKRLQLRAAKYKLVSGQLYHSGVLQPLLRYISFAEGEEMAKEIHQGLCGAHQATRTIASKVFRQGVYWPTMLKVYVEQVKRCESYQCHGQSQTAPQYELQPIAPIWPFARWGLDIIGPFPVAQNGYKFAIVAIEYFSLWIEAEPLGAITLAAVQKFVWKNIVCCFGIPKEFITDNGKQFDSNKFREMCEGLNLEIKFASIAHPQSNGAADRTNGKILEALKKRLEGAAKGK

SEQ ID NO: 175173 - protein, 226 aa, Oryza sativa
  unsure (1)..(226): unsure at all Xaa locations
  Clone ID: PAT_MRT4530_73044C.1.pep
LAAAAPRRCRLRVRRVVPRPGRHSTRPFRRPRKIRRHPRLRRAAPHTGRHSKSPNHHRSPVSAANPSXTTSTASSGLFSPLRSPISLPNRSNIFPRSCRPSAVAPPWSGVVGTPFPSPPVPVAAIFSAAGRLPVVVSPSPSSVRIPTAPSPFSPSAAPRAHRRDALPSPAVVRARARSRRAMAGRVSLGRARGLAAALLSRPIGXGPTWAVHVVDARPRPRVDLVH

SEQ ID NO: 175174 - protein, 107 aa, Oryza sativa
  unsure (1)..(107): unsure at all Xaa locations
  Clone ID: PAT_MRT4530_73045C.1.pep
MPSRADQSAGSTAERTSPSQRWSCQSSGHVMXELLRRQHRSNGGEGERKEGKAQPGDRGRWSARGKPPSSLPPPAPGRVRARRRAVRAAVLAAMRVRERKSEREDRE

SEQ ID NO: 175175 - protein, 138 aa, Oryza sativa
  unsure (1)..(138): unsure at all Xaa locations
  Clone ID: PAT_MRT4530_73046C.1.pep
MVTLMIGTLWRANSSAHLSGEIRGRNGPPSLPSTGFGAMAKPVPVCRGFRHIIFARAAFWRELHSAKVVLPQSRLSPVWLHSCPSPPTFGVSLLLKLXLVSAGSAEGPPCHELIARVHDRLHERLLLALPIGASIKLC

SEQ ID NO: 175176 - protein, 223 aa, Oryza sativa
  Clone ID: PAT_MRT4530_73047C.1.pep
ETLATTRLRLRRRRRRPPLYQDPAATAPPAAALVAHALVPPGVVGCGLRPPPRRPAALSGWGGGWQGAAPPSHHQPSKPAGERGATMSLLRRVGRRFLAGDILSSEASPHAVGRLFTEPPLPSPLEGVRSPSPLPLPRATKQPFIGIFSPFKSYPLQVIRESLPLAHHQSLSRNAIGPSYRWPWTRLTSAVALPKLLGTRWASTNTSSTTGFGPCFTSAGRVD

SEQ ID NO: 175177 - protein, 304 aa, Oryza sativa
  Clone ID: PAT_MRT4530_73048C.1.pep
MSLLRRVGRRFLAGDILSSEASPHAVGRLFTGIVSHLAAPSEASPLPPLQALIGILSASSEPPLPSPLEGVRSPSPLPLPRATKQPFIGIFSPFKSYPLQVIRESLPLAHHQSLSRNAIGPSYRWPWTRLTSAVALPKLLGTSEEEACCRYNETASILKELITESVGSEAIGVDCIADFRRLLRQMESMTSVCQEYIISNHASLIPDANRDSSLALHSRLVSGKAPSHLMKHVLLELSLAVERDALLQEDSIVFALIKQRPTLPPPKLPVAVLSHEKTCGYQSSGHLQKNKESGIGRTGELNDL

SEQ ID NO: 175178 - protein, 119 aa, Oryza sativa
  Clone ID: PAT_MRT4530_73049C.1.pep
MLPFKDSFMRILRKQEILLETFIKEELPVISSQVTNRIMRAQLLERRVAGFGGLKNWLFTCGFGWFVDILDSEKLGMYQIVSLTMNQLKDMGLDAVGPRRKLIHAIECVSQPNEFEMFS

SEQ ID NO: 175179 - protein, 136 aa, Oryza sativa
  Clone ID: PAT_MRT4530_7304C.1.pep
MNRHPTKTLQHHTPYFALHGVHPSTDLAFLELGLHIHRSSKSDLIVYSDADWAGCPHTHRSSSGYAVFLGDNLYSNSVQHQRTKHVEIDLHFVREKVALGAVRVLHVPTSSQYADIFTKGFPSPVFTEFCSSLNVR

SEQ ID NO: 175180 - protein, 1055 aa, Oryza sativa
  Clone ID: PAT_MRT4530_73050C.1.pep
MGKRVKAKAKNPRKAQQQQEPTAAAPSDAGSGDAAAAAAQDSGNSTEEAAAAAAAAASASGREQCGHYGGDSARLDKVLLEIMTSKHFASCEHCRDDAPRKKGGGKEKGGKQQQKKKGGGTKGSAAKAKVEKSDMWVCLDCGRHFCGGEVDVTKPYGHARRHAKQDRHWWAARFDDPTVAFCLSCEKEVSIEMPRIETVAAVPTEVAGAADRDLGLVNSHGSVIRGLPNLGNTCFFNAVMQSLLALDRLRSKMLGPDVPTGALLMSLKKLFMETSASNDVGGALSPKNLFSNICSKYPQFRGFQMQDSHELLRCFLDGLHTEENEARKLADEASSATIPTIVDSIFGGQLSSTVSSTECTHSSVKHDQFLDLSLPVPSRRPPAKSVSSPPAKRNKQSLRDRNKNRRYGKISTRVTPTIEVSNKEKIQTVAEGNNSLIPGSESGQVVSEKEPEPSECSESCASVPNLEQTGTSNVEDGTCWLDYIDDADEAKSEILDSADSIEAGQIWEDKGVTYGPFLPQDDALSKEQVLGSEHSGENPIDDATSSQPVILLPYKEFGSTANEMDGTTENSQKPEDAVAPPAVSPLPEDNAQPASVGDGDQDDYVGLGDMFNEPEVTSEVKKEIGTVEDIDVMAWSSNSAEDEVDDSNAPVSVEGCLALFTEPELLSEPWHCELCSDSIACPNTNDGKDDEMATSVNERKDGEEMMAGGDETQDGDKLIANCTEKEGIDQIMATDGCSDNLNSDMNSKEGGCANSSLVGADNSVDANFPENGKVALLKTGSSLVDTTEQADSKAYRREIRDLNNSAVEYTSSSKQPHDSAQHKDEHNVDVASEETTAPECSCDNESASCSTTNKNEAECGVGAEEIVTSSLPSETQRILPGEKDNEDVVTRNHGRRKRMKMVGKAHQGQDNQNEQKENGKKVFRSAMRRILISKAPPVLTINLNRFSQDSHGRFKKLKGHVHFKETLDVRPFMDPRSKENDNTTYRLVGVVEHLGTMAAGHYVAYVRTGKIGGRQQRSTGSKSWFYASDAQVREASLEEVLNCEAYILFYERVGD

SEQ ID NO: 175181 - protein, 280 aa, Oryza sativa
  unsure (1)..(280): unsure at all Xaa locations
  Clone ID: PAT_MRT4530_73051C.1.pep
RPRTRIQNAPSLQRKKTRQPPHAQPKKYLPPPPGVIHPPHNQPPPPHIYSPPPHKKKEARRGHPPPPPTQKKREEHPTRRPNNRPXTKHKKAPGAPINNRRTPPPPTHGGEPPPPNQPRKETKGVXHKHPQPPPPRGGGPHPTPARVYPPPAPKKNPPPPSVPPPTPTTTKGASKKPAPHSPPKTPRPGRGRPQNSAPRKGPPKHGPTINNPPPYKPPSATKKTNKKTALSPGGFPPFFPPRKTTGGHPPRLKTKGRNFLGYTTKKHHQKKTKKNKKKVV

SEQ ID NO: 175182 - protein, 370 aa, Oryza sativa
  Clone ID: PAT_MRT4530_73052C.1.pep
MAPAMFVGIAAAGGKKGGAKDEAEELRRRNAELEREVAALRAEVAAARRRAETAEEAEERLCVQLGQAEVEAVELAREYQCRVHDLARELAGARVLPHTLNTMAAAAPATLISMAAAAAAPALSLAEAAPVTAVLAPCPTPSRTFRRRSWVAAICRPALKCHHSRPLTAVVAAAAAAAAAGDSTSAGVFHGECFVVGDNIDTDQIIPAEHLTLVPSKPDEYRKLGSFAFVGLPTAAYPTPFVAPGEETTRYAVIIGGANFGCGSSREHAPVALGAAGARAVVAEGYARIFFRNSVATGEVYPLELADTGAWKECKTGDVVTVELDNCVMINHTSGKQYKLKPIGDAGPVIEAGGIFAYARKTGMIASKSA

SEQ ID NO: 175183 - protein, 146 aa, Oryza sativa
  Clone ID: PAT_MRT4530_73053C.1.pep
MLHPSADLLVLASSITCLAPLPFPLPDCLCLSASLAWVNRWVRAGRGGAERGLRKRGRTHARAFTPRSPYQHTTPHHSTTRARLVYAVRVETARRLASLSSFHAVVTLPASPRAGRETGRGSRPRAGVRVAFFFSKGHATVISGQN

SEQ ID NO: 175184 - protein, 77 aa, Oryza sativa
  Clone ID: PAT_MRT4530_73054C.1.pep
TEVLLCTEPAHKPSCYLVLAIACQNSNNGSGGQCNLVLDGVFRQKRQGDVILEGVVLLCIGGFWCLFWSGVVSSLSV

SEQ ID NO: 175185 - protein, 267 aa, Oryza sativa
  Clone ID: PAT_MRT4530_73055C.1.pep
MASHTTLILLLPLLAAAAVAAADVAPAPAPPAAQTINLTGILEKGGQYNTLLRLLNATRVGEQLGSQLKTTYDGLTFFAPTDAAFAALRPGTLNGLSDQEQVQLVLYHVLPRYYTLATFQTASNPLRTQATGPAGVYTVNVTTTTGQSLVNVSTGVAAVPLGTTLSADFPLAVYSVDGVLLPEQMFGKAKAPAPAAAPASAAGKGANKEHKKGGAMPKNEVAATAPTAGAGGEDSDDSATTNAVAVAGAAGVVWTAALVGIANLVIA

SEQ ID NO: 175186 - protein, 326 aa, Oryza sativa
  Clone ID: PAT_MRT4530_73056C.1.pep
PNPVFTLINRPNPITKLLMKTRSKTRKREGNQQVDHVTSSSLIPPDRFGATQRNRVEGGGLRALAADAAGELDVLGHDGDALGVDGAEVGVLEETDEVGLGGLLEGEHRVALEAEVGLEVLRDLADEALEGELADQELRALLVLADLAERHRPRPVAVGLLHAAGGRSRLPRRLGGELLPRGLAAGGLAGGLLRTGHLLFASRRRLGFLLRWIWGKSKSRATKLAWKGEQSAPEVGLDREGAARSTRRPDCQMAGRLSAGGKTVPGRKRWGFFTPPVAGADLRAAFVASCFLGALPPVDFLAVCLVRAIGDEEERLGLLLQASNAT

SEQ ID NO: 175187 - protein, 170 aa, Oryza sativa
  Clone ID: PAT_MRT4530_73057C.1.pep
IIIHPTIHFILRDARVGFRPPGCRPVPQCAAWPELDERPGGQIPGAHQTTHRLVLLLSSINKPPTTRALARRRRHTRTLGASAASAKSSQGAAPAPPPRPSTAGSVSLVPFRSSGSCAGRCRLLLHADRDLAGSLPPPRGWPGRVGLSLTRGRPYNSILRRRISYGIKPS

SEQ ID NO: 175188 - protein, 97 aa, Oryza sativa
  Clone ID: PAT_MRT4530_73058C.1.pep
MHVANCHALPCTQIRTTEGYFRENVRQWQERREKNAQKRFPVVVTANKAAGVRKIGVARERRADRSRTLGSPPGRAARQPPPRTDPARTTNMRSHMR

SEQ ID NO: 175189 - protein, 95 aa, Oryza sativa
  Clone ID: PAT_MRT4530_73059C.1.pep
TNANIDLCNKLQIIYHGWPDEETAALYRDIGNAFSRPLNTYTDYTRVPNSLYRYGLSFVYFEDQRLDWTDILYLHVHTIDPRDLRLWPTDTAYFM

SEQ ID NO: 175190 - protein, 63 aa, Oryza sativa
  Clone ID: PAT_MRT4530_7305C.1.pep
MAAAGERLLGLGYSAAESRGCQSPKNSEVKHVSGSVRPEKGGTLHGWQATTESPLVEKTFVVP

SEQ ID NO: 175191 - protein, 69 aa, Oryza sativa
  unsure (1)..(69): unsure at all Xaa locations
  Clone ID: PAT_MRT4530_73060C.1.pep
AHSSGANYPKVEILQGYRLTESTAIGACTDSFXESLRNLTVGIQIPNRDVRIVDPDSGEALPVNRSGEL

SEQ ID NO: 175192 - protein, 116 aa, Oryza sativa
  Clone ID: PAT_MRT4530_73061C.1.pep
KPPQKTRGGPPIKNQMGPRKPLPPVIKHNFFPPKTFKKGVFKGPLSPPLDFPFQSGKANSVPSIFLKQIFNFFSPFFKKFPPPLFNLVFCAKEVPAQKIPPPKNLWGGPFTPPKPP

SEQ ID NO: 175193 - protein, 1104 aa, Oryza sativa
  unsure (1)..(1104): unsure at all Xaa locations
  Clone ID: PAT_MRT4530_73062C.1.pep
MVGCEHMVLRVVLMTIKDRRVPPSLQLSPPLGKTAVVIAKSPPSSSAPSQPSEPAGASSPSTTRSSRRFLLVAVVVRSFSAAVLVTEIPGVTPNQYLNEEGNVERDAERNQQGHVERNVEGNQEEEASGSQPSVGQKRARGQRGAAKKLEGRHIITEVEEDGRPSAPAEAAKNYVRHSGWVVRDNVPVSTVYWRRTRARGDHESFVPDSEKEMLWTTMLETFTLPAGREDKVKRWTLKKMAEQFQSFKGDLYQKYILKGQTPNFDTFPKLRDHWDEFVAYKTGEQGQAMMERNKENAAKKKYHHHLGSEGYSVAMPKWEVMEASLIERGIEPATANWPERSKFWYYAHGGTLNPADGSLVFGDQIREAARRLTDAVEASSQGTFRPDRDRDELTLALQTPEHPGXIRGKGVIPWKIGFKEDIHTYRSRMRSKRDTEAKIADLEFRVSSYELSMQEEVARKVDERMAAHRSHDPQPTIPPAMVSPLGXNRSSCASTGQVGSQSMDAMQTQDESTCPIDDITQRTPCELHIPYKNLSIKVASGMAIPTDPSGTYHCRPIPAGYSKVEVELVEGAYEDLELDYPGGDSETHLRHTSQRYIILPGRQAASRAPSPPQDPAPSPPHAPPAPSPPQAPALTPPQDPALTPPRAPTPTPPXAPLPAPSKSRAPPAPPPAHTRATKKAKVDAAKNKDPGYDCTQEELDAYVASEVKRQFKPRSPEKKIPIDPNVRNFFRGMSAPVKEAIKLSDYERTLKKASSGKSKPVPQLGEQPNQEIEPLVIGEDMTIEEFIIDTGLTTDQLLGVEPIEKAELKYMYELDKPLVKPELVQSLPTQMYKFHQLYMEMSATGREMIGARIRDPDFLQGDDILXINFKGIYEVYQLDALDVSIMSCWILMEIQRARRRRVFNTGFIDPRRVNVAMLDQYPQETEDNLVHLLKAQHYKTFILLPYNTEFHWVLLLFDLSACTINVYDSMDKNESTFDKVFELIDMAWYRFHHLVRGNWRERLRRRFKFSCAKQKQGTNLCGYYVCEYCHCLADQIITTRELDFIRMRDNLTTHKEFIAAVQEQLMGFINKEILDPKGEFYYDGNTIHRSLASELAASTTTTSK

SEQ ID NO: 175194 - protein, 1522 aa, Oryza sativa
  Clone ID: PAT_MRT4530_73063C.1.pep
MPATAAAAAARSACRSSAACLLLLRSSNCCLRFGYDGGTAAAAWWCRRMANLSLPSLRDQPPTPMRSRRRQRRDDEDDDSQPAEALLGTCRGWASLSISRITFLRCLSAKNIFFECPIANFAYKDAMDLDPDDATLFSNRSLCWLRRGHGGKALLDAHECRKKQPDWSKACYRLGASLMSLKDYGSACDALFDGLKLDPADVQIENALRYPIFPFVYITNVGSFSELEVISKHQGQVNLFFLDGDSLMDRQWMYADRRSKEFIDGVHYFLRVAEANRQRGFICCPCNKCKNQKEYSASRTIHFHLFESGFMPSYNCWTSHGEQGVEMEEDEVEDDNIPDFAQYVGFEGNQTGEEEIAADGNDVAEDLGQMLQDAREDCESEKEAHKLDKMLEDHRTSLYPGCEQGHKKLDTTLELLQWKAKNGVSDKAFGDLLKLVKNILPGGNKLPETTYEAKKIVCPLGLEVHKIHACPNDCILYRGEEYENLEACPVCKALRYKIRRDDPGEVDGQLTKKRVPAKVMWYFPIIPRLRRLFRNKGNARMLRWHAEERQQDGMLRHPADGSQWRNIDRKFKEFGKDARNIRFGLSTDGMNPFGEMSSGHSTWPVTMCIYNLPPWLCMKRKYIMMPIIIQGPKQPGNDIDVYLRPLVEDLKQLWKKEGVPVWDEDKQEEFNLRALLFVTINDWPALTNLSGQSNKGYKACTHCMDETESTYLKHCRKVVYMGHRRFLAANHPVRKKGKHFEHKADHRTKPKHRSGKIVFAMVKDLKVVFGKGPGSQHIESEDGHAAMWKKNSIFWELPYWEFLDTPEHPGRTRGKGVIPWKIGFKEDIHTYRSRMRSKRDTEAKIADLEFRVSSYELNMQEEVARKVDERMAAHRSHDPQPTIPPAMVSPSGNRSSCASTGQVGSQSMDAMQTQDESTCPVDDITQRTPCELHIPFKNLSIKVASGMAIPTDPSGTYHCRPIPAGYSKVEVELVEGAYEDLELDYPGGDGETHLRDTSHAIILWRRRYIILPGRQAASRAPSPPAPPSPPQDPAPSPPLAPPAPSPPQAPASTPPQDPAPTPPHAPTPTPPQAPLPAPSKSRAPPAPPPAHTRATKKAKVDAAKNKDPGYDCTQEELDAYVASEVKRQFKPRSPEKKIPIDPSVRNFFRGMSASVKEAIKLSDYERTLKKASSGKSKPVPQLGEQPNQEIEPLVTGKEMTIEQFITDTGLTTDQLLGVAPIEKAEVKYMYELGKPLVKPELLQSLPTQMYKFHQLYMEMSATGREMIGARIRDTDFLQGDDILWINFRGIYELYQLDALDVSIMSCWILMEIQRARRRRVFDTGFIDPRKVNVAMLDQYPQETEDNLVHLLKAQHYKTFILLPYNTEFHWVLLLFDLDACTINVYDSMDKKESTFDKVFELIDRAWYRFRHLVRGKWRERLRRKFKFPCAKQKQGTNLCGYYVCEYCHCLANQIITTRELEFIRMRDNLTTHKEFTAAVQEQLMGFINEEILDPKGEFYYDGNTIHRSLASELAASTTTSKS

SEQ ID NO: 175195 - protein, 108 aa, Oryza sativa
  unsure (1)..(108): unsure at all Xaa locations
  Clone ID: PAT_MRT4530_73064C.1.pep
MMMLLAAAAAAWRVEALSVKATDTECIDESVPYEGDTVXGNFFIFLHDIYWSSDHPGIDLTVPASILLVFSMLLILMPGSVTICGPDRLRAPTMVIYRLMSAYFPTWK

SEQ ID NO: 175196 - protein, 1554 aa, Oryza sativa
  Clone ID: PAT_MRT4530_73065C.1.pep
MADRDEEQILYDTIAEGSSQYWNEEEGNEDPNQYLNEEGNVERDAEGNQQGHVERDVEGNQEEEASGSQPSVGQKRARGQRGAAKKLEGRHIITEVEEDGRPSAPAEAAKKYVRHSGWVVRDNVPVSTVYWRRTRARGDHETFVPDSEKEMLWTTMLETFTLPAGTEDKVKRWTLKKMAEQFQSFKGDLYQKYILKGQTPNFDTFPKLRDHWYEFVAYKTADGSLVFGDQIREAARRLTDAVEASSQGTFQPDRDRDELTLALQTPEHPRRTRGKWVIPWKIGFKEDIHTYRSRMRSKRDTEAKIADLEFRVSSYELSMQEEVARKVDERMAAHRSYDPQPTIPPAMVSPSGNRSSCASTGQVGSQSMDAMQTQDESTYPIDDITQRTPCELHIPYKNLSIKVVSGMAIPTDPSGTYHCRPIPAGYSKVKVELVEGAYEDLELDYPGGDGETHLRDTSHAIILWRRRYVILPGRQAASCAPSPPAPPSPPQDPAPSPPHAPPAPSPPQAPAPTPPQDPAPTPPRAPTPTPPQAPLPAPSKSRAPPAPPPAHTRATKKAKVDAAKNKDPGYDCTQEELDAYVASEVKRQFKPRSPEKKIPIDPSVRNFFRGMSAPVKEAIKLSDYERTLKKASSGKSKPVPQLGEQPNQEIEPLVTGEDMTIEEFIINTGLTTDQLLGVEPIEKAELKYMYELGKPLVKPELVQSLPTQMYKFHQLYMEMSATGREMIGARIRDPDFLQGDDILWINFKGIYEVYQLDALDVSIMSCWILMEIQRARRRRVFDTGFIDPRRVNVAMLDKYPQETEDNLVHLLKAQHYKTFILLPYNTEFHWVLLLFDLSACTVNVYDSMDKKESTFDKVFELIDRAWYRFRHLVRGNWRERLRRRFKFPCAKQKQGTNLCGYYVCEYCHCLADQIITTRELDFIRMRDNLTTHKEFIAAVQEQLMGFINEEILDPKAASSVRPQATKMMGENRARVVALVVAVVVVVVGVAGNVAAAQAAVTVADLQRVAGSLQMYVDALPQMAKIRGYGFQRGQAVPINLTIGMYQKTWKFHRDLPATPVFVYGQCPDSATFPGPTIMARHDVPLFVRWENHLPASHILPWDPTVPTAIPKNGGVPTVVHLHGSAHPPQSDGSAFAWFTAGFAEKGPAWTQATYRYPNVQPPGNLWYHDHALGLTRANLLAGLLGAYVIEKPEVDTPMDLPCDDDDLHLVIADRSFNVDGSLYMNSTGVAPNIHPQWAPEYFGEAITVNGKAWPFLVVHRRRYRLRILNASNARYFNVSLSNGLPIHVVGSDASYLSAPVTVSNLLLSPAEIFDVVVDFSQSPTAEIELLNSAPYPFPTGAAPGPLNGKVMKFIVQPNGPLDPPDNSTVPDHEVPYASVTALPPTTMTRYIVMYEYLTPTGQSTHLYINGLRLEDPVTETPKSGTTELWQVINLTGDNHPLHIHLGMFQAVKMQQLVNLQAFTDCMTAVNDAVKCNVDQHAVGPVVPVPDHEKTWKNVIKVPPGFVTSVVIAFKLVDTNQTYPFDTTAEPGYVYHCHILDHEDNAMIRPLKLLA

SEQ ID NO: 175197 - protein, 67 aa, Oryza sativa
  unsure (1)..(67): unsure at all Xaa locations
  Clone ID: PAT_MRT4530_73066C.1.pep
RVLREIVMSGSISKCSQRLQPKPHNYNPSFRIGDKHVPSAFQPSPGXREPRATHXGDTFGGXQXGWX

SEQ ID NO: 175198 - protein, 1196 aa, Oryza sativa
  unsure (1)..(1196): unsure at all Xaa locations
  Clone ID: PAT_MRT4530_73067C.1.pep
MHLDLSDLDLSPSRRPPRDAAPRRRRATPPPSTPRNAAAACQRHAAAAIATPPPPSPPRAQCRRRHATPPXPTAATPPRQPPPRCRHTAVNERERERSNEREXRERTRQRTLPXERERERERSNEQKTCCRSRPSSLSGRASPRRNWSRQMADRDEEQILYDTIAEGSSQYWNEEEGNEDPNQYLNEEGNVERDAEGNQQGHVERDVEGNQEEEASGSQPSVGQKRARGQRGAAKKLEGRHIITEVEEDGRPSAPAEAAKNYVRHSGWVVRDNVPVSTVYWRRTRARGDHESFVPDSEKEMLWTTMLETFTLPAGTEDKVKRWTLKKMAEQFQSFKGDLYKKYILKGQTPNFDTFPKLRDHWDEFVAYKTGEQGQAMMERNKENAAKKKYHHHLGSGGYSVAMPKWEEMEASLIERGIEPATANWPERSKFWYYAHGGTLNPADGSLVFGVQIREAAQRLTDAVEASSQGTFRPDRDRDELTLALQTPEHPGRTRGKGVIPWKIGFKEDIHTYRRGSSXSRMRSKRDTEAKIADLEFRVSSYELNMQEEVARKVDERMAAHRSHDPQPTIPPAMVSPSGNRSSCASTGQVGSQSMDAMQTQDESTCPVDDITQRTPCELHIPFKNLSIKVASGMAIPTDPSGTYHCRPIPAGYSKVEVELVEGAYEDLELDYHGGDGETHLRDTCHAIILWRRRYIILHGRQAASRAPSPPAPPSPPQDPAPSPPHAPPAPSPPQAPASTPPQDPAPTPPRAPTPTPPQAPLPAPSKATKKAKVDAAKNKDPGYDCTQEELDAYVASEVKRQFKPRSPEKKIPIDPSVRNFFRGMSASVKEAIKLSDYERTLKKASSGKSKPVPQLGEQPNQEIEPLVTGKEMTIEQFITDTGLTMDQLLGVAPIEKAEVKYMYELGKPLVKPELLQSLPTQMYKFHQLYMEMSATGREMIGARIRDTDFLQGDDILWINFRGIYELYQLDALDVSIMSCWILMEIQRARRRRVFDTGFIDPRKVNVAMLDQYPQETEDNLVHLLKAQHYKTFILLPYNTEFHWVLLLIDLEACTVNVYDSMDKKESTFDKVFELIDRAWYRFRHLVRGKWRERLRRKFKFPCAKQKQGTNLCGYYVCEYCHCLADQIITTRELDFIRMRDNLTTHKEFIAAVQEQLMGFINEEILDPKGEFYYDENTIHRSLASELAASTTTSKS

SEQ ID NO: 175199 - protein, 1106 aa, Oryza sativa
  unsure (1)..(1106): unsure at all Xaa locations
  Clone ID: PAT_MRT4530_73068C.1.pep
MADRDEEQILYDTIAEGSSQYWNEEEGNEDPNQYLNEEGNVERDAEGNQQGHVERDVEGNQEEEASGSQPSVGQKRARGQRGAAKKLEGRHIITEVEEDGRPSAPAEAAKNYVRHSGWVVRDNVPVSTVYWRRTRARGDHESFVPDSEKEMLWTTMLETFTLPAGTEDKVKRWTLKKMAEQFQSFKGDLYQKYILKGQTPNFDTFPKLRDHWDEFVAYKTGEQGQAMMERNKENAAKKKYHHHLGSGGYSVAMPKWEQMEASLIERGIEPATANWPERSKFWYYAHGGTLNPADGSLVFGYQIQEAARRLTDAVEASSQGTFRPDRDRDELTLALQTPEHPGRTRGKGVIPWKIGFKEDIHTYRSRMRSKRDTEAKIADLEFRVSSYELNMQEEVARKVDERMAAHRSHDPQPTIPPAMVSPSGNRSSCASTGQVASGMAIPTDPSGTYHCRPIPAGYSKVEVELVEGAYEDLELDYPGGDGXYIILPGRQAASXDPAPTPPRAPTPTPPQAPLPAPSKSRAPPAPPPAHTRATKKAKVDAAKNKDPGYDCTQEELDAYVASEVKRQFKPRSPEKKIPIDPSVRNFFRGMSASVKEAIKLSDYERTLKKASSGKSKPVPQLGEQPKQEIEPLVTGKEMTIEQFITDTGLTTDQLLGVAPIEKAEVKYMYELGKPLVKPELLQSLPTQMYKFHQLYMEMSAAGREMIGARIRDTDFLQGDDILWINFKGIYELYQLDALDVSIMSCWILMEIQRARRRRVFDTGFIDPRRVNVAMLDQYPQETEDNLVHLLKAQHYKTFILLPYNTEFHWVLLLFDLEACTVNDVKLRKPAGAMAAGSSHVSADARKLVGKVAVITGGASGIGACTARLFVKHGARVVVADIQDELGASLVAELGPDASSYVHCDVTNEGDVAAAVDHAVARFGKLDVMFNNAGVSGPPCFRMSECTKEDFERVLAVNLVGPFLGTKHAARVMAPARRGSIISTASLSSSVSGAASHAYTTSKHALVGFTENAAGELGRHGIRVNCVSPAGVATPLARAAMGMDDEAIEAIMANSANLKGAGALKADDIAAAALFLASDDGRYVSGQNLRVDGGLSVVNSSFGFFRD

SEQ ID NO: 175200 - protein, 1253 aa, Oryza sativa
  unsure (1)..(1253): unsure at all Xaa locations
  Clone ID: PAT_MRT4530_73069C.1.pep
MSLSVKWFSQAKEKSSELRTRRHCLGHPRADAAAISRRRLALVVIATASVSSALGCRRPPSFRRRRRPRHDTTPWPRDATTPPXPPPRHATAAPRATAATPPPRHAPPAAGAPRCRRATPPPRNAATGRSATTAPRRTPPRRHAAAPRAGLMPRAAPRCRRAAPPPLRCRHTAVQLPPHRERERANEREREQXNERERERANERERANEQKRRCRSCPSSRSGRASPRRNSPRQMADXDERQILYDTIAEGSSQYWNEEEGNEDPNQYLNEEGNVERDAEENQEGHVERDVEGNQEEEASGSQPSVGQKRARGQRGAAKKLEGRHIITEVEEDGPSAPAEAAKNYVCHSGWFVRDNVSVITVYWRRTRARGDHKSFVPDSEKEMLWTTMLETFTLPAGTEDKVKRWTLKKIAEQIQSFKGELYKKYILKGQTPNFDTFPKLRDHWDKFVAYKTGEQGQAMMERNKENAAKKKYHHHLGSGGYSVAMPKWEEMEASLLERGIEPATANWPERSKFCYYAHALNPADGSLVFGDQIREAARRLTDTVEASSQGTFRLDRERDELSLALQTPEHPGRTRGKGVIPWKIGFKEDIYTYRSRMRSKRDTEAKIADLEFRVSSYELSIQEEVARKVDERMAAHRSNDPQPTIPPAMVSPSGNRSSCASTGQVGSQSMDAMQTQDESTCPVDDITQRTPCELHIPFKNLSIKVASGMAIPTDPSGTYHCRPIPVGYSKVEVELVEAPSPPQAPAPSPPHAPAPSPPHAPTPSPHAPAPSPPQAPAPTPPRAPPTQASAVTPPQAPAPTPPQAPCPAPSKSRSHQAPPLVRTRATKKVKVDAAENKDPGYDCTQEELDAYMASEVKRQFKPRSLEKKIPIDPSVMNFFRGMSAPAKEAIKLSDYERTLKKASSGKSKPVPQLGEQPNQEIEPLVTGKEMMIEEFITDTGLTTDQLLGVAPIEKAKVKYMYELGKPLVKPELLQSLPTQMYKFHQLYMEMSATGREMIGARIRDTDFLKGDDILWINFKGIYELYQLDALDVSIMSCWILMEIQRARRWGVFDTGFIDPRKVNVAMLDQYPQATEDNLVHLLKAQHYKTFILLPYNTEFHWVLLVFDLSACTVNVYDSMDKKESTFDKVFELIDRAWYRFRHLVRGKWRERLRRKFKFPCAKQKKGTNLCGYYVCEYCHCLADQIITTRELDFIRMRDNLTTHKEFIAAVQEQLIGFINEQILDPKGKFYYDGNTIHRSLASEQATTTTSKS

SEQ ID NO: 175201 - protein, 193 aa, Oryza sativa
  Clone ID: PAT_MRT4530_7306C.1.pep
MRDRQAYLPRSFWVEALHTATYLMNRHPTKTLQHHTPYFALHGLGLHIHRSSKSDLIVYSDADWAGCPHTHRSSSGYAVTVSRSNTEAEYRAVANAVAKVTWLRQLLHELHSPPSTMTLVYCDNVSAMYLYSNSVQHQRTKHVEIDLHFVREKVALGAVRVLHVPTSSQYADIFTKGFPSPVFTEFCSSLNVR

SEQ ID NO: 175202 - protein, 136 aa, Oryza sativa
  unsure (1)..(136): unsure at all Xaa locations
  Clone ID: PAT_MRT4530_73070C.1.pep
SAAECEFPPGLGERWRSRDRHPGRWRGTAGCGRGGWRWRGDXRRSXXAXXTXVRAAXAASAGSGGWRXEXAXGXLRPXGGGXXXXETXAGDHNHXDXTTTXVXTPPXPPPHVPAPKTLLAAPAGTQLRRPPIWGTP

SEQ ID NO: 175203 - protein, 558 aa, Oryza sativa
  Clone ID: PAT_MRT4530_73071C.1.pep
MQQRRKSVFASAPFAMKQAALGAGVAARRNGAPLSLAAVVFALFVFATFLYNEDIKSIADFPFGAGALRAKSPDLHVLQETVGAAHLAAGSIAKRGEEVIVRVLDAPASTAMAAAAGSSSNNSTIEVAKANANANANAADAGVKVDEGQERERDVTLPSVKEGGADEARRREDEEAAEKESSAKAAAATAALRTVVSVPDTCDLYRGNWVYDEVNAPVYKESQCEFLTEQVTCMRNGRRDDSYQKWRWQPTDCDLPRFDARLLLERLRNKRLMFVGDSLNRNQWESMVCLVQSVIPKGKKTLTKFVNGGNSNIFYAHEYNATVEFYWAPFLVESNSDNPQVHSVPDRVIQWHSIAKHAHNWLGVDYLIFNTYIWWLNTLDMKVLKGSFDQGATEYVEVDRPVAYKEVLKTWAKWVDRNIDPNRTTVFFMSMSPNHITPEAWGNYGGIKCAMETLPITNRTTSLDVGTDWRLYAGAQEVLQTFRRVPVHLVDITALSELRKDAHTSVHTLRQGKLLTPEQQSDPKTYADCIHWCLPGLPDTWNQFLYARIASAPWSSDQ

SEQ ID NO: 175204 - protein, 903 aa, Oryza sativa
  unsure (1)..(903): unsure at all Xaa locations
  Clone ID: PAT_MRT4530_73072C.1.pep
MADRDEEQILYDTIAEGSSQYWNEEEGNKDPNQYLNEEGNVERDAEGNQQGHVERDVEGNQEEEASGSQPSVGQKRARGQRGAAKKLEGRHIITEVEEDGRPSAPAEAAKNYVRHSGWVVRDNVPVSTVYWRRTRARGDHESFVPDSEKEMLWTTMLETFTLPAGTEDKVKRWTLKKMAEQFQSLKGDLYQKYILKGQTPNFDTFPKLRDHWDEFVAYKTGEQGQAMMERNKENAAKKKYHHHLGSGGYSIAMPKWEEMEASLIERGIEPATANWPERSKFWYYAHGGTLNPADGSLVFGDQIREAARRLTDAVEASSQGTFRPDRDRDELTLALQTPEHPGRTQGKGVIPWKIGFKEDIHTSRSRMRSKKDTEAKIADLEFRVSSYELNMQKEVARKVDERMAAHRSHDPQLTIPPAMVSPSGNRSSCASTGQVASGMAIPTDPLGTYHCRPIPAGYSKVEVELVEGAYEDLELDYPGGDGXYIILPGRQAASRAPSPPAPPSPPQDPAPSPPHAPPAPSPPXLQHRLLLRILHRLLLGLLHILLRKLLFRHLQKVKRQFKPRSPEKKIPIDPSVKNFFRGMSASVKEAIKLSDYERTLKKASSGKSKPVPQLGEQPNQEIEPLVTGKEMTIEQFITDTGLTTDQLLGVAPIEKAEVKYMYELGKPLVKPELLQSLPTQMYKFHQLYMEMSATGREMIGARIRDTDFLQGDDILWINFRGIYELYQLDALDVSIMSCWILMEIQRARRQRVFDTGFIDPRRVNVAMLDQYPQETEDNLVHLLKAQHYKTFILLPYNTEFHWVLLLFDLSACTVNVYDSMDKKESTFDKVFELIDSCIHGLRSVAGVRSAAGVVISVAALFSRTFSISAAPLFPLRGLAIKVEVIETDLAEDDAADTPPPPVI

SEQ ID NO: 175205 - protein, 937 aa, Oryza sativa
  unsure (1)..(937): unsure at all Xaa locations
  Clone ID: PAT_MRT4530_73073C.1.pep
MADRDEEQILYDTIAEGSSQYWNEEEGNEDPNQYLNEEGNVERDAEGNQQGHVERDVEGNQEEEASDSQPSVGQKRARGQRGAAKKLEGRHIITEVQEDGRPSAPAEAAKNYVRHSGWVVRDNVPVSTVYWRRTRARGDHESFVPDSEKEMLWTTMLETFTLPAGTEDKVKRWTLKKMAEQFQSFKGDLYQKYILKGQTPNFDTFPKLRDHWDEFVAYKTGEQGQAMMERNKENAAKKKYHHHLGSGGYSVAMPKWEEMEASLIERGIETATANWPERSKFWYYAHGGTLNPADGSLVFGDQIREAARRLTDAVEASSQGTFRPDRDRDELTLALQTPEHPGRTRGKGVIPWKIGFKEDIHTYRSRMRSKRDTEAKIADLEFRVSSYELNMQEEVARKVDERMAAHRSHDPQPTIPPAMVASGMAIPTDPSGTYHCRPIPAGYSKVEVELVXGAYEDLELDYPGGDGETHLRDTSHAIILWRRRYIILPGRQAASXDPAPTPPRAPTPTPPQAPLPAPSKSRAPPAAPPAHTRATKKAKVDAAKNKDPGYDCTQEELDAYVASEVKRQFKPRSPEKKIPIDPIVRNFFRGMSASVKEAIKLSDYERTLKKASSGKSKPVPQLGEQPNQEIEPLVTGKEMTIEQFITDTGLTTDQLLGVAPIEKAEVKYMYELGKPLVKPELLQSLPTQMYKFHQLYMEMSATGREMIGARIRDTDFLQGDDILWINFTHIYELYQLDAVDVSIMSCWILMEIQRARRRRVFDTGFIDPRKVNVAMLDQYPQETEDNLVHLLKAQHYKTFILLPYNTEFHWVLLLFDLEACTVNPSAAAIPDVAVAREDRRRGRQAVAVLVRPFAVAEDRRSTIAAVDPKTAAVLTSSPSPSVGLPPLFWSPRRRSPASVRRPSRRAAAAGGDVIADVIVPVSREPVVDRSISAVRFG

SEQ ID NO: 175206 - protein, 1213 aa, Oryza sativa
  unsure (1)..(1213): unsure at all Xaa locations
  Clone ID: PAT_MRT4530_73074C.1.pep
MHLDLSDLDLSPSRRPPRDAAPRRRRATPPPSTPRNAAAACQRHAAAAVATPPPPSPPRAQCRRRHATPPPPRHATPPSSRHAGATTAPQRHAAAAVGTPAGQPPPRCRHTAVYERERERSNERERERTRQRTLPRQRERERERSNEQKTCCRSRPSSLSGRASPRRNWSRQMADRDEEQILYDTIAEGSSQYWNEEEGNEDPNQYLNEEGNVERDAEGNQQGHVERDVEGNQEEEASGSQPSVGQKRARGQRGAAKKLEGRHIITEVEEDGRPSAPAEAAKNYVRHSGWVVRDNVPVSTVYWRRTRARGDHESFVPDSEKEMLWTTMLETFTLPAGTEDKVKRWTLKKMAEQFXSFKGDLYQKYILKGQTPNFDTFPKLRDHWDEFVAYKTGEQGQAMMERNKENAAKKKYHHHLGSGGYSVAMPKWEQMEASLIERGIEPATANWPERSKFWYYAHGGTLNPADGSLVFGYQIQEAARRLTDAVEASSQGTFRPDRDRDELTLALQTPEHPGRTRGKGVIPWKIGFKEDIHTYRSRMRSKRDTEAKIADLEFRVSSYELNMQEEVARKVDERMAAHRSHDPQPTIPPAMVSPSGNRSSCASTGQVGSQSMDAMQTQDESTCPVDDITQRTPCELHIPFKNLSIKVASGMAIPTDPSGTYHCRPIPAGYSKVEVELVEGAYEDLELDYPGGDGETHLRDTCHAIILWRRRYIILPGRQAASRAPSPPAPPSPPQDPAPSPPHAPPAPSPPQAPASTPPQDPAPTPPRAPTPTPPQAPLPAPSKATKKAKVDAAKNKDPGYDCTQEELDAYVASEVKRQFKPRSPEKKIPIDPSVRNFFRGMSASVKEAIKLSDYERTLKKASSGKSKPVPQLGEQPNQEIEPLVTGKEMTIEQFITDTGLTTDQLLGVAPIEKAEVKYMYELGKPLVKPELLQSLPTQMYKFHQLYMEMSATGREMIGARIRDTDFLQGDDILWINFRGIYELYQLDALDVSIMSCWILMEIQRARRRRVFDTGFIDPRKVNVAMLDQYPQETEDNLVHLLKAQHYKTFILLPYNTEFHWVLLLIDLEACTVNVYDSMDKKESTFDKVFELIDRAWYRFRHLVRGKWRERLRRKFKFPCAKQKQGTNLCGYYVCEYCHCLADQIITTRELDFIRMRDNLTTHKEFIAAVQEQLMGFINEEILDPKGEFYYDGNTIHRSLASELAASTTTSKS

SEQ ID NO: 175207 - protein, 687 aa, Oryza sativa
  Clone ID: PAT_MRT4530_73075C.1.pep
MSSPLAVVSSFWKDFDLEKERGGLDEQGLKIAENQETSQKNRRRLAESTRDFKKASSDDKLSLFNSLLKSYQEEVDNLTKRAKFGENAFLNIYQKLYEAPDPYPALASMAEQDQKLSELETENRKMKLELEEYRAEAAHLKNQQATIRRLEERNRQLEQQMEEKVREMVEMKQRSLAEDSQKTLEALKDRERALQDQLRQATESVKNMQKLHESAQSQLFELRTQSEEDRAAKETEVNLLLDEVERAQARLVSLEREKGDLRSQLQTTNEDATNSSDYVDSSDILESSLNAKEKIISELNAELRSIENTLSSERETHVNELKKLTALLSEKENALTELKKELQERPTRRLVDDLKKKVQILQAVGYNSIEAEDWELATNGEEMSKLEALLLDKNRKMEHELTQLKVKISEKSNLLEEAEKKIAELTAKAEEQQKLILKLEDDILKGYSSTDRRTSLLNDWDLQEIGSNEVAEGTDPRHAPQDQDQSSMLKVICNQRDRFRTRLRETEEELRRLKEKYEMLVVELEKTKADNVQLYGKIRYVQDYSHEKIVSRGPKKYAEDVESGSSDVETKYKKMYEDDINPFAAFSKKEKDQRYKELGLRDKITLSSGRFLLGNKYARTFIFFYTIGLHLLVFTLLYRMSALSYLRRLNTFSVDKNFPDMETGWMGNDRMRRGRAFEPLLCKLLYH

SEQ ID NO: 175208 - protein, 80 aa, Oryza sativa
  Clone ID: PAT_MRT4530_73076C.1.pep
HSSHNINRPARVELECYNKYSCMVRQLKKAIEHGYLEKQRSGLIILHAELNRKRQTMGRTYLQRYIRQTFLQKAASTKRR

SEQ ID NO: 175209 - protein, 329 aa, Oryza sativa
  unsure (1)..(329): unsure at all Xaa locations
  Clone ID: PAT_MRT4530_73077C.1.pep
WRRLGRREGIMYTFVSLRSGEYTVSRRKASWHHASWDHTRSWNKEEKLHISXNSHPTWRVSMMCSMWGPPVGSSPNLQPAPPHPATAAPALSRATSPTSPASSPFPRLPAPTPSLSRPRPRXMAGIQFLNPASLCTSTSPCRPAKSGRSRPPPCTHHRHNFSALQPPLAIASRHAKPRRLHHRIRHRVKHPGHRPIVAVRRRNPVRPMRRSSRSPSDSRRLQPPGWAPTGDAPGWTQAPRHSIRVSTWTSASEDRWHVPHDIQWGDNQPPRSSXTGEIQYNLTEHITQTQEWQQSANAQFANINNMMQQQHDDLQAYFRFQGFNPYQGP

SEQ ID NO: 175210 - protein, 1745 aa, Oryza sativa
  unsure (1)..(1745): unsure at all Xaa locations
  Clone ID: PAT_MRT4530_73078C.1.pep
MDRQWMYADRRSKEFIDGVHYFLRVAEANRQRGFICCPCNKCKNQKEYSASRTIHFHLFESGFIPSYNCWTSHGEQGVEMEEDEVEDDNIPDFAQYVGFEGNQTGEEEIAADGNDVADDLGQMLQDAREDCESEKEAHKLDKMLEDHRTSLYPGCEQGHKKLDTTLELLQWKAKNGVSDKAFGDLLKLVKNILPGGNKLPETTYEAKKIVCPLGLEVHKIHACPNDCILYRGEEYENLEACPVCKALRYKIRRDDPGEVDGQLTKKRIPAKVMWYFPIIPRLRRFFRNKGNARMLRWHAEERQQDGMLRHPADGSQWRNIDRKFKEFGKDARNIRFGLSTDGMNPFGEMSSGHSTWPITMCIYNLPPWLCMKRKYIMMPIIIQGPKQPGNDIDVYLRPLVEDLKLLWRKEGVPVWDEDKQEEFNLRALLFVTINDWPALSNLSGQSNKGYKACTHCMDETESTYLKHCRKVVYMGHRRFLAANHPVRKKGKHFEHKADHQFRNSENVNENENDRTNESENENDRTKTSENEGTNVNENKRTNVNENERTNMNELGNMADRDEEQILYDTIAEGSSQYWNEEEGNEDPNQYLNEEGNVERDAEGNQQGHVERDVEGNQEEEASGSQPSVGQKRARGQRGAVKKLEGRHIITEVEEDGRPSAPAEAAKNYVRHSGWVVRDNVPVSTVYWRRTRARGDHESFVPDSEKEMLWTTMLETFTLPVGTEDKVKRWTLKKMAEQFQSFKGDLYQKYILKGQTPNFDTFPKLRDHWDEFVAYKTGEQGQAMMERNKENAAKKKYHHHLGSGGYSVAMPKWEQMEASLIERGIEPATANWPERSKFWYYAHGGTLNPADGSLVFGDQIREAARRLTDAVEASSQGTFRPDRDRDELTLALQTPEHPGRTREKGVIPWKIGFKEDIHTYRSRMRSKRDTEAKIADLEFRVSSYELNMQEEVARKVDERMAADRSHDPQPTIPPAMVSPSGNRSSCASTGQVGSQSMDAMQTQDESTCPVDDITQRTPCELHIPFKNLSIKVASGMAIPTDPSGTYHCRPIPAGYSKVEVELVEGAYKDLELDYPGGDGETHLRDTCHAIILWRRRYIILPGRQAASRAPSPPAPPSPPQDPAPSPPHAPPAPSPPQAPASTPPQDPAPTPPRAPXLLPRKLLFRHLQSQGPPQLHRLPTQGQRRRRQLTPPRTRTRGTIXTQEELDAYVASEVKRQFKPRSPEKKIPIDPTVRNFFRGMSASVKEAIKLSDYERTLKKASSGKSKLVPQLGEQPNQEIEPLVTGKEMTIEQFITDTGLTTDQLLGVAPIEKAEVKYMYELGKPLVKPELLQSLPTQMYKFHQLYMEMSATGREMIGARIRDTDFLQGDDILWINFRGIYELYQLDALDVSIMSCWILMEIQRARRRRVFDTGFIDPRKVNVAMLDQYPQETEDNLVHLLKAQHYKTFILLPYNTEFHWVLLLIDLEACTVNVYDSMDKKESTFDKVFELIDRAWYRFRHLVRGKWRERLRRKFKFPCAKQKQGTNLCGYYVCEYCHCLADQIITTRELDFIRMRDNLTTHKEFIAAVQEQLMGFINEEILDPKGGGKTRGEMNKDDEVIGTFDTAVEAALAYDATARWLYGSKAVTNFPTTTGDGDDGLPVAEPAVVVVAAPAFAGEEMDKQVAPAAATAAETVAADPGAGELGPVVLCHELEATNGWQYEAYGYGYSMGLELLENYAYAGDVQPLGLGGSTSNAAAANDCLWMF

SEQ ID NO: 175211 - protein, 177 aa, Oryza sativa
  Clone ID: PAT_MRT4530_73079C.1.pep
MTWRSGGQNPKRIKNGSLTNMGLPNHCGRGYRVPAEVTAVFILPYPVISPVTAVTAQLSALRFAVTDNGRRQWQTQEMAVEVEDGGGRAAGVEDSGGRAALQRRKTAATVQARDDGGRAADVGDSGGCASAPVKLWSKMHQRSLNLSGGFTYVHEFAKRTSRSLNLVYCIIPVQSRV

SEQ ID NO: 175212 - protein, 163 aa, Oryza sativa
  Clone ID: PAT_MRT4530_7307C.1.pep
MEGAATASSAAPVASLFPGLPPLPPLPALPALPPLPPLPALPPLPPLPPLPPLPSPGTTTTRPRPPSPPPTECLTSLVELLPCVDYLTNDATAPPGACCDGFRSLVGSALICLCHGINGDMSRMISRPIDPVRMVLLPAMCSTMLPPQSLFICYTETVPPLVP

SEQ ID NO: 175213 - protein, 67 aa, Oryza sativa
  Clone ID: PAT_MRT4530_73080C.1.pep
MPLDRIWWDGDGGGDGDGDGGGVGDDEDREQQHQRDDETGEFDEISWVSRQVAGIPTDVPLANADAI

SEQ ID NO: 175214 - protein, 209 aa, Oryza sativa
  Clone ID: PAT_MRT4530_73081C.1.pep
MPPRRPAPRRGSAASPRVLENACRDDDELRAILGDSIGNPELMKQRIQERVRKKGRAQFNKSKTGSIVAFKVSFREKKSPCLDINIIYILQVIQAWYVMGRLGAYNSSNLQLANSMLDYDPSYDSDQASGVMPSSFHDISDVEFQDNWGRVWVDLGTSDYLGLDVLLNCLTQLSSEHLGIKQVVFGGKKMGDWEEGMKNSDYGYRHFKI

SEQ ID NO: 175215 - protein, 366 aa, Oryza sativa
  unsure (1)..(366): unsure at all Xaa locations
  Clone ID: PAT_MRT4530_73082C.1.pep
APDLGKKPDPAALLTTNVGRRQEXRRRTPVAVAGCLRVLPTTGRRAAAGSXLHHRRPIVVAIPAAIXHNSTRCNSPRPPPSPVPTAFPVASHPARSGRNGAGLAVTAIAAPGGSLDRPSARRRGEPRRRHPCGHAALPAAARATVRRRREVGERGGRIVASQATPGESDVIEEFATGMAMDLCGIHDHWGLNPYGEKAIISSLQPNSSSAGDGVSTQRRRCFVWTAGSSEEIIKKGKENNRRKSMHLVETTICLRSIAASRGDQIQAKRQRRHDLTVAPLDDGYGTPASDDMSFVWLRRSRATAAAVDSAASCAVFTAVTTARDSLGQPSDKGIMVLMRSVAAPGAQANPTPELHQGKRGGRRLRL

SEQ ID NO: 175216 - protein, 129 aa, Oryza sativa
  unsure (1)..(129): unsure at all Xaa locations
  Clone ID: PAT_MRT4530_73083C.1.pep
CPYRKGNHLSIRXQLAPSVGTSKRNHXERMPPKKVAKEKVAKRKESEAGGEMAAEEGVEPSTPLAEAGVAPSALAASTGQMSDTVDAARVVVAARALQTRAEILSTSQPLPPAGTPTPRRLLPFATAAA

SEQ ID NO: 175217 - protein, 84 aa, Oryza sativa
  unsure (1)..(84): unsure at all Xaa locations
  Clone ID: PAT_MRT4530_73084C.1.pep
MVKRFRVSWHPGAREAVGYSWPCGPPGTARPXPGRAWAEACRGXTXRPTHXAXPXQPTXXTHXPGTXQHASGPWAGPKARGAGM

SEQ ID NO: 175218 - protein, 267 aa, Oryza sativa
  unsure (1)..(267): unsure at all Xaa locations
  Clone ID: PAT_MRT4530_73085C.1.pep
MWDPPVSSLFSSPPLFSSSSDAASFIPPRRFFPRRRLPSPPPLPPFFARQPPPPSPLRAQTPTPPAPPPQTPTPPSAAAASPGSPPSLRRRRSSPPSXAGAGRLPPRALMQMPPPPPPPGLAPLPPFAGDGLRLPPRAPMQMPPQPPLSPGPAPLPPFASDGLRLHPRAPMQTPPPPPPGPAPLPPRAARRPPPPSPLRASRQAGATLLGIFLSPSALREAMTAPLPRPTMGTCARWGWQSLQRSSPCCGGRSGMTRHHRKSCCWLR

SEQ ID NO: 175219 - protein, 123 aa, Oryza sativa
  unsure (1)..(123): unsure at all Xaa locations
  Clone ID: PAT_MRT4530_73086C.1.pep
MEEAWIDRLPQDVLQRVIPLETPRDACRAAAVSPAFRAIADSDVVWGKFQPDDSSLQLADGELFPPPRSKKERFLXLSAGLLLLPDRLRGMWLDRGTGARCYMLSARALVIITGGETLCSPGS

SEQ ID NO: 175220 - protein, 208 aa, Oryza sativa
  Clone ID: PAT_MRT4530_73087C.1.pep
MTQKYFWITWTGFRAVTTYRLPLTNPWDTQQTKVLTVRYYDLRTVNTDLLHVHGVGEAGGAGDRGEHAHTLAHIVGPLVVCERRGGARHRLLPALLHPQPRSPAAAAAVPQPHSPADVIALPALGARCRSLSAGRTKDKKRKKKRERKKMMLTLLHSSKPVSRVQDAMWDKITQGVDLERFSKLGDRLYPVLRLRDAIQLETFLEGGK

SEQ ID NO: 175221 - protein, 226 aa, Oryza sativa
  unsure (1)..(226): unsure at all Xaa locations
  Clone ID: PAT_MRT4530_73088C.1.pep
LSPSLLSSSLSCARGCSPAAEGSAAISCWVSMGRSEQIDMGSSSVRPERCFLAQNNDHSFIHQPRHXHKQMMMTKQNILQSASTSRYCFYLCMIRHINAERSLSALVPKPRPWTKSFLLTGSASVARRTVVIITGVVFAAGRLSPLPPARWPPHPPTWTAASEDARVDVDVVRSHGRAASAAGLVPFSPLVSLPPAAAPRPFSQPDTVLSPPPVNRREEREERRER

SEQ ID NO: 175222 - protein, 170 aa, Oryza sativa
  Clone ID: PAT_MRT4530_73089C.1.pep
MEEGARQRHSGGAGVVVGVLVVDLEFVNVLEHHPPLVVAGGGRQINAERRSSALVPQPRPWTKSFLLTGSASAARRTVVIITGVVFAAGRLSPLPPARWPPHPPTWTAASEDARVCRPVGGTRSSRRRDAEVDVDVVRSHGRGGTASAAGLVPFSPLVSLPPAAAPRPFS

SEQ ID NO: 175223 - protein, 350 aa, Oryza sativa
  Clone ID: PAT_MRT4530_7308C.1.pep
MGIEKSYVAGEQAGLLLEKPFQIGEALRQGYTLDVEAEVQLVDRIKSKLRIKSSIHNKLEKTTMKKLGLKRAMHFGWPNTYVLTKAMGEMLLRQLGGDLPVVIVRPSIITSTFQDPMPGWIEETRTIDAIFVAYNDQTLPCFIFDGSVIFDLIPGDMVISAMMAAINSHWNKQAQVIYHVTSAHQNPIQLSLIEESMYKYFHTNPRTNKDGESIKNKRVLMFKRFAYFQAYMALRYKVPLEMMRAANALFGGIYSKNYNKLNRGYNILMTVAKLYAPYVFFKGCFDDTNLRKLSKAMAVDQNDVSIFNFDTRCINWSSYLVNTNIPAAIKCCLRPRESVADDRSESTWEK

SEQ ID NO: 175224 - protein, 194 aa, Oryza sativa
  Clone ID: PAT_MRT4530_73090C.1.pep
PAVGFRRVSPSELQECPPASRRRCGRSPAEGLCWSAVSASQPLGEASPPASKPVTTAKSRKCRILVSPYSISIYVSPYLAFRWRMERYKLLSVMVAHMRWKILQNCMINIPSTSKAAVDIFAKFLIEREKVNNNGDEERYPSAILYSIRVLTMAGEVEMKLMATDIARICKLATISELLMMKIELEKVFIDDYS

SEQ ID NO: 175225 - protein, 495 aa, Oryza sativa
  Clone ID: PAT_MRT4530_73091C.1.pep
MLRTGGGARATAAAQLLSSSSSPPPLRLPRRFLSLTATPYPLYYDLLLYRPSYPNPPKSSAADDRHTRPTDDHLDRAKRRYLRKRRSRLLPDPDATTAKPSSSSSSEFVELKPEVVDFPRLHAREEALYFHDAFALPWEKDKHYRMLYRLEKKYFPDQSLDNAFVPADASPPSSDAADKGLVFFDDDDNNKEAEVKKKKDGEDRGEVLERKVEDFFRSLKKGPGHGEANVMKAKKKEPPQVRHEADEWPQPHLASRRTELPPRWNGPTGTVVLIDKPKGDASLSSLDERSNARFKRLHQNLVLFMELNICLSCKPGWTSFTVCGKLRRLVNVQKVGHAGTLDPMATGLLIVCVGKATKVVDRYQGMVKGYSGVFRLGEATSTWDADSPVIQREPWEHIKDEDIRKVAASFRGEIWQVPPMFSAIKVGGEKMYDKARRGETVELSPRRISIHQFDIERSLEDRQNLIFRVICSKGTYIRSLCADLGKALGRRFCIE

SEQ ID NO: 175226 - protein, 451 aa, Oryza sativa
  unsure (1)..(451): unsure at all Xaa locations
  Clone ID: PAT_MRT4530_73092C.1.pep
MIKENEIVKREEPTKEKIGVLDAQWIVHRADPFPRDQGRAKNGRPAGEGMRARSRKDGVMFKIRMEEEEKVYTKMMGITPPNSTLLLSSSSSPPPLRLPRRFLSLTATPYPLYYDLLLYRPSYPNPPKSSAADDRHTRPTDDHLDRAKRRYLRKRRSRLLPDPDATTAKPSSSSSSEFVELKPEVVDFPRLHAREEALYFHDAFALPWEKDKHYRMLYRLEKKYFPDQSLDNAFVPADASPPSSDAADKGLVFFDDDDNNKEAEVKKKKDGEDRGEVLERKVEDFFRSLKKGPGHGEANVMKAKKKEPPQVRHEADEWPQPHLASRRTELPPRWNGPTGTVVLIDKPKGWTSFTVCGKLRRLVNVQKVGHAGTLDPMATGLLIVCVGKATKVVDSKPPVLAFLKTFLSECPYAFXRYQGMVKGYSGVFRLGEATSTWDADSPVCILYSDKM

SEQ ID NO: 175227 - protein, 130 aa, Oryza sativa
  unsure (1)..(130): unsure at all Xaa locations
  Clone ID: PAT_MRT4530_73093C.1.pep
XFLHKVSFLIFWGFFIFFLGVTQKQNYNTSTKQKXPPRQRGKHTRIHQHANQGGEQRSGGGGGGTTTKRGRRRGQGNKRRSPPGTETSGTGGAKGGTPPNRRAHRPPKQKQRGAGTAAAPQGNTRDDPKA

SEQ ID NO: 175228 - protein, 40 aa, Oryza sativa
  Clone ID: PAT_MRT4530_73094C.1.pep
LRVSRNENFGMLSVVMVFYGCNMEKRSGSLECLMFGEGMD

SEQ ID NO: 175229 - protein, 373 aa, Oryza sativa
  Clone ID: PAT_MRT4530_73095C.1.pep
MAPAATGGGGGEDDAAVPLLLPVLPPAAGWCSWEWEDVAISAGLVAVQLAGAAYMVVLAPVLALGLDPLFLVTFGSLATGLFTLPFAINLERKRWPSHLNANHLLLRLFLLALGGVTVFQALMLHGMKKTSPAIASTMPNLAPVFIFVVAACLGFERVDLSCRYTRAKIAGTVLCLAGAVTMSVLQSPAAAAATRSSSHRTTTAAAANAGGGDWAVGCACLLGAVLVVSGTTVLQAATMVHFPAPFTLCSATSLAGAALTGAFQAATAAGGLSPGTPQISLQIILSLLLVTWALEKKGPVVVSLFSPTQTVGSAIFSALFLGRVVHPVSMLGMVFLFSGLYVVLWAKKKECQVDRMVEDGTANDIEKPLLFQD

SEQ ID NO: 175230 - protein, 191 aa, Oryza sativa
  Clone ID: PAT_MRT4530_73096C.1.pep
PRVRPRVRPRVRFQALMLHGMKKTSPAIASTMPNLAPVFIFVVAACLGFERVDLSCRYTRAKIAGTVLCLAGAVTMSVLQSPAAAVATRSSSHRTTTAAAANAGGGDWAVGCACLLGAVLVVSGTTVLQAATMVHFPAPFTLCSVTSLAGAALTGAFQAVTAAGGLSPGTPQISLQIILSLLLVAYVCRAG

SEQ ID NO: 175231 - protein, 110 aa, Oryza sativa
  unsure (1)..(110): unsure at all Xaa locations
  Clone ID: PAT_MRT4530_73097C.1.pep
NPFILQLLNFLGVGTMHFKRCPIVKFFIAAPLTXFYIVKALFGFFKQLIRYNIIAFCHPSTIFIFGKSTQETMAKMIEALGFGVIWFERRLSFRLLPCILFFIFFMRLAV

SEQ ID NO: 175232 - protein, 42 aa, Oryza sativa
  Clone ID: PAT_MRT4530_73098C.1.pep
VKKKTMIRNSAISFDEKSRVCYELACTIHCNTRIQNHLLRDP

SEQ ID NO: 175233 - protein, 776 aa, Oryza sativa
  Clone ID: PAT_MRT4530_73099C.1.pep
MADRDEEQILYDTIAEGSSQYWNEEEGNEDPNQYLNEEGNVERDEEGNQQGHVERDVEGNQEEEASGSQPSVGQKRARGQRGAAKKLEGRHIITEVEEDGRPSAPAEAAKNYVRHSGWVVRDNVPVSTVYWRRTRARGDHESFVPDSEKEMLWTTMLETFTLPAGTEDKVKRWTLKKMAEQFQSFKGDLYQKYILKGQTPNFDTFPKLRDHWDEFVAYKTGEQGQRGIEPATANWPERSKFWSRMRSKRDTEAKIADLEFRVSSYELNMQEEVARKVDERMAAHRSHDPQPTIPPAMVSPSGNRSSCASTGQVASGMAIPTDPLGTYHCRPIPAGYSKVEVELVEGAYEDLELDYPGGDGETHLRDTCHAIILWRRRYIILPGLQAASRAPSPPAPPSPPQEPAPGSPHASPAPSSPQAPASTPPQDPGPTPPRAPTPTPPQAPLSAPSKSRALQLHRLPTQGQRKRRKLTPPRTRTRGTIARKRSLTLTLHQKSRDNSSLEEAIKLSDYERTLKKASSGKSKPVPQLGEQPNQEIEPLVTGKEMTIEQFITDTGLTTDQLLGVAPIEKAEVKYMYELGKPLVKPELLQSLPTQMYKFHQLYWILMEIQRARRRRVFDTGFIDPRKVNVAMLDQYPQETEDNLVHLLKAQHYKTFILLPYNTEFHWVLLLIDLEACTVNLEMGELEHQVGAIRDAALAEGSDAEGVGEAENGWRQRKELSHIAEVFRELELLEVVEPWRCQPAFDHGGALVDLLRGDAKAAYGPRMSEEYMGEEDG

SEQ ID NO: 175234 - protein, 457 aa, Oryza sativa
  Clone ID: PAT_MRT4530_7309C.1.pep
MEPVAKRARTGGGGGSAAVDRLSSLPDALLHAVMSSLPARQMVQTCVLSKRWVHLWRSVPSLNLDSREFLLPIYDRWQKMEDFTTNLLMFHHAPTLDAFSIRADVAVGKHGRHVDRWIRCGIKYCPRVLDIAVATVDSRYRLPDLASGSCRLGRLHLSYVALHSGFARQVRDSCPVLRCLELHRCLTKFSHIESSTLNRLVIEDSMGGSDSLAISAPRLASLRLVAFLFHTYKNGVSLNGANSLVEASVAVKSGRTSPEGEAMLLCGLFSVSSLELKGIQELAILHEKFDKSQSFHNLRTLSLDNCFQAEGDLKDKFRALGKLLEMCPNLEKLTLQHCWFLGGSTQRAKRKTRTSGLCLENFSETLGDADVDAALDSWQPVRPILSLQRLEDKFYYKVTMKKFHLFISSTFCVFQISERLKRGEDGETDLDSVPDPHDFNTSQCPNLKVIEIKYKLI

SEQ ID NO: 175235 - protein, 109 aa, Oryza sativa
  Clone ID: PAT_MRT4530_730C.1.pep
MDGIPKLTANELRRQRDRERYAALSVEEKAARVQKNRENRKRKKSASTSGTARTVWPSPRRVACQLRRDARHPLTAAVLPFNAPDVELAAGFRPYDVILFSGEPRSSTC

SEQ ID NO: 175236 - protein, 107 aa, Oryza sativa
  unsure (1)..(107): unsure at all Xaa locations
  Clone ID: PAT_MRT4530_73100C.1.pep
MGGSGRFGRMQPPERPGEQGRATXGSRHPSHHSASLAAARVSDDASSAAAKPGDERGGDDGGQRARRPAGRTAAVGERGDGVAVGERGGAAVAGERGGADDGRIWSG

SEQ ID NO: 175237 - protein, 361 aa, Oryza sativa
  unsure (1)..(361): unsure at all Xaa locations
  Clone ID: PAT_MRT4530_73101C.1.pep
GRNLEKESEGNPPGPLERECEGNQEEEASGSQPFLGQKRXRGQRSAAKKLEGRHIITEVEEDGRPSAPAEAAKNYVRHNGWVVRDNVPISTVYWRKTRARGDHESFVLDSEKEMLWTTMLETFTLPAGTEDKVKRWTLKKMAEQFQSFKGDLYQKYILKGQTXPNFDTFPKLRDHWDEFVAYKTGEQGQAMMERNKENATKKKYHHHLGSGGYSVTMPKWEEIEASLLERDVVEASSQGTFRPDREKDELLLALQTPEHPGRTRGKGVIPWKIGFKEDIHTYRSWMRSKRDTEAKIADFEFRVSSYELSMQEEVARKVDECHAQKFPNRIPSRMCIKIPVQDRPGYTNDNVDIQIHVLQTS

SEQ ID NO: 175238 - protein, 1163 aa, Oryza sativa
  Clone ID: PAT_MRT4530_73102C.1.pep
GRCGSSVGAAAAQRHAAAAAVAPPRQPPLRCRHTAVNERERERSNERERERTRQRTLPRERERERERSNERERERTCQRTLPRERNENENENDRTNESENENDRTKTSENEGTNVNENKRTNVNENERTNEDEQEGNEDPNQYLNEEGNVERDAEGNQQGHVERDVEGNQEEEASGSQPSVGQKRARGQRGAAKKLEGRHIITEVEEDGRPSAPAEAAKNYVRHSGWVVRDNVPVSTVYWRRTRARGDHESFVPDSEKEMLWTTMLETFTLPAGTEDKVKRWTLKKMAEQFQSFKGDLYQKYILKGQTPNFDTFPKLRDHWDEFVAYKTGEQGQAMMERNKENAAKKKYHHHLGSGGYSVAMPKWEEMEASLIERGIEPATANWPERLKFWYYAHGGTLNPADGSLVFGDQIREAARRLTDAVEASSQGTFRPDRDRDDLTLALQTPEHPGRTRGKGVIPWKIGFKEDIHTYRSRMRSKRDTEAKIADLEFRVSSYELNMQEEVARKVDERMAAHRSHDPQPTIPPAMVSPSGNRSSCASTGQVGSQSMDAMQTQDESTCPVDDITQRTSCELHIPFKNLSIKVASGMAIPTDPSGTYHCRPIPAGYSKVEVELVEGAYEDLELDYPGGDGETHLRDTSHAIILWRRRYIILPGRQAASRAPSPPAPPSPPQDPAPSPPHAPPAPSPPQAPAPTPPQDPAPTPPRAPTPTPPQAPLPAPSKSRAPPAPSPAHTRATKKAKVDAAKNNDPGYDCTQEELDAYVASEVKRQFKPRSPEKKIPIDPSVRNFFRGMSASVKEAIKLSDYERTLKKASSGKSKPVPQLGEQPNQEIEPLVTGKEMTIEQFITDTGLTTDQLLGVAPIEKAEVKYMYELGKPLVKPELLQSLPTQMYKFHQLYMEMSATGREMIGARIRDTDFLQGDDILWINFRGIYELYQLDALDVSIMSCWILMEIQRARRRRVFDTGFIDPRRVNVAMLDQYPQETEDNLVHLLKAQHYKTFILLPYNTEFHWVLLLFDLSACTVNVYDSMDKKESTFDKVFELIDRAWYRFRHLVRGKWRERLRRKFKFPCTKQKQGTNLCGYYVCEYCHCLADQIITTRELDFIRMRDNLTTHKEFIAAVQEQLMGFINEEILDPKGEFYYDGNTIHRSVASELAATTTTSKS

SEQ ID NO: 175239 - protein, 1128 aa, Oryza sativa
  unsure (1)..(1128): unsure at all Xaa locations
  Clone ID: PAT_MRT4530_73103C.1.pep
MPPPARHAAAATAPQRHAAAAVATPPXNRRPDAATPPLTNENENDRTDESENEHVNKRRVVGVVRQXLSGRASPRRNWSRLRPSSMADRDEEQILYDTIAEGSSQYWNEEKGNEDPNQYLNEEGNVERDAEGNQQGHVERDVEGNQEEEASGSQPSVGQKRARGQRGAAKKLEGRHIITEVEEDGRPSAPAEAAKNYVRHSGWVVRDNVPVSTVYWRRTRARGDHESFVPDSEKEMLWTTMLETFTLPAGIEDKSFKGELYKKYILKGQTPNFDTFPKLRDHWDKFVAYKTGEQGQAMMERNKENAAKKKYHHHLGSGGYSVAMPKWEQMEARLIERGIEPATANWPERSKFWYYAHGGTLNPADGSLVFGDQIREAARRLTDAVEASSQGTFRPDRDRDELTLALQTPEHPGRTRGKGVIPWKIGFKEDIHTYRSRMRSKRDTEAKIADLEFRVSSYELNMQEEVARKVDERMAAHRSHDPQPTIPPAMVSPSGNRSSCASTGQVGSQSMDAMQTQDESTCPVDDITQRTPCELHIPLKNLSIKVVSGMAIPTDPSGTYHCRPIPAGYSKVEVELVEGAYEDLELDYPGGDGSCTVSSSCSASTVSTSSSSIDSSSGSCTDSSSCSYTYSPASSSSGTFKVNGPPXAPPPAHTRATKKAKVDAAKNKDPGYDCTQEELDAYVASEVKRQFKPRSPEKKIPIDPSVRNFFRGMSASVKEAIKLSDYERTLKKASSGKSKPVPQLGEQPNQEIEPLVTGKEMTIKQFITDTGLTTDQLLGVAPIEKAEVKYMYELGKPLVKPELLQSLPTQMYKFHQLYMEMSATGREMIGARTRDTDFLQGDDILWINFRGIYELYQLDALDISIMSCWILMEIQRARRRRVFDTGFIDPRKVNIAMLDQYPQETEDNLVHLLKAQHYKTFILLPYNTEFHWVLLLIDLEACTVNVYDSMDKKESTFDKVFELIDRAWYRFRHLVRGKWRERLRRKFKFPCAKQKQGTNLCGYYVCEYCHCLADQIITTRELDFIRMRDNLTTHKEFIAAVQEQLMGFINEEILDPKDSLFTADTNVIKSGGITGVNAITTDEVGRQGGQSLHQDDVTNIGARTDEAANTAGAWENVKRRSMTTTSAA

SEQ ID NO: 175240 - protein, 77 aa, Oryza sativa
  unsure (1)..(77): unsure at all Xaa locations
  Clone ID: PAT_MRT4530_73104C.1.pep
KACQECILPVIAPNPKVTARRANPFPCSFKFPRCVFLKKPGFRPYXRSPLKPPLLLFNGDPLHRPDCPNSENPLCRY

SEQ ID NO: 175241 - protein, 1072 aa, Oryza sativa
  Clone ID: PAT_MRT4530_73105C.1.pep
MPPPPRHAAAATAPQRHAAAAVATPPPRRRANRRPDAATPPLTNENENDRTNESENEHVNMADRDEEQILYDTIAEGSSQYWNEEEGNEDPNQYLNEEGNVERDAEGNQQGHVERDVEGNQEEEASGSQPSVGQKRARGQRGVANKLEGRHIITEVEEDGHPSAPAEAAKNYVRHNGWVVRDNVPVSTVYWRRTRARGDHESFVPDSEKEMLWTTMLETFTLPAGTEDKVKRWTLKKMAEQFQSFKGDLYKKYILKGQTPNFDTFPKLRDHWDEFVAYKTGEQGQAMMERNKENAAKKKYHHHLGSGGYSVAMPKWEQMEASLIERGIEPATANWPERSKFWYYAHDGTLNPADGSLVFGDQIREAARRLTDAVEASSQGTFRPDRDRDELTLALQTPEHPGRTRGKWVIPWKIGFKEDIHTYRSRMRSKRDTEAKIADLEFRVSSYELNMQEEVARKVDERMAAHRSHDPQPTIPPAMVSPSGNRSSCASTGQVGSQSMDAMQTQDESTCPVDDITQRTPCELHIPFKNLSIKVASGMAIPTDPSGTYHCRPIPAGYSKVEVELVEGAYEDLELDYPGGDGSCTVSSSCSASTVSTSGSSIDSSSGSCTDSSSCSYTYSPASSSSGTFKVRGPPAPPPAHTRATKKAKVDAAKNKDPGYDCTQEELDAYVASEVKRQFKPRSPEKKIPIDPSVRNFFRGMSASVKEAIKLSDYERTLKKASSGKSKPVPQLGEQPNQEIEPLVTGKEMTIEQFITDTGLTTDQLLGVAPIEKAEVKYMYELGKPLVKPELLQSLPTQMYKFHQLYMEMSATGREMIGARIRDTDFLQGDDILWINFRGIYELYQLDALDVSIMSCWILMEIQRARRRRVFDTGFIDPRKVNVAMLDQYPKETEDNLVHLLKAQHYKTFILLPYNTEFHWVLLLFDLEACTVNVYDSMDKKESTFDKVFELIDRAWYRFRHLVRGKWRERLRRKFKFPCAKQKQGTNLCGYYVCEYCHCLADQIITTRELDFIRMRDNLTTHKEFIAAVQEQLMGFINEEILDPKGEFYYDGNTIHRSLASELAASTTTSKS

SEQ ID NO: 175242 - protein, 82 aa, Oryza sativa
  unsure (1)..(82): unsure at all Xaa locations
  Clone ID: PAT_MRT4530_73106C.1.pep
DKFHPXGPLDPLGXARDPDQXALXKVKEIKNGRLAMFSMXGFLSRQSXRGGPXENXSKHXRDPLGNNLXTXISGAAERXPSL

SEQ ID NO: 175243 - protein, 992 aa, Oryza sativa
  Clone ID: PAT_MRT4530_73107C.1.pep
MADRDEEQILYDTIAEGSSQYWNEEEGNEDPNQYLNEEGNVERDAEGNQQGHVERDVEGNQEEEASGSQPSVGQKRARGQRGAAKKLEGRHIITEVEEDGRPSAPAEAAKNYVRHSGWVVRDNVPVSTVYWRRTRARGDHESFVPDSEKEMLWTTMLETFTLPAGTEDKVKRWTLKKMAEQFQSFKGDLYQKYILKGQTPNFDTFPKLRDHWDEFVAYKTGEQGQAMMERNKENAAKKKYHHHLGSGGYSVAMPKWEQMEASLIERGIEPATANWPERSKFWYYAHGGTLNPADGSLGTFRPDRDRDELTLALQTPEHPGRTRGKGVIPWKIGFKEDIHTYRSRMRSKRDTEAKIADLEFRVSSYELNMQEEVARKVDERMAAHRSHDPQPTIPPAMVSPSGNRSSCASTGQVASGMAIPTDPSGTYHCRPIPAGYSKVEVELVEGAYEDLELDYPGGDGETHLRDTCHAIILWRRRYIILPGRQAASRAPSPPAPPSPPQDPAPSPPHAPPAPSPPQAPASTPPQDPAPTPPRAPTPTPPQAPLPAPSKSRAPPAPPPAHTRATKKAKVDAAKNKDPGYDCTQEELDAYVASEVKRQFKPRSPEKKIPIDPSVRNFFRGMSASVKEAIKLSDYERTLKKASSGKSKPVPQLGEQPNQEIEPLVTGKEMTIEQFITDTGLTTDQLLGVAPIEKAEVKYMYELGKPLVKPELLQSLPTQMYKFHQLYMEMSATGREMIGARIRDTDFLQGDDILWINFRGIYELYQLDALDVSIMSCWILMEIQRARRRRVFDTGFIDPRKVNVAMLDQYPQETEDNLVHLLKAQHYKTFILLPYNTEFHWVLLLFDLEACTVNVYDSMDKKESTFDKVFELIDRAWYRFRHLVRGKWRERLRRKFKFPCAKQKQGTNLCGYYVCEYCHCLADQIITTRELDFIRMRDNLTTHKEFITAVQEQLMGFINEEILDPKGEFYYDGNTIHRSLASELAASTTTSKS

SEQ ID NO: 175244 - protein, 1084 aa, Oryza sativa
  unsure (1)..(1084): unsure at all Xaa locations
  Clone ID: PAT_MRT4530_73108C.1.pep
MNENVNERKKRERERERANERERERANERERANERERELNVKEQTNILYDTIAEGSSQYWNEEEGNENPNQYLNEEGNVERDAEGNQEGHVERDVEGNQEEKASGSQPFVGQKRARGQRGAAKKLEGRHIITEVDEDGRPSASAEAAKNYVRHSGSVVRDNVPVSTVYGRRTRAHGDHESFIPDSEKEMLWTTMLETFTLPAGTEDKVKRWTLKKMAEQFQSFKGDLYKKYILKGQTPNFDTFPKLRDHWDEFVAYKTGEQGQAMMERNKENVAKKKYHHHLGSGGYSVAMLKWEEMEASLLERGIELATANWPERSKFWYYAHSGTLNPADGSLVFGDQIREAARRLTDAVEAPSQGTFRPNRERDELSLTLQTPEHPGRTRGKEVIPWKIGXKEDIHTYRSRMRSKRDTEAKIVDLEFRVSSYELSMQEEVARKVDERMAAHRSNDPXPTIPPAMVSPLGNRSSCASMGQVGSQSMDAMQTQDESTCPIDDITQRTPCELHIPFKNLSIKVASGMAIPTDPSGTYHCRPIPAGYSKVEVELVEGVYEDLELDYPGGDGETHLRDTSHAIILWRRRYIILPGRQAASRAPSPPAPPSPPQDAAPSPPHAPAPSPPQAPAPTPPQAPAPTPPRSPTPTPPQAPLPAPSKSRAPQAPPRTHRRATKKAKIDAAKNKDPGYDCTQEELDAYVASEVXRQFKPRSPEKKIPIDLSVMNFFRGMSAPAKEAIKLSDYERTLKKASSGKSKPVPQLGEQPNQEIEPLVTGKEMTTEEFITDTSLTTDQLLGVAPIEKAEVKYMYELGKPLVKPELLQSLPTQMYKFHQLYMEMSATGREMIGARIRDTDFLQGDDILWINFKGIYELYXLDALDVSIMEIQTARRRGVFDTGFIDPRKVNVAMLDQYPQAIEDNLIHLLKAQHYKTFILLPYNTEFHWVLLLFDLSACTVNVYDSMDKKESTFDKVFELIDRAWYRFRHLVRGKWRERLRRKFKFPCAKQKQGTNLCGYYVXEYCHCLAGQIITTRELDFIRMRDNLTTHKEFIAAVQEQLMGFINEQILDPKGEFYYDGNTIHRSLASELATTTTSKS

SEQ ID NO: 175245 - protein, 1199 aa, Oryza sativa
  unsure (1)..(1199): unsure at all Xaa locations
  Clone ID: PAT_MRT4530_73109C.1.pep
CRRRHATPPPPRPRNATPPPXRHAAAAAATPPRQPPPRCRHTAVNERERERSNEREXNERTNVNELGNMADRDEEQILYDTIAEGSSQYWNEEEGNEDPNQYLNEEGNVERDAEGNQQGHVERDVEGNQEEEASGSQPSVGQKRARGQRGAAKKLEGRHIITEVQEDGRPSAPAEAAKNYVRHSGWVVRDNVPVSTVYWRRTRARGDHESFVPDSEKEMLWTTMLETFTLPAGTEDKVKRWTLKKMAEQFQSFKGDLYQKYILKGQTPNFDTFPKLRDHWDEFVAYKTGEQGQAMMERNKENAAKKKYHHHLGSGGYSVAMPKWEQMEASLIERGIEPATANWPERSKFWYYAHGGTLNPADGSLVFGDQIREAARRLTDAVEASSQGTFRPDRDRDELTLALQTPEHPGRTRGKGVIPWKIGFKEDIHTYRSRMRSKRDTEAKIADLEFRVSSYELNMQEEVARKVDERMAAHRSHDPQPTIPPAMVSPSGNRSSCASTGQVGSQSMDAMQTQDESTCPVDDITQRTPCELHIPFKNLSIKVASGMAIPTDPSGTYHCRPIPAGYSKVEVELVEGAYEDLELDYPGGDGETHLRDTSHAIILWRRRYIILPGRQAASRAPSPPAPPSPPQDPAPSPPHAPPAPSPPQAPASTPPQDPAPTPPRAPTPTPPQAPLPAPSKSRAPPAPPPAHTRATKKAKVDAAKNKDPGYDCTQEELDAYVASEVKRQFKPRSPEKKIPIDPSVRNFFRGMSASVKEAIKLSDYERTLKKASSGKSKPVPQLGEQPNQEIEPLVTGKEMTIEQFITDTGLTTDQLLGVAPIEKAEVKYMYELGKPLVKPELLQSLPTQMYKFHQLYMEMSATGREMIGARIRDTDFLQGDDILWINFRGIYELYQLDALDVSIMSCWILMEIQRARRRRVFDTGFIDPRKVNVAMLDQYPQETEDNLVHLLKAQHYKTFILLPYNTEFHWVLLLFDLEACTVNVYDSMDKKESTFDKVFELIDRAWYRFRHLVRGKWRERLRRKFKFPCAKQKQGTNLCGYYVCEYCHCLANQIITTRELDFIRMRDNLTTHKEFIAAVQEQLMGFINEEILDPKGEFYYDGNTIHRCSHQAGFCYCRVTPRFSTFMCYNDTVIKGSDTLSLPVQSVSPTKTDGSSYETTVIRSPEGDDDSALFNSGNEGINYGCCLTTGIAATMMMAA

SEQ ID NO: 175246 - protein, 85 aa, Oryza sativa
  unsure (1)..(85): unsure at all Xaa locations
  Clone ID: PAT_MRT4530_7310C.1.pep
VAPVPAAPAASPAGPGGAXWWAPSWPVVLRXPGPXPLXLASRRXRVPWLSXVXXXSSPRAVFGVLRPCCSPXLXSLWFWCLPCLL

SEQ ID NO: 175247 - protein, 1361 aa, Oryza sativa
  unsure (1)..(1361): unsure at all Xaa locations
  Clone ID: PAT_MRT4530_73110C.1.pep
MVGNQLLEAMAPTTTLVRKTTMLPPVHDQHQLVYPCSWPALGSGRPVCHQACIYIARKTKHYKYINIFSYTPYVHCVTLARKSEQYEFLLRDCTSINVLVEAVEIKMDRQWMYADWRSKEFIDGVHYFLRVAEANRQRGFICCPCNKCKNQKEYSASRTIHFHLFESGFMPSYNCWTSHGEQGVEMEEDEVEDDNIPDFAQYVGFEGNQTGEEEIAADGNDVADDLGQMLQDAREDCKSEKEAHKLDKMLEDHRTSLYPGCEQGHKKLDTTLELLQWKAKNGVSDKAFGDLLKLVKNILPGGNKLPETTYEAKKIVCPLGLEVHKIHACPNDCILYRGEEYENLEACPVCKALRYKIRRDDPGEVDGQLTKKRIPAKVMWYFPIIPRLRRLFRNKGNARMLRWHAEERQQDGMLRHPADGSQWRNIDRKFKEFGKDARNIRFGLSTDGMNPFGEMSSGHSTWPVTMCIYNLPPWLCMKRKYIMMPIIIQGPKQPGNDIDVYLRPLVEDLKQLWKKEGVPVWDEDKQEEFNLRALLFVTINDWPALSNLSGQSNKGYKACTHCMDETESTYLKHCRKVVYMGHRRFLAANHPVRKKGKHFEHKADHRTKPKHRSGKTVFAMVKDLKVVFGKGPGSQHIESEDGHAAMWKKNSIFWELPYWEFLDVRHAIDVMHLTKNLCVNLLGFLGVYGKSKDTLEARNDLKHMEQRGDLHPEPKEKGSHYLSPASYTLSKAEKESMFECLESIKVPSGYSTNIKRIISTKEKKFTNLKSHDCHVLMTQLLPVVIRGILPDNVRATITKICAFMNAISQKVIDPDRLEALQNEVVQCLVSFELIFPPSFFNIMTHLLCHLVKEIRILGPMYLHNMFPFERYMGVLKKYVRNRARPEASIAXGYGTEEXPYIEEHLALVRARNIGHMGTXTMVNGYTFYTRAQDMKSTNQNSAVRVDAMGHDGTTATYYGAIEDIWELDYGPLKVPLFRCQWVRLTGGGVMIDDSGMTTVDLNKVGYSDEPFVLANDVTQVFFVKDMSSKGKKGRGPDEPKRQVVLPGKRKIVGVEDKTDEDYDQLDGQPPFTVTIDPSILLSNEDTPYSRSDHKEGTIMADRDEEQILYDTIAEGSSQYWNEEEGNEDPNQYLNEEGNVERDAEGNQQGHVERDVEGNQEEEASGSQPSVGQKRARGQRGAAKKLEGRHIITEVEEDGRPSAPAEAAKNYVRHSGWVVRDNVPVSTVYWRRTRARGDHESFVPDSEKEMLWTTMLETFTLPAGTEDKVKRWTLKKMAEQFQSFKGDLYQKYILKGQTPNFDTFPKLRDHWDEFVAYKTGEQGQAMMERNKENAAKKKYHHHLGSGGYSVAMREVGRDAVEA

SEQ ID NO: 175248 - protein, 212 aa, Oryza sativa
  Clone ID: PAT_MRT4530_73111C.1.pep
RAAGFAVFLAAFPALLRKYVKALLHTWSRGRGAMPLVSFLFLRDLCIQLGSECLDTSLKGIYKAYLVNCKLSKSISGSKLQHIQFLGNCVRELYNVDPQSAYQHAFVFIRQLAVILRGALTERGPKTSKDKKQKESIKPTKKRMEKSYQKVYDWQYIFCLELWTSVVCGCSSEEDLRPLAYPLTQIIHGVACLVPSARYFPVRLRCVKMLNR

SEQ ID NO: 175249 - protein, 44 aa, Oryza sativa
  Clone ID: PAT_MRT4530_73112C.1.pep
SMNCLKAKKHSLSSNFPKVTHGPQSLSQTLKETGLHQQTTPPIR

SEQ ID NO: 175250 - protein, 88 aa, Oryza sativa
  Clone ID: PAT_MRT4530_73113C.1.pep
FFFFFFLEPFILFTKGKEREGIIEKLITVHYLGYLFFTITTVVNHSPGVWLSFLSWHPLIWLNISPLQSHQSVNPPNSPSTHKQPVTI

SEQ ID NO: 175251 - protein, 86 aa, Oryza sativa
  unsure (1)..(86): unsure at all Xaa locations
  Clone ID: PAT_MRT4530_73114C.1.pep
LTTWLWPPTVMASSATSVXPFQGLKSTAGFPVSRGSTNSGLASQHGGXFSACRCWPFXASRXRDLSXLPPLTVEXFFKRSSTSSIQ

SEQ ID NO: 175252 - protein, 118 aa, Oryza sativa
  unsure (1)..(118): unsure at all Xaa locations
  Clone ID: PAT_MRT4530_73115C.1.pep
RKAASRTDARARARAAQRCCRAPTRTRPRGGAPAWARSSAPWWRRSSCSSPSPSSTPASPPPPPPRSPSPPPATGSPTPXSWRTRTTVPRCSTPRLRLRRPPPPPPSPPTPSXIPPPM

SEQ ID NO: 175253 - protein, 94 aa, Oryza sativa
  Clone ID: PAT_MRT4530_73116C.1.pep
MGAKTTTRWERVTAAWTGSGGERRRRQQHTASAVQTRAAQMSSAEERETTLKGHLDNCPRQRKLVTARSGALELETDRSGALVLGATGSSPNAT

SEQ ID NO: 175254 - protein, 48 aa, Oryza sativa
  Clone ID: PAT_MRT4530_73117C.1.pep
KKKKKIKKKKKKKKKKEKKFKVFNFKKSSLQTIKLLKIGFYLKSLKFI

SEQ ID NO: 175255 - protein, 39 aa, Oryza sativa
  Clone ID: PAT_MRT4530_73118C.1.pep
PAPPDARAGAMKRAPRLPRGGEVLDEGRRRGTRRSPPPS

SEQ ID NO: 175256 - protein, 66 aa, Oryza sativa
  Clone ID: PAT_MRT4530_73119C.1.pep
RAFPLIRNSTSNRRLGLGIVCCCRCRRSRRWPYRFGCSGRHTYGFSKCSFSSFRSFLAGQRGALSQ

SEQ ID NO: 175257 - protein, 232 aa, Oryza sativa
  Clone ID: PAT_MRT4530_7311C.1.pep
MAFDLKLTACLLLAVFSLAAAADCECQPSDEGHDAAKSRTLKVIAIFCILVGSSAGCAIPSLGRRFPALRPDTSLFFALKAFAAGVILATAFVHILPVSFDKLGSPCLVDGPWRKYPFTGLVAMLAAVATLLLDTIATGYFLQRAQDSRGAVAAVAACGGDASSSHDHERGNAHGVSSAVIASATMPNDAADDCDDAEDRAKLVRHRVISQVYYIYIYSKFVWCSMVPGHHC

SEQ ID NO: 175258 - protein, 531 aa, Oryza sativa
  Clone ID: PAT_MRT4530_73120C.1.pep
MLQEILRMNRMMQQQNERIKLVLRENQELREKVSSLTAAISEVVGYHKRIPAPRMLPDQNCSEPLRLQFVNSCSNDKYSTHKIEADDESPLQWTEEYFRSKIVPGRPQKGHLLSGKLYFRLQNGVGYLNAKFQDNSSFVPSKKFKLGVMAADERISERIQEGITESFAVKDVRGYLTKKNPNPSPRDAVYKLSKIAKNGDRHKLLEQNGIKTVEDFLSFYNKSPDDLRKILGKISDQDWDLIISHALKCNPRPGIYSSCLQESNVSHEHEAFFRSNGSYYLQGSCSMQPSHTSQGLLILQKLTEQLDVQGTRQQISSTCNGLSSGGLSVIVPNRSKFQPDTSDQNLMHHGQLERIQVVDRQVSSVGNEVMSVSSMDNNMLEVSSSQQQHSLGHINTAEIDGNGLSHANPSDWNSSLDWIHGHADVQLESMRSKTGVIHLSVKQAVGATGDFLLHGPQAVGDTGDIHFHLPGELAVEDTEKHAVAATVNKSLEKPVAATAYGLPHCRLSCFQTISAIQVNISRMKNNILHSS

SEQ ID NO: 175259 - protein, 91 aa, Oryza sativa
  unsure (1)..(91): unsure at all Xaa locations
  Clone ID: PAT_MRT4530_73121C.1.pep
MPSMMVRSAGIKRLRREMESRRRRSPELAPTGRVAKRSSTPPPLHPSPDDERSADVXPCRRRLPCPVVPRRRPPPLPPPTSRRRRSRRARR

SEQ ID NO: 175260 - protein, 325 aa, Oryza sativa
  Clone ID: PAT_MRT4530_73122C.1.pep
MLSDDSDQNCTVPLRLQFVNSCSNDKYSTHKIEADDENPLQVAIYDHNDKIVTMEPFSSMRVHIVAIDGDFDDDNKGQWTKEYFHSKIVPGRPHKGHLLSGKLYFRLHNGVGYLNSAKFQDNSSFVPSRKFKLGVMAADERISVRIQEGVTESFAVKDVRGYLTKKNPNPSPRDAVYKLSKIAKNGDRHKLLEQNGIKTVEDFLSFYNNSEYDLRKILGKISDQDWDLIIAHAQKCRPGVYSSCLKESSVSHEHEALSIRNDSYCLQESFSMQPSHTLQEQLDVQGMHPQISSTYDGSVGLSDIGVPYRFQPDTLGQELDAPCSK

SEQ ID NO: 175261 - protein, 278 aa, Oryza sativa
  Clone ID: PAT_MRT4530_73123C.1.pep
QLDVQGTRQQISSTCNGLSSGGLSVIVPNRSKFQPDTSDQNLMHHGQLERIQVVDRQVSSVGNEVMSVSSMDNNMLEVSSSQQQHSLGHINTAEIDGNGLSHANPSDWNSSLDWIHGHADVQLESMVNAQRRENLLSEYVGRGEHDFTGTPGSGGSCSAAEQNWGHSPVTAAEQNWGHSPVSEAGSMNYNGAVNEAGSWSHRGLPPSRAAGSRRHRRHSFSPARGAGSRRHREARSSSYGEQVFGEASSSDCLWFTPLPPVLFSDNISNTSKYFTDEE

SEQ ID NO: 175262 - protein, 94 aa, Oryza sativa
  Clone ID: PAT_MRT4530_73124C.1.pep
ALLHVQLGVETKGNLKHAFPSKETSRPDETQSDSDLPVRPATHRRSDRPSISGLTTQHTAVRPTHSEEIDPVRWAKSKSKTCRTLFSSLLRRQK

SEQ ID NO: 175263 - protein, 98 aa, Oryza sativa
  Clone ID: PAT_MRT4530_73125C.1.pep
MATLGMWLEYVTKIKKGFGLPGGQAEAASAFDGVRSEFRSGPFDYHQSVGTPVCMVTTTVLGAHCTVAAQRRRFVSKHGMGREGVCVLIILDVEDALS

SEQ ID NO: 175264 - protein, 240 aa, Oryza sativa
  unsure (1)..(240): unsure at all Xaa locations
  Clone ID: PAT_MRT4530_73126C.1.pep
MGSSLLMPLNLTISWFAKAWRTAAFGVYGFTQFTKSGFVEHAKKFREEDMQIRLDGKNCLVTGANSGIGFATAEGLASRGATVYMLCRNKERGETALSQIRSKTGNMNVHLEEFGENNFDGTQQYARNKRVQVALTERWSEKCSNKGVGFYSMHPGWADTPGVSKSLPGLSEKXSGNLRSNDEGADTVIWLALQPKEKLTSGXFYFDRAEAPKHLKFAGTAXSHGQIGSIVDSLRSICGI

SEQ ID NO: 175265 - protein, 69 aa, Oryza sativa
  Clone ID: PAT_MRT4530_73127C.1.pep
SLQDINLDGLLLLGVCINSGALDVVCLPLGLYDKLDVFCWPAGCMHSAPDLFLIYLCMPDPWKYQPTKV

SEQ ID NO: 175266 - protein, 171 aa, Oryza sativa
  Clone ID: PAT_MRT4530_73128C.1.pep
DVFNSQRRRRLARGERAGQAAACAAAWGWRRAAVAGAAACGAARRRPAAARRRPARRRGRPRGLRGGGGQPANCTSQNARPVLRSSFCICKSTHLYIVLCGLCCMPAHQTNGVPNSVSSSASLISFAHKRLGFLGLPKLCSSEFLIFQRRAILRVYIYHQRAHIWIKKKKK

SEQ ID NO: 175267 - protein, 79 aa, Oryza sativa
  Clone ID: PAT_MRT4530_73129C.1.pep
MNGSCWPKLCAASMEEGIGRGGHRARKRLGNEEDASEGGGTLGIRSLGEEEVVRREGRAGREVAIAVGRRVSGKEVTVG

SEQ ID NO: 175268 - protein, 77 aa, Oryza sativa
  Clone ID: PAT_MRT4530_7312C.1.pep
SASLMITDVCKNGDLNALLRRSPLGLCGGLCSSTVLPPFPIIFHQFHDVCSIFTCPSHCHSLPLPPSRLKQAPGMRM

SEQ ID NO: 175269 - protein, 59 aa, Oryza sativa
  Clone ID: PAT_MRT4530_73130C.1.pep
VKLQSEGYSEDWPAICALRQDDLQSFCPLDLNIKVLILLKMNIIQAFNKLFRTCTCLII

SEQ ID NO: 175270 - protein, 91 aa, Oryza sativa
  Clone ID: PAT_MRT4530_73131C.1.pep
NAISVSRPEYGWYFGGYEHLPDFVGADLINPMARLLTTDLMSGPSKGRTYLNSSWPRFCHSDKAAFSRVDYVYLADSIVAGENPCGEAWIH

SEQ ID NO: 175271 - protein, 68 aa, Oryza sativa
  Clone ID: PAT_MRT4530_73132C.1.pep
TSLYFIDHYQNVLMNTQYRHRAYLLSNTGTYNHAVQTNAYIYTAHERTNTGPRTPTHTLYQRRPSLHT

SEQ ID NO: 175272 - protein, 344 aa, Oryza sativa
  Clone ID: PAT_MRT4530_73133C.1.pep
MELSLLYDIMYTKAGVIHTWHGYCIRVFSPLATAGALVMFHLSLHGALGHGAMLVDVAITYTLLVGAVLVDTWWLLMAAGSTWAYAFLIRMPLRGWLYHAAVCSGRWRQVGRALTWIRWLVNAEDSRRWSGTIWQHNMLQYCTRDGSKDVWYDLAKKIHVKWRKKDNTYSGTTVIPDRVMEQAEMYDLFLRLVRDEIQQQIIIWHIATDIYLRTSDKAETTEYVEAINLISNYMMFLVLERPYMKTQSLAKQLGVTDRDPSKVSLNALPLALLLVKKLNKYDGASVEFLFKVWVEMLHYVSHRCSRESHAKQLSSGGWLVTLVLAKLSLASHMHAKRFVCWLKN

SEQ ID NO: 175273 - protein, 672 aa, Oryza sativa
  Clone ID: PAT_MRT4530_73134C.1.pep
MAIKDRFTGNPGRLTALATSGSGCVAVESTGGRVSTGCLYGRSCLSDSADFHFRGVLLEEMDDRVRGPLQLRAAASAPLIRRDPAAPRRRRAAYAIQDNQLWLRLLLTTFFAKILAAGYAIFVASSSGSGSSSLAMLPAASWLMFVVGVVKYGERIWALYNGHLSTIRSTIEKQKQEEAKREKKRGDSEQGGARDPPTPPAVSKKDPDYALLQAHANFGACKAALVDISWDEKATIDQWRWDETWVVLQMELSLLYDIMYTKAGVIHTWHGYCIRVFSPLATAGALVMFHLSLHGALGHGAMLVDVAITYTLLVGAVLVDTWWLLMAAGSTWAYAFLIRMPRRGWLYHTAICGGRWRQVRRVLAWIRWLVNAEDSRRWSGTIWQHNMLQFCTRDLAKKIHVEWRKKDNTYSGTTVIPDCVMEQVFNYLIDILRIDDKYKDDEAQKDKNEDEPPTGQSGIPLDSTGLLKAERGWRILKKLAKKEGHKDGHKKVNDLFGRLLRDEIQQQIIIWHIATDIYLRTSEKVETTEYVKAINLISNYMMFVVVERPYMVPGLALRTIYSKTIEDIIQSRIGSSVQSLAEKLSANNRKHNKVSLSALPLALLLVKRLNEYDGARLEFLFKVWVEMLHYVSHRCSRESHAKQLSSGGELTTVVWIMAEHARNFYISKKNLD

SEQ ID NO: 175274 - protein, 89 aa, Oryza sativa
  Clone ID: PAT_MRT4530_73135C.1.pep
FPHQVVKKALVAIMEKRGKDQRLWGLLPECYGRGLFPPNQMTKGFKRVAGWVNDLALNGPDPGKQFFCYVERPKKGGWLDASFPPGGGS

SEQ ID NO: 175275 - protein, 121 aa, Oryza sativa
  Clone ID: PAT_MRT4530_73136C.1.pep
MERVNLKLYLENVYIMEENERLRRKAQALNQENKALLAKLNTNHAAASSTSTTTQHRPPTAASAAGAGASSTLKPGKQQPNPTGDIPAVRPTASGGQTGGIRAVRPAAAIGAAGDIGGQTG

SEQ ID NO: 175276 - protein, 320 aa, Oryza sativa
  Clone ID: PAT_MRT4530_73137C.1.pep
MLPYAPRPPSLLVDRRYKQGAEAAPNCPRCDSPNTKFCYYNNYSLSQPRYFCKGCRRYWTKGGSLRNVPVGGGCRKNRRGKSSSSARSAADAVSSGRDAAFGHRFPGPVRPDMVLEGMVGNPANPGQAMPDVAAAADGSTIDLAMLYAKFLNHPPTDAGLGAVTPESGGHVDEAFDTFSASSDLSPGILAAASAQFDPNQDGFGEWSSPASGNDPTSTATTATTSMLCTDASVQAALGELNFAMDQSCFDSLGLPTDVAGAGSLSSWCSIVPSLSTWEEPKYDSLDSFPDDAMSLHECMIGAPDHDWSVDCQGLEALYMP

SEQ ID NO: 175277 - protein, 132 aa, Oryza sativa
  unsure (1)..(132): unsure at all Xaa locations
  Clone ID: PAT_MRT4530_73138C.1.pep
QDRVHQQREPQQQLHPVPSTVLTTKFGNSSIGDEDRIEVESKMEIVLETERESAKVXNRLRSGFEEFESDKVGRLSRFRQYDSFGQKSAAKTYGILEFVKDKSRVRYGHILIKSTGTLTNLKAXFWTCTEVK

SEQ ID NO: 175278 - protein, 213 aa, Oryza sativa
  Clone ID: PAT_MRT4530_73139C.1.pep
MDSYVNLLGSNIDVETWDPSQNFPQTGQQPQYSPMVGEQPSAEVGGPLDPTIRDPKISALRKILNRPQNGMTVQDYATTLYKSEEKKTFSLMYCWEILHHHPKWNDRLSQKKQKANVDPLVIPSARTNSREFHCSPDISISDPLVRPPGRKVEKAKRARGDTSSCSSESSLVVIALTNMWSEKKEMSAQSREERNDRLGEVISLEKERLKIEK

SEQ ID NO: 175279 - protein, 768 aa, Oryza sativa
  unsure (1)..(768): unsure at all Xaa locations
  Clone ID: PAT_MRT4530_7313C.1.pep
MDLNWEDLTMQQLDLQALVAKITEEEVLATIKQMSCDKAPXGFTGAFYKHYWEDIKHDLVAAIRAIGNQTNNTLGILNTENVVLLPKKEGIDSLADYSPIRLIHGIPKIISKVLSIRLQPHMSTLIARNQSAFIKKRSLHDNFMYVRNMARRYNQTRTSMLIFKLDIAKAFDTIXWDYLLELLTQRVFPWRWRNWVTTLFSSSTSKFLLNGTPRLPITHGRGLRQGDPLSALHFILAIDPXDKLLDNANEAGLLTALNGRLPRLGTSLYADDVAIFLHQSKHDINNFSHLLTMFGEATSLKTNLQKTQVVPIRCDSIDLQKILHNFPATIKSFPIKYLGLPXLSISKLNKIHFQPILDKAGSCLANWQGKMINTKDKSMLLKTALTVLPTYHLTTLKVPATTLRAMDKLRRKLLWMGGDNMSGEKCKVSWDNVCMPKDLGDLGIMDLSKFGRALRLHXLWVEWSTDEPPWVGTPIPCYEVDRQMFNATTEIRLGNGTKASFWISKRLAGQVPKEIAPHIFVVSRRKNNKVKEALTGERXTKDQCIQDFNKPKHFQQFVEMWXKIQRVSLVDEQRDEIRWQLTALGKXSAKSAYKLQFEGMMARPYRHIIWEPWAPPKCKFFMWLIMQNXVWTADRLQKRGWTNQWICSLCRTRPESGIHLXGKCRLTIQIWEAVQHLTSFDLRIQEXASCGAGKQWLLFLTSTPGVPKKLLRTLAILISWMIWNERNTRIFQHVAQTPTLIIXTIKDEALQWRRAGAQDLAELQPLGE

SEQ ID NO: 175280 - protein, 185 aa, Oryza sativa
  Clone ID: PAT_MRT4530_73140C.1.pep
MDNQLAIDDKVVFLLEYEPVEIRDGARSLCRPPLASDGDYSHLSMKKYYLAGILPFPPSSQVVSLKDQSGMADRRRPSWQQATAGMQPRGGGGRPDWREAGGMHATAAEADRQGRAMDGSCRGQGDGGSLQACAWRRRQTAVARLQICASDTFSALDGTSPGPCFFAPIRQNADGVAGSVCPGML

SEQ ID NO: 175281 - protein, 370 aa, Oryza sativa
  Clone ID: PAT_MRT4530_73141C.1.pep
MALPCLSASAAVACIPPASRQSGRPPPPLGCMPAVACCQLGRRLSAIPLQSSTSKEENWDPSQNFPPTGQQPQHSPMVGEQPSAEVGGSSRPNNKRSKNFNTAEDQMLVSAWLNTTLDAITGVEQHRDSYWARIHQYFHENKNFPSDQNQNSLNNCWGTIQEQVNKFCGYYEQILNGPQSGMVVQDYITQAFTLYKSAEKKTFSLMHCWEILHHHPKWNDRLFQKRQKAHVDPLVRPSASTNSSEFHYSPDINTSDPLVRPPGKKVEKAKCPRGNTSSCSSESSPVVIALNNMWSEKKEMSAQSREERNDRLVEVISLEKERLKVEKRKLDIETHEREERIMNMDLSAMDGPRKTYYLRLQQEIIKAHMD

SEQ ID NO: 175282 - protein, 41 aa, Oryza sativa
  Clone ID: PAT_MRT4530_73142C.1.pep
GELYTLGHPWLVKGNLQLCFKMRPPLSWQVHWPIGLPDPRT

SEQ ID NO: 175283 - protein, 133 aa, Oryza sativa
  Clone ID: PAT_MRT4530_73143C.1.pep
MDGCARTYRESSEASLPPKSMQMQRWLNASEGFLGLSANEARGTPLVAGTVRVLLAVCRAAGLVLLRVESGNSRASVPRRSDWAAAAAYRGGAALDGVGVGRGGKGAAPASGGEGGGQPAGGQGRPTAPGSAA

SEQ ID NO: 175284 - protein, 81 aa, Oryza sativa
  Clone ID: PAT_MRT4530_73144C.1.pep
KGSPPGGVPPQMTGQNVTECLGGSRTVPFDDLGGRSPPPLDPRVNGSPSLELSFFFPQRFRRKRIRFFKFNNMLPLPPLGV

SEQ ID NO: 175285 - protein, 55 aa, Oryza sativa
  unsure (1)..(55): unsure at all Xaa locations
  Clone ID: PAT_MRT4530_73145C.1.pep
HEPDQQRLIFGGKQLEDGRTLADYNIHXESTLHLVLRLRXGMQIFVKPLTGKTIT

SEQ ID NO: 175286 - protein, 87 aa, Oryza sativa
  Clone ID: PAT_MRT4530_73146C.1.pep
GREENTLFQPSPPLMARPPPLKKCPRNPTFSKPPKPGKPHLPHAGPPHGSNPLFPAPPLPHSKRPDPRGPPPKPGKTPTPSFPLSPG

SEQ ID NO: 175287 - protein, 122 aa, Oryza sativa
  Clone ID: PAT_MRT4530_73147C.1.pep
MTEVDASHGDGATAVAGVDNGHSCGGCRRRDGCGRGGREPRPRMQAMATGMAGVDQSHNCADVGGDDGCDCGGREPRLRMQATARRRGPQGDEGDGGRRQPQGDEDDDATMPVEPDEGSWST

SEQ ID NO: 175288 - protein, 518 aa, Oryza sativa
  unsure (1)..(518): unsure at all Xaa locations
  Clone ID: PAT_MRT4530_73148C.1.pep
ENSKSTVTVPPPSVVDRVMKDLFNDEVGNSNYVEAENKYGRAMKGAPSDSLFAQFCLHALWFGNCXIRAIAVLWIDFVREIRWCWEESERLPRMKSTSSIDLCTCLIHQKLHMLAICIERKKSLSREKGTDHAHEDGISNSVAQNKTRKGSAGVVPSMMLLNTFQEMHAPYTQDAFLMTEDMHEERLHAAEAFGNAVGLSGQLERDVLSSDMSAFKAANPDAVFEDFIRWHSPGDWVSEDGAEGSSGWPPKGRLSQRMSEHGNMWRKIWNDAPALPVSEQKFLLDPIREGEKVIHYLETLSPQQLLEQMVCTVFKSSADILNRTTYVVPKXMKTKKDQLYATLASTLKSLQGKSDISDLSDDLKRLCQVFEHIEKLLILAASVHRKLIDAPRLSQAIFADYFNYYLPKMGTSLESVCYEKEFTAKEKVGMHERDAVSNLFPPPTANQSWRKVLSMGNLLNGHEPIQREIVFSVIERISNGHYSSPTPLSTDEQIETHRMYISGTSNDLWVALSVTSWD

SEQ ID NO: 175289 - protein, 55 aa, Oryza sativa
  Clone ID: PAT_MRT4530_73149C.1.pep
FRINKPIGHSFQNRFLYTKLISHFIIYYSTLNYGAGTIQGPLILIAGIHKLSNMF

SEQ ID NO: 175290 - protein, 399 aa, Oryza sativa
  Clone ID: PAT_MRT4530_7314C.1.pep
MSFSRLLTPRILLDTTAVFPPSSSVVAPSLSRQLRCTRTGGSPPAPPHRLVARRAMSNGAAEPAIYGGGGGAQQAASSAAARRVTLATLRGKHRRGEPISMVTAYDYPSGVHVDAAGFDICLVGDSAAMVAHGHDNTLPISLDLMIEHCRAVARGAARTFLVGDLPFGSYEASTAQAVGSAVRVMKEGGVNSIKLEGSAPSRISAARAIVDAGIAVMGHIGLTPQSVSALGGFRPQGKTVESAVKVVEAALALQEAGCFAVVLECVPAPVAAAATSALTIPTIGIGAGPFCSGQVLVYHDLLGTFQTSHAKVSPKFCKQYGNIGDVINRALSKYKQEVETQSFPGPSHTPYKLAATDVDAFLNALKMKGLNVAADAAADAVEYTDEKEINGTPQLKVYA

SEQ ID NO: 175291 - protein, 111 aa, Oryza sativa
  Clone ID: PAT_MRT4530_73150C.1.pep
TSAKALLTTSRCNATHTHSVSEKSSTGKVYRPDPKGKIKAPKLHDGTAAFPPSLLQKLGAAHEISEGNISYFGGFPLFTRPEHLEYPKELDTELLALRQRYVYDANNDKFQ

SEQ ID NO: 175292 - protein, 580 aa, Oryza sativa
  Clone ID: PAT_MRT4530_73151C.1.pep
MRGVESGGGGGGASSSSPAAAGNFDAGQYAFFGKEPLEGLELSCLEDGGGDGNGGGFSGPEDGLYRLSSVGEEVRIPEPSFDHIDNLSNLSEIDDLASTFAKLNRSISGTRNPGVIGDRRSISRGSSLTVDWAEDAEFPNWVDQDILEGRFDSISNVPSLRDKRSRPRSLLEVDLPSSGDGSHDQKSSLRPLEKEPMLAARVTVEDAICLLLESSLARPLPRPPIRPACGNPVCRSRPGSVSVARCRAEAAPPAPAPAARRAAGPYTGRDPEVKKPAWLRQRAAQGEKYARLRESIGELKLNTVCVEAQCPNIGECWNGGGGAGGEGDGIATATIMVLGDTCTRGCRFCAVKTSNKPPPPDPLEPLNTALAVASWGVDYVVLTSVDRDDLPDGGSSHFAQTVRALKELKPGILVECLTSDFRGDLEAVSALANSGLDVFAHNIETVRSLQRIVRDPRAGYDQSLAVLKHAKSCKEGMITKSSIMLGLGETDEEVKQAMIDLRAIGVDILTLGQYLQPTERHLTVREYVTPEKFQFWKEYGESVGFRYVASGPLVRSSYRAGELFVQNLVRNNKPKLPASS

SEQ ID NO: 175293 - protein, 190 aa, Oryza sativa
  Clone ID: PAT_MRT4530_73152C.1.pep
RRTTTGTSTTSASSRRSPPSTAPSSSPSGFSASSSAIATTTASPLCGNRLPSFSAKVASSKPWSSAGLPAQSSSGRIIRSRFLKADAAWATASSTSAIKSSATTRSIARSGTTRCPMSGSTRLTNSSRTSRCSSHNLCTSPWTPTPPLGETSASPPPPRTTTTSRRSRLCFATRGAPPPPPLLKLKASTS

SEQ ID NO: 175294 - protein, 93 aa, Oryza sativa
  unsure (1)..(93): unsure at all Xaa locations
  Clone ID: PAT_MRT4530_73153C.1.pep
FFFFFFFFFFFFFFLAAXMITXIWMMNQDRVQSHRAGKTEXXLWXXQRXNILRVVQKHSLTXPFVLRLPFXXLASGXXLDYSYPEGLSMVSYT

SEQ ID NO: 175295 - protein, 794 aa, Oryza sativa
  Clone ID: PAT_MRT4530_73154C.1.pep
MAQRSSPTRRSPRTGSPRRGSYVSSVNDNDCINEPIHRSESMNRADALRSRSYNSEGDIQDTICSPRASSLSWERGQRGGREMNRGELRRERRKKRRGENDMWGPHQDGQGDAAGDEVDLQQAAAEGAAEGMAECRAEVVTGLARPPTTSSSTWIWWWPRRGCRQPPWGDLGRESELGAAAGGGFIGEYSPRNPTSESGRFHLKGVFVLDGSEKKYCGGSEALSYVERDKVSLPELFGHLKDHCNVMSGTLLHWLFPGKDLQTGLRALSNDKACKLMCDCTGELDVADVYVKEPEIVDLCNGSDDDSDWEVEMELEVESEEEGGKMEVDIDVSKGKGVDEVGGSGCKGKELAEEETDRRIVIYHSDSAPIARHQHCQSAPCGSHQPSANAPIPDYPTYDSTPIASHPPSDSDEDSDYTPGDDAQSDDDEKAVEIEKHYKEVKRKVKAGQLENLDDIFFQKAEPRMHTGGDEAGNETPYADSDEEESFDELGSDGEMRTNGSHQARYKKSQGVPKFELGMKFSCKKQFKKAITTYAIAERKVINFAKDDGQRVRANCDWESCPWVCLLSKNSRSDSWQIVTFDNLHACPPRRDSRLVTSVRIAEKFGNFIAANPSKPIAHMKSTVQEKMFVDASISKLKRAKWLVMKKKFDSAKGQYQKLFNYQLELLRSNPGNTVVVNREIGMDPPVVKRMYICLDACKKGFTAGCRRVVGLDGCFFKGATNGELLCAIGRDANNQMYPLAWVVVAKENDEERDWFLDLLCGDIVDRKHVAWEICLTPVQVESSPSDVLACQLI

SEQ ID NO: 175296 - protein, 728 aa, Oryza sativa
  Clone ID: PAT_MRT4530_73155C.1.pep
MDASAGSSAPHSHGNPGKQGGGGGGGGGRGKAPAAEIRGEAARDDVFFADDTFPLLPDFPCLSSPSSSTFSSSSSSNSSSAFTTAAGGGCGGEPSEPASAADGFGELADIDQLLDLASLSVPWEAEQPLFPDDVGMMIEDAMSGQPHQADDCTGDGDTKAVMEAAGGGDDAGDACMEGSDAPDDLPAFFMEWLTSNREYISADDLRSIRLRRSTIEAAAARLGGGRQGTMQLLKLILTWVQNHHLQKKRPRTAIDDGAASSDPQLPSPGANPGYEFPSGGQEMGSAAATSWMPYQAFTPPAAYGGDAMYPGAAGPFPFQQSCSKSSVVVSSQPFSPPTAAAAGDMHASGGGNMAWPQQFAPFPVSSTSSYTMPSVVPPPFTAGFPGQYSGGHAMCSPRLAGVEPSSTKEARKKRMARQRRLSCLQQQRSQQLNLSQIHISGHPQEPSPRAAHSAPVTPSSAGCRSWGIWPPAAQIIQNPLSNKPNPPPATSKQPKPSPEKPKPKPQAAATAGAESLQRSTASEKRQAKTDKNLRFLLQKVLKQSDVGSLGRIVLPKKEAEVHLPELKTRDGVSIPMEDIGTSQVWNMRYRFWPNNKSRMYLLENTGDFVRSNELQEGDFIVIYSDIKSGKYLIRGVKVRRAAQEQGNSSGAVGKHKHGSPEKPGVSSNTKAAGAEDGTGGDDSAEAAAAAAAGKADGGGCKGKSPHGVRRSRQEAAAAASMSQMAVSI

SEQ ID NO: 175297 - protein, 260 aa, Oryza sativa
  unsure (1)..(260): unsure at all Xaa locations
  Clone ID: PAT_MRT4530_73156C.1.pep
MTGFKLPKNFIENPEVFFRSIKPRVVAPXKTHPTKKPAILVPPTFKTTANKTIRKFAAPSADNVATGPQINMGDVDFDLKSSLIMMAXASLFRGKPNEDANAHLQQFLEICSTYTMKGVSPDAVRLRLFPFSXLGKAKQWFYANHDMINTXDKCSMAILSKFFPMGKTNALRGRISSLQQTRDESIPEAWESLQELTPTSRDHLDAAAAGAFFSKTVKGAVDLIEKMVSNLGWSEERLRTCXRGMHTVKEMKMLAAKLDL

SEQ ID NO: 175298 - protein, 195 aa, Oryza sativa
  Clone ID: PAT_MRT4530_73157C.1.pep
MSDDHSGGGGEQRQCRRGFAVDVVELGAALALADMAGAAVKPAMQLQLQPTAAQEEDEEMATTRLSLQLGNNVGSIIQSSSCSSSGSSAGLPAPPAAAAAPATAYGTKPLHMLTEEEKEAKRLRRVLANRESARQTILRRQAIRDELARKVADLSTQNESMKKERETVMQEYLSLKETNKQLKEQAQHHLSLSLF

SEQ ID NO: 175299 - protein, 373 aa, Oryza sativa
  Clone ID: PAT_MRT4530_73158C.1.pep
MARVPGAARGAKVVLPDGAVRAVKVPAKAAELMLEAPGHFLADARALRAGGRIAALGADEDLELGGLYAAFPMKRLGAPAAPADMARLAAAVSRDQAAARRSSATAKVAAVVVAPQHDAAMAEEEEDAARPRLDEMAVGDAAAEAEISELKQRISGGRRGKGNIWKKKLGGKMINEMKIFEHFTYLCTLIQPYANRPHCHESVTILFEEIKDRDNRPQRRLLPGNLCINEEGGGGVGQGGINNKDQASLVASLATHYRPQCHSGQSQSSGGINFLSEKKDEREEKEENDRFNGLMISLLELFRRVNLLVTISLLQPTALPALPTTTPTRATAEASHRAEEASQVWNYEERMTICSYRFCRSVEIDLEYQNTYL

SEQ ID NO: 175300 - protein, 357 aa, Oryza sativa
  Clone ID: PAT_MRT4530_73159C.1.pep
IFEIQSNDYPCYHLEGGWRNVRGRHDHSTIHLEQSPAAACPSSSINVPPYHPNANGPFGSAPVQRDRAPLSVHPRILPPGPDGSSIAFRERPYYPAPQSTNISAPVPTLPISCDSAPFAHGGYAPRSAHRNNLRTYPPPAFASSSNPGAVSHEPAIPSYPPAAPSYPPATSAASSSVQPFHAEAAAHLRHPRHVSVGGSGSARSRRMRDSYHGFHHLMIEDNNLGRSAAERFMMLDQLVIHESREAFDPHWDMRLDIDDMSYEELLALEERIGHVNTGLADEKISGCVMEVACCSSSHLQDDQDNERCVICLEEYKHEDTLGRLKCGHGFHCNCIKKWLQVKNTCPVCKAAAADEGS

SEQ ID NO: 175301 - protein, 152 aa, Oryza sativa
  unsure (1)..(152): unsure at all Xaa locations
  Clone ID: PAT_MRT4530_7315C.1.pep
LSLTLNRLECALLVIAACASLHALLPMHHIIPNLHRASAATSPCVQRHRLRPHLQRQGCQQELPARPLLPSRALHVQNNHICQQLPTACXCNTHYHRALALNHVISQQVQLQQHGDLYYDRNLXQARALLRFNVPSRYGIYPRYYGAPSNLT

SEQ ID NO: 175302 - protein, 118 aa, Oryza sativa
  unsure (1)..(118): unsure at all Xaa locations
  Clone ID: PAT_MRT4530_73160C.1.pep
RSSFPNHRTRAPTPPIDQPISPQNEDEQTCLWSTAIRRRRGFGFLNATSNLIFSCMGAAYGTAKSGVCXASMGVMRPELAMNSILPVLMACVLGIYGLIIAVIISTRINPNAKPYYLF

SEQ ID NO: 175303 - protein, 105 aa, Oryza sativa
  Clone ID: PAT_MRT4530_73161C.1.pep
IFLKKFKKPRGPTPLVPKGRGAKTLPPLWAFTVWVGTCSPELLFLFLFFLGGNPPSFSCVLGCPHGFCSYFARGGPVALPGGLLPLCGKGPAPLFGLIPPVKFCC

SEQ ID NO: 175304 - protein, 54 aa, Oryza sativa
  Clone ID: PAT_MRT4530_73162C.1.pep
GPSRHSPQEAHPPRASTSLACSPHWQPCKLLYSSRGGEAVWILLRVFARPNAWV

SEQ ID NO: 175305 - protein, 132 aa, Oryza sativa
  unsure (1)..(132): unsure at all Xaa locations
  Clone ID: PAT_MRT4530_73163C.1.pep
HRQGLTQGKGRNTLLFSDFRETNSWRVILYSSASFLAKKNEWGATLQDRRHNTVTVYMVVLTAAXYNISLSRAGTTIASDRRGVSPAMDDSNASCGMRLASIGLENTDANRQTYRTIFATGTSLRQHISCAI

SEQ ID NO: 175306 - protein, 62 aa, Oryza sativa
  Clone ID: PAT_MRT4530_73164C.1.pep
MGSLAEIGGHLKLSCLLLQRQVEDDSNLGAVTLLFQGSGLVLIVFREIMKAFPYRSRKKSAS

SEQ ID NO: 175307 - protein, 356 aa, Oryza sativa
  Clone ID: PAT_MRT4530_73165C.1.pep
MEKAFWDVVVDSLRGDMPDYSYLVQLVKEVRDTFGSNSFVIAVIKGLRFTMEELKALKTEVSRARIQLLEPIIKGSGGVEYLQKAFADRYGFPSNASVALRSTAQWISTSKDTVEVEWNEHAQPFVATLRSGHGVPDQRQSTIPVSDDTGLPECTGQRLDQLIRIGLLQLISGIEGVQMQSVTETFKLNWLRLSMLVQRQVLATDDPNITPTELESATSQLFNTLAELLDNFPDVSTAKIMEVMLRSSSSSSSGSTTGSPSDERTESRKQILARVFLKSLQTDDPVFKKVSRSVYCAFRAITLGGSGARGRKLADAALRRIGATKLTDRVVRSAEILIRAASISQQVHGPWYNHLV

SEQ ID NO: 175308 - protein, 450 aa, Oryza sativa
  unsure (1)..(450): unsure at all Xaa locations
  Clone ID: PAT_MRT4530_73166C.1.pep
GFFPPPPFFFGGGKKPFFFXGGPPPRGGGGGGTPRPPPXRGGPPPPXGGGAPPKTGGAPPGGGPPPPQKKKKKGAPPFLGGGTPGGPPPPPGGGWGGKRGAPIKKRGPPKKKGAXKNPGGGGGGGPKGGPPKKKGNPGPPGEIGGPWGGPQGGGPRGAPREGAPPPKRGPPGXPGAPHPGGGGGPGDPKTGGPGEKXGPPKRGPPPKTGPPPGXKGAPKIFXRGPPNFWGPPNPQKGERGGFPGKXGGPPPPPGTXGKXPPNPPPGKRGGPXGKGGVGPPKGSRGGKXKGPPQNKPMGGGEKNGVGKSPPXGNRGPPPREXGGGGEKPGFGPSPPRGNGTPPVGKXGVKKKRWWXPPXPGTQKKGGPKKRDPXXGGGRGGXRVPKNGPKPXRDPFPNKGGXGXRIGETPRNQEPKGPLFPVITPRRGXGGGPRQPARPLQKLKPEKKGGP

SEQ ID NO: 175309 - protein, 1151 aa, Oryza sativa
  Clone ID: PAT_MRT4530_73167C.1.pep
MGVPEAVALEIPAAAEAEEEVEEEEGSPSPPVVARVPPRIRRRLLLRHRGGAPATAEEIEAKLRDADLRRQQFHEALSCKARCTVRYPSCPSQEEDPKKRLEAKLVAAEQKRLSLLAKEQSRLAKLDELRQAAKNDAELRFKKEREELGMKVESRVRQAGEKRTQLMHARSQRRAALEERTTKYLVQRVAWENKYRERVHSAILQKRTAAEKRRTGLLEGEKRRAQGRFSQVQLAARTLSCQREADRSKLKEQLEDKLQRAKRQRAEYLKQRGSTHSFTYTASVKHGDFLSRNLARCWRRFITSRKTTVVLARAFDMLRINEESVKPMPFEKLALCIESPTVLQTTRAFLDRLESRFTLSQSSSPSSPENIDHLLKHLGSPKRTLSKSGGRTRVTPTKAARNSDVSKLPRYSPRIVLCAYMILGHPSVVFNERGEREKLLVESAENFVKEFELLIKTILDGSSGACILKQPILDDLSPGSSNYQESSAVVADRKKFRSQLASFDKAWCAYLYHFVVWKAKDAKSLEEDLVRAACKLELSMMQTCKFTAEGQPENLNDNLKAIQKEVMVDQTLLREKVRHLGGEAGIERMEVALSEARTKFFEAKGNRSPLATTIKNVAATCSSGESPISDMKENSNINDKRPSQAVQSMFRVPSSPSESNTAGITMSNPMTVSSTLSEKRPTENEQMVNEILHGFLADSSSNIGTVEGGFKEKVRETMEKAFWDVVVDSLRGDMPDYSYLVQLVKEVRDTLYEMVPKGWKEEIINNIDLEILLQVLESGTQDMQYLGQILQYSLGMLRKLSSPAKEDEMKRSHDKLLGELTEHSECNNSGSNSFVIAVIKGLRFTMEELKALKTEVSRARIQLLEPIIKGSGGVEYLQKAFADRYGFPSNASVALRSTAQWISTSKDTVEVEWNEHAQPFVATLRSGHGVPDQRQSTIPVSDDTGLPECTGQRLDQLIRIGLLQLISGIEGVQMQSVTETFKLNWLRLSMLVQRQVLATDDPNITPTELESATSQLFNTLAELLDNFPDVSTAKIMEVMLRSSSSSSSGSTTGSPSDERTESRKQILARVFLKSLQTDDPVFKKVSRSVYCAFRAITLGGSGARGRKLADAALRRIGATKLTDRVVRSAEILIRAASISQQVHGPWYNHLV

SEQ ID NO: 175310 - protein, 366 aa, Oryza sativa
  Clone ID: PAT_MRT4530_73168C.1.pep
MEDNLPVNVREYQELAKKALPKMAYDYINGGAEDEHTLRENIAAYTRIILRPRVLVDVSKIDMSTTLLGYTMRSPIIVAPTGGHKLAHPEGEKATARAAASCNAIMVLSFSSSCKIEDVASSCNAIRFYQLYVYKNRNVSATLVRRAESCGFKALLLTVDTPMLGRREADIRNKMVFPRSGNLEGLMTTDDHDTTNGSQLERFARATLDPSLSWKDIEWLKSITSMPIFLKGIVTAEDARRAVEAGVAGVIVSNHGARQLDYAPATIAALEEVVRAVAGAVPVLVDGGIRRGTDVFKALALGARAVMVGRPVFFGLAARGEAGARHVIEMLNGELEVAMALCGCRSVGEITRSHVMTEGDRIRSLL

SEQ ID NO: 175311 - protein, 70 aa, Oryza sativa
  Clone ID: PAT_MRT4530_73169C.1.pep
SGGLGEIMLSTRKRSFCHPTDPVCQTEQNCSPDPGVACCLTEIKNGTALDFYKQRMTVCASLLSVQRQKE

SEQ ID NO: 175312 - protein, 119 aa, Oryza sativa
  Clone ID: PAT_MRT4530_7316C.1.pep
KREGCKGKWRHEHRDNGFGTLGKKRSEQRFMSCSVSELDFRQAPGLDVHSLPTPCASWWTTSAKRPRLLLIAKDLTCPSSQIKINAAPDSLLQRGAASCFLHELNKFGPRAESCSPGIH

SEQ ID NO: 175313 - protein, 112 aa, Oryza sativa
  Clone ID: PAT_MRT4530_73170C.1.pep
MAMAMERRWWRPQIRRRRGGRRWAAHAGIPRLPLAFSGTPLASAGIGGEENGRIWLSCPDPARPRVGMGILQVPSVCRKCCLKNPFSQEWILISCGDVPSCTFSFHIRYKWL

SEQ ID NO: 175314 - protein, 78 aa, Oryza sativa
  Clone ID: PAT_MRT4530_73171C.1.pep
LAPSRAKHEVTEKEMYYVENTGNVNPGQKLGQQATNTGMAAMENASGSLGPAEKSITTERESEYIQSAENREGITSNP

SEQ ID NO: 175315 - protein, 51 aa, Oryza sativa
  Clone ID: PAT_MRT4530_73172C.1.pep
HEAAARRGAAWCGLWSCDRRPVLLHSGCVRRRWFPTGYGTYGKSNDSLISA

SEQ ID NO: 175316 - protein, 55 aa, Oryza sativa
  Clone ID: PAT_MRT4530_73173C.1.pep
VAYDTAYTAQVGQQNNPPDSTVDPHIVPPMITATSILFKSLSRFSQPCIPCHRLQ

SEQ ID NO: 175317 - protein, 157 aa, Oryza sativa
  unsure (1)..(157): unsure at all Xaa locations
  Clone ID: PAT_MRT4530_73174C.1.pep
MARPSLPCAVVAVLLLALLPTPSTAGDPDLLQDICVADLTSAVKVNGFACKAAVTEDDFYFKGLAAAGNTNNTYGSVVTGANVEKLPGLNTLGVSMSRIDYAPGGLNPPHTHPRATEMVFVLQGTLDVGFITTANKLYTKTISAGDVFVFPRXLLHF

SEQ ID NO: 175318 - protein, 69 aa, Oryza sativa
  Clone ID: PAT_MRT4530_73175C.1.pep
RVRQIPPILFGWFTSQGSFDWNGVPRSYTYVAHYYLLVSLMTTASSIISRGTRPAGGGRPLSREARRYP

SEQ ID NO: 175319 - protein, 57 aa, Oryza sativa
  Clone ID: PAT_MRT4530_73176C.1.pep
MANMTAEERGGDVGPKEGLGVNGFKKEEVNISPGERARQGSNPGQRGACQRPLPLRY

SEQ ID NO: 175320 - protein, 80 aa, Oryza sativa
  Clone ID: PAT_MRT4530_73177C.1.pep
MMRRSMFLPVCALVLVMLCVCVASHMDVDERRGGARAYMGGHGRPVGIRPRTSGSPRGLSGGTWAACAGSSLLAAAAMLM

SEQ ID NO: 175321 - protein, 339 aa, Oryza sativa
  Clone ID: PAT_MRT4530_73178C.1.pep
MDNVGHGPHLFKALSWRNQSYMNDIADRCAPSPHPLSMCQSRAAAFGYPCEEYKVTTEDGYILSLKRIPHGPHDSNTSTEMRPPVLLFHGLMVAYWEWSWDELASYDLPAVLQFAYDHTGEKIHYIGHSLGTLMILAAFSEHKLLDVVRSAVLLCPIAYLSRTKSKLLKLAAHIFLAEIMVDSIYLFVCLVQTVHWLGFYEFNPVGPVAHEVLSQICGDPEINCYDLFSAVAVVRNGGVSRFDYGNAKDNMKHYNQPRPPPYNLSSIPNHVPIFLTHGGEDYLGDVPDTRHLLRTLVKKHNSDSIEVIYVPDYAHADFIMAYNAPELIYGPMVDFFKRH

SEQ ID NO: 175322 - protein, 72 aa, Oryza sativa
  Clone ID: PAT_MRT4530_73179C.1.pep
MVLKVVLMAIKDREDKIYVEDRPPVKNKSSIQGVGWQSRSQSEELDKQLCIQERPMMENFLLVGSQSERVRQ

SEQ ID NO: 175323 - protein, 283 aa, Oryza sativa
  unsure (1)..(283): unsure at all Xaa locations
  Clone ID: PAT_MRT4530_7317C.1.pep
KGKEGLLRQRARVSVDRAHDGGSRKRTAEIDRSTTGSRERATTXDVSDDVSDDVSSGGGSGAQARRRTTARRRERRAPTGRGRRGELTGDQRRSGGGDRVDGGDGAPAVFGGGEAADEDGDDLAIPTVXSRVTTTTVATAAHGWTNGGDGGAKAHEARALHTTAGEGERGSGGXEAATKAHGDRRRRRKARVRRREVDPNRTRIHGFPNRIRRXFQKRKGRGDLKDHFPSINSAGEGKDRRAPPVSGXRERRAAARRIGPDWAEGERERVLGRLSAQSQKKTF

SEQ ID NO: 175324 - protein, 141 aa, Oryza sativa
  Clone ID: PAT_MRT4530_73180C.1.pep
MEIVIVAPSILLSLLLVLHSTAAARSAAMAPAAADELAPSALGPAADEHISDVYIVFVSRDDYVDSVDYDVRLLASVIGSASEAKTAMIYHYSGLGFAASLAPEQAERLSRKEGIAIFKDRMYHVEKEEDGRLPRFFEENV

SEQ ID NO: 175325 - protein, 417 aa, Oryza sativa
  unsure (1)..(417): unsure at all Xaa locations
  Clone ID: PAT_MRT4530_73181C.1.pep
ILAAHCSTERTVRARLDGFKNRLRVKDDEIGRKNLEMEALANTLKEAKAENKRLQSELEKGSEATAEVDRLKAELEKGREAIAEVDRLQTELKKEKAHSAVLTDYYNLTEPKMEALRLEVSKAEASAMEESRRFSREMAKTTESARTACQTLCLALTDMGAKVXGVPAEDASAFNFFEWTQQXAFTMGLLQQFSYEHVAEFPNYAKGDWEIGAQDISPALRAWRKQFWQKDGRSTAKARLLEQLAKAEAADLCEEEDAVAEGGGGDAQDHLEGVRQKLCIRPPSGSWRNQNEKFVALKGLPKTQCPFRPTYREMVINGRSYKVFKVAGWLRAHPGRTLEDYDLVHPRRLEDMARFWRNHQKTDRQEPISQRRYSLVRVSPPSPLKIVYDISSDDEPSSPDHSLERDRDRGGEDVIYL

SEQ ID NO: 175326 - protein, 637 aa, Oryza sativa
  Clone ID: PAT_MRT4530_73182C.1.pep
MSKWGRHWMARWFYHTIPFEAGSDSAKALRCRCRAIEPNRKPKIAVDGAMEARFALLRKADAEARRMIGDVSVVEYSQLLTRQAAGRANRVYNGELPPRANPHKADDDAGPSRKRTRGQVKLAPRKRRVPVSFDSDANDEDDVEERDGEEEGEEEEEVEVVVEKAADEAVENRVDTPGYTPTPSPGHNETGVESNSSPLHRKELDGAKALIAFSTGKAAKGGPVKNISKKKGLVDVARVFSDDESSDETPTSPAARSLDLSTVPVLSLGADGVGGSAAAGASASTERIVTAAARVFGSPLRQPVVSPLVKAKGKGAAVEISASEYSLAAPHFAPSDFETRVDLIPFVEGILAAHCSTERTVQACLDGFKNRLRAMDDEIGRKNLEMEALTNTLKEAKAENKRLQFELEKGREARAEVDRLKAELEKGREAIAEVDRLQAELRKEKAHSAVLTDYYNLTEPKMEALRLEVSKAEASAVESQRFSREMVKTTESARTACQTLRLALTDMGAKVRGVPTEDASAFDFSEWTQQAGGSVSDCATTYGDCCARVSAAFTMGLLQQFGCEHVAEFPNYVKGDWEISAQDISPALRAWRKQFWQKDGRSTTKARLLEQLAKAETADLCEEEDAAAEGGGGDAQV

SEQ ID NO: 175327 - protein, 52 aa, Oryza sativa
  Clone ID: PAT_MRT4530_73183C.1.pep
YPRQYFYEDGRAGAKPNDQHRETATDRADLSGVGRLGVRHTDATDGADLGLP

SEQ ID NO: 175328 - protein, 44 aa, Oryza sativa
  Clone ID: PAT_MRT4530_73184C.1.pep
VGQSARRNSNGEGEVINHLNHLQVNDCIGSLIMADRPRVSVSVG

SEQ ID NO: 175329 - protein, 886 aa, Oryza sativa
  Clone ID: PAT_MRT4530_73185C.1.pep
MKTVFGSVNFNVHPEWSDLWPVNAAMSKWDRHWMLRWFYHTIPFEASSDSAKALRSWRRAIAPNRKPKIAVDGAMEARFTLLRKQIAVEQGEEVDGLPKLVLPEGTNGMAAKGGSVKRISKKKGLVDVARVFSDDESSDETPTSPAGRSLDFSTAPVLSLGADGAGGSAAAGASASAERIVTAAARVFGSPMRQRVISPLVKAKGKGAAIETSVSEYSLAAPRFAPGDFETRADLIPFVEGILAAHCSTERTVRARLDGFKNRLRVKDDEIGRKNLEMEALANTLKEAKAENKRLQSELEKGSEATAEVDRLKAELEKGREAIAEVDRLQTELKKEKAHSAVLTDYYNLTEPKMEALRLEVSKAEASAMKKSRRFSREMAKTTESARTACQTLRLALTDMGAKVRGVPAEDASAFNFFEWTQQVSGSVSDCATTYGDCCARVSAAFTMGLLQQFSYEHVAEFPNYAKGDWEIGAQDISPALRAWRKQFWQKDGRSTAKARLLEQLAKAEAADLCEEEDAVAEGGGGDAQDHLEGVRQKLCIRPPSGSWRNQNEKFVALKDLPKLAIWVPPVLNIETLERGSVPGMVELFAFQCRQSKGSRPGFVLDEDPLGNGGGGESWTISVFVLDGDFVDIPPEEDLPTAGPQPGPNDDDANDPDDGNIWQLGHPGNQGGGDWDNFVQQHFSWLGSKEIADREGPKHPSFYPMEGLLEKIDHLCKARNHAYNFEFWPFSSALWKPFHELDHAPPVVKRAHSSWALLPSSPDDGLTHQEILDAMTLQAQSSSPEVTPAVILIPKAHVKKRDEKTTLYNPTRRHNSRILNASQELKIDHRMGIGKPRGISAKKLNELVGISKILIPGSKINESDFSALDDDINLDSSPSDCSLSLL

SEQ ID NO: 175330 - protein, 650 aa, Oryza sativa
  Clone ID: PAT_MRT4530_73186C.1.pep
MDSGRSCGATKRENIPKLLAHLPMVNSRSEVVGNNRDSGVSGGGSWGESACVHGSRFRTKRMHACGLLAFRMLTVGRVKVVEVLAAAMTCGTARRRRSSLGERRRLKWDDELLQASMHEGCEVKEMVYARGIEQWLTEAAVIDDDGGGDSRSVPRWKREKDRGDLDSNGDGDGRHLHGPGHNETGVESNSSPLRRKELDGAKALIAFSAGKAAKGGPVKKISKKKGLVDVARVFSDDESSDETLTSPAGRSLDLSTAPVLLLGADGAGGSAAAGASASAERVLTAGARVFGSPLRQPVVSPLVKAKGKGAAVETSASEYSLVAPHFAHGDFETRADLIPFVEGLDGSEPSSGQDDEIGRKNLEMEALANTLKEAKAENKRLQSKLEKEREARAEVDRLKADLEKAREAIAEVDRLQAELRKEKAHSAVLMDYYNLTEPKMEALHLEVSKAEASAAEESQRFSREMAKTTESARTACQTLRLTLTDMGAKVRGVPAEDASAFDFSEWTQKAGGSVSDCPTAYGDCCARVSAAFTMGLLQQFGCEHVAEFPNYAKGDWEISAQDISPALRAWRKQFWQKDGRSTAKERLLEQLAKAEAADLCEEEDATAEGGRGDAQDYPQGVRRKLCIRPPSGSWRNQNKKFVALKDLPKV

SEQ ID NO: 175331 - protein, 206 aa, Oryza sativa
  Clone ID: PAT_MRT4530_73187C.1.pep
VPVSSDSDADDEDDVEEEGEEEEEVEVEKAVDEAVENRVDTPGYTPTPSPGMAAKGGSVKRISKKKGLVDVARVFSDDESSDETPTSPAGRSLDFSTAPVLSLGADGAGGSAAAGASASAERIVTAAARVFGSPMRQRVISPLVKAKGKGAAIETSVSEYSLAAPRFAPGDFETRADLIPFVEGVSNLVLPASTPSLFTELNEFDE

SEQ ID NO: 175332 - protein, 46 aa, Oryza sativa
  unsure (1)..(46): unsure at all Xaa locations
  Clone ID: PAT_MRT4530_73188C.1.pep
KLXGDVRLXXXXGTVSXVAPXXPXDERTFRAESWHIKPYXRKXDPN

SEQ ID NO: 175333 - protein, 968 aa, Oryza sativa
  unsure (1)..(968): unsure at all Xaa locations
  Clone ID: PAT_MRT4530_73189C.1.pep
MAPRKPDPSSVKGPDPDRIVDDTTAYLGISLIDDGELAKLVSSGALVEGQAFAPGKAVVPKPVDNRTVXVFAVFFETGLRFPCNALLPEILRLFQVELPQLSPSALVRIAIFNWACRTSGFEPSAELFGAIFFSTVNSKTAGSDSTKALRCRRRAIAPNRKPKIAVDSAMEAWFALLRKFCSRLSCRDLVEEFCMLRIFPLSXSCQVAVEQGEEVDGLPKLVLPDGTNVLTLDQADTEARRMIGDVSVVKYSQLLTRQAVGRANRVYNGELPPRANPHKADDDAGPSRKRTREQVKLAPWKRRVPVSSDSDADDEDNVEDRDGEEKGEEEEEVEVLVEKAADETVENHVDTPGYTPTPSLGHNETGVESNSSPLRRKELVGAKVLIAFSAGKAAKGGPVKKISKKKGLVDVARVFSDDESFDETPTSPTGCSLDLSTAPVLSLGVDGAGGSAAAGASASAERIVTAVVRVFGSPLRQPVVSPLVKAKGKGAAVETSTSEYSLAAPHFAPGDFETRADLIPFVEGVSNLVLPASTPSLFTELNEFDEGCSAIKSLAVRILAAHCSTERTMRARLDRFKNRLRAKDDEIGRKNLEMEALANTLKEAKAENKRLQSELEKGREVMAEVDRLKAELEKEKAHSAVLMDYYNLTEPKMEALRLEVSKAEASAVEESQQFSREMAKTTESARTACQTLRLALTDMGAKVRGVSAEDASAFDFFEWTQQAGGSVSDCATAYGDCYARVSAAFTMGLLQQFGCEHVAEFPNYXRKGDWEISAQDISPAHRAWRKQFWXKDSRSTAKARLLEQLAKAEAADFCEEEDAAAEGGGGDAQDHPEGVRRKLCIRPPSGSLRNQNEKFVALKDLPKVRCPFRPVYHEMVINGRSYKVFKVAGWLRAHPGXTLEDYDLVHSRHLEDMARFWQNHQKTDRQEVISQRCYSLVCISSPSPLRVVYDISSDDEPSSPDHSLERER

SEQ ID NO: 175334 - protein, 80 aa, Oryza sativa
  unsure (1)..(80): unsure at all Xaa locations
  Clone ID: PAT_MRT4530_7318C.1.pep
KRDSWRSGSQPDRASCSSSGRDPLQASEXSRVIFIRKRXGASEIQSNQAGEXTPSSSPWTPSRVSTPXTAXQEXRGERES

SEQ ID NO: 175335 - protein, 67 aa, Oryza sativa
  Clone ID: PAT_MRT4530_73190C.1.pep
AGEWQNAGGGLGPLLVAGPPLGGEYSTSVAGDFGDLAIVVHKHVVVSLEIQILCHTSVDEYTAQCAV

SEQ ID NO: 175336 - protein, 965 aa, Oryza sativa
  unsure (1)..(965): unsure at all Xaa locations
  Clone ID: PAT_MRT4530_73191C.1.pep
MAPRKPNPSSAKGPDPGRIDDDTTAYLGISLINDSELAKLVSSRALVEGQAFAPGKAVVPKPVDNRTVVFAVFFEAGLRFPCNSLPEILRLFQPSDELFGAIFFATVNSKTVITPVGTKKTVFGSVNFNVRPERSDLXPVNAAMSKWDRHWMARWFYHTIPFEAGSDSAQALRCRRRAIAPNRKPKIAVDGAICLXSLLLWFIFYKLXCSNLDXAIYYINLEIVXELSSSXVLVDEDGTMASLVNQSIPNEKDACMWSSSLQDAYRGXVKVVEVLAAAMTCGTARRRRSSLGERRRLKWDDELLQASMHEGCEVKEMVYARGIEQWLTEAAVIDDDGGGDSRSVPVKKSCXSPSPSPGHNETGVESNSSPLRRKELDGAKALIAFSAGKAAKGGPVKKISKKKGLVDVARVFSDDESSDETLTSPAGRSLDLSTAPVLLLGADGAGGSAAAGASASAERVLTAGARVFGSPLRQPVVSPLVKAKGKGAAVETSASEYSLVAPHFAHGDFETRADLIPFVEGVSNLVLHASTPSLFTELNEFDEGCSAIKSLTVRILAAHCSTERTVRARLDGFKNRLRAKDDEIGRKNLEMEALANTLKEARPEVDRLKADLEKAREAIAEVDRLQAELRKEKAHSAVLMDYYNLTEPKMEALHLEVSKAEASAAEESQRFSREMAKTTESARTACQTLRLTLTDMGAKVRGVPAEDASAFDFSEWTQKAGGSVSDCPTAYGDCCARVSAAFTMGLLQQFGCEHVAEFPNYAKGDWEISAQDISPALRAWRKQFWQKDGRSTAKERLLEQLAKAEAADLCEEEDATAEGGRGDAQDYPQGVRRKLCIRPPSGSWRNQNKKFVALKDLPKVXCPFRPVYREMVINGRSYKVFKVAGWLRAHPGRTLEDYDLVHSRRLEDMARFWRNHQKTDRQEAISQRRYSLVCISPPSPLRVVYDISSDDEPSSFDHSLERERS

SEQ ID NO: 175337 - protein, 131 aa, Oryza sativa
  unsure (1)..(131): unsure at all Xaa locations
  Clone ID: PAT_MRT4530_73192C.1.pep
XGRGTXDENKKRXAGNRKXXSPQXXGGFPPXRXGARNSPXXVAXRNPXXXGNDHXCXIFXFXEDXWXVCSSXSWXXLXVLXXQQFLNILQXSFGXVLCSSXSQERNADSXXEAMLSPLXXPXSSXGRYFEX

SEQ ID NO: 175338 - protein, 63 aa, Oryza sativa
  Clone ID: PAT_MRT4530_73193C.1.pep
AMPTCCLQSTLKIPGTAPAIGCRQKLGGGGRGRVRQPSWRRVMRGGAKVASAPLFLVSTVTTP

SEQ ID NO: 175339 - protein, 326 aa, Oryza sativa
  Clone ID: PAT_MRT4530_73194C.1.pep
MPAAAQRCLCCSSNRRGRAGDGASRGAADSPTEPTGGGERETAPAGTAARRTLRRSRVDRRRRGATSAAPPTGGGERETAPAGAWRTPRRSRADQRRRGAASALPFPSLSGAPHLPADDEHRGLGGPAAAQELGRHGILPSGERHPASAPPPSSFSLRALKEIGATLVGGRIRRGVAARRQASASVSTILPRRGELGDVPPSGHPEARGEQLHEEAHGHGPEEEPEQRIASGRAGLEVALEVARVQKRDAHQDPGPREQPQPAPQEGRHTATAGEGVVVVEVGVIIAGEPCRSTPESGLPHRFVAQANETLVRCRVRRRRRECAVN

SEQ ID NO: 175340 - protein, 269 aa, Oryza sativa
  unsure (1)..(269): unsure at all Xaa locations
  Clone ID: PAT_MRT4530_73195C.1.pep
LFHRRKRGGWRRASPGDWRGRARHGASRSGGAADSSTEPSGPAAAQRCLCCSSNRRGRAGDGASRGAADSPTEPTGGGERETAPAGMAARRTLRRSRADRRRRGAASAAPLTGGGERETALAGARRTPRRSRADQRRRGAASAAPXVGGRIRRGVAARRQASASVSTILPCRSAASPLFPLPSPLSHLAAVQSLHWLKVGPTTTLSPILPLSLPSXEPXXRSAPSPGTRRGELGDVPPSGHPEARGEQLHEEAHGHGPEEEPEQRIASG

SEQ ID NO: 175341 - protein, 539 aa, Oryza sativa
  Clone ID: PAT_MRT4530_73196C.1.pep
MRVSAPPVEPRRRMNPLQRLAAAAIDAVEEGLVAGLLERGHALPRTADPAVQIAGNYAPVGERPPVRGLPVSGRLPACLDGVYVRNGANPLHAPRAGHHLFDGDGMLHAVRLAGGRAESYACRFTETARLRQEREMGRPVFPKAIGELHGHSGVARLLLFGSRALCGVLDASRGIGVANAGLVYHDGRLLAMSEDDLPYHVRVTHDGDLETVGRYDFHGQLDADGTMIAHPKLDPVTGELFALSYNVVSKPYLKYFYFTADGRKSRDVDIPVGAPTMIHDFAVTENYAVVPDQQIVFKLQEMVRGGSPVVYDREKASRFGVLPKRAADASELRWVEVPGCFCFHLWNAWEDDATGEIVVIGSCMTPPDAVFNEPSQSPEEESFRSVLSEIRLDPRTGVSRRRDVLRDAAEQVNLEAGMVNRQLLGRKTRYAYLAIAEPWPRVSGFAKVDLESGTAEKFIYGEGRYGGEPCFVPRAGAAAEDDGHVLCFVHDEERGTSELVVVDAGSEAMEEVAAVKLPGRVPYGLHGTFIGANELQRQA

SEQ ID NO: 175342 - protein, 57 aa, Oryza sativa
  Clone ID: PAT_MRT4530_73197C.1.pep
FFFFFLRIIGRLISPTTKMRFCLKQRVHGSVQAHSLCGISTNKSRASLDAMGQRSDK

SEQ ID NO: 175343 - protein, 126 aa, Oryza sativa
  Clone ID: PAT_MRT4530_73198C.1.pep
KLVHLAKGPIKIPCSLTRGGPCPPLIWTPQGQGCRKNQATQGELTGPPGSLSLGGAGDFWEKQEPPPCRRRQIIPPPNGRPGGPELTARDLPPPGDIVKRAAPPRSGALSCRGTPRGFWGPLFFGG

SEQ ID NO: 175344 - protein, 115 aa, Oryza sativa
  Clone ID: PAT_MRT4530_73199C.1.pep
RNDTGVGIWHTLHVYCTYVYIGELAMEEYMPLAQLVGTSAVEADGLLLNLLNYFGRLHATLCHAVKDFINLGRRARLAQVIRLRFVRRIRLSSLHHIGRLVACQCHSSSQVGRMG

SEQ ID NO: 175345 - protein, 182 aa, Oryza sativa
  Clone ID: PAT_MRT4530_7319C.1.pep
GLRWTGCTATVHGNGRPRSNLSKTDGRDQTDPPRLTENDDDDVSDDGSYDVSTGGGSGAQARRRTTARGRKRRTPTGRGRRGELTGDQRSGGGTTDSAGDEEEAAAEIGSTTATVLRRSSAAAKGRTRTAMTWRSRRWPSRVTTTTVATAAHGWTNGGDGGAKAHGARALQTAVGKGEGGDE

SEQ ID NO: 175346 - protein, 221 aa, Oryza sativa
  Clone ID: PAT_MRT4530_731C.1.pep
MASSPLLRSAGGVLRRSIHGAREQSSLFFFPTATDLAGRRQSVYKQAAFPSSSFARPSLAVADHPRRLFSSSGCSGRTEPAEKLLSMDEFLEHRRQFGKNGEEDTFRDAEISEHEKREEKLLRKRLSSTDGLKAPVERTVSDMFAASTFFVPGDGELMLFWSDQCIGGRSVAFLAPDLLFTVLQCLWGSRTVASGLVNNSWVSDIRDALTVPQRYWTADLL

SEQ ID NO: 175347 - protein, 487 aa, Oryza sativa
  Clone ID: PAT_MRT4530_73200C.1.pep
MQLVHERVAPPPAAELAGRRGGGGGEGMEIVTARVGGCGYGYEEEGGTRRQQRRRRKVSDGHVVAQLLDSPLPTPRRSCCGSSSAAGTPRSAARCGGGGSPGAPPSSPPLSPQRTHVPFSWESSPGVPKDAACGRKVVREVLPPRPPPGRGGGGGGSPAHAHARAYFGNATETTSSDDDDSDDTFSDALDRISASDRFAAFSSRLSSIDGAGSLRLPSFIMDRFLPAANAIATTSADKRPKKTPRRGARSSKQDEEATASARRRAQSLRRASGREQPKQPPPRHHVSTLQRKESEPPPPPRQSRDIDEETQSDEMSPRSCGFMLFLPWSVKPVLCGFARSRTSRAADASTTASSPPRRSVTLGNALEKEKEKEKDKSKLRGGGGDPSRWSDEKSGSGREWSSPGWGTAILGTSKRYCADARKALSRLARSATDGRGSPRVTGERRAGKPAAAASPRRSTSGEIPPLSPPSESWLSHARGSSTLSNKR

SEQ ID NO: 175348 - protein, 224 aa, Oryza sativa
  unsure (1)..(224): unsure at all Xaa locations
  Clone ID: PAT_MRT4530_73201C.1.pep
VSDIRDALTVPVISQLLLVXMWCFTYKLSPGVGDHLVWRWMSDQCYSARSVYQAFFFGQHSFVRADLLXHTKSPAKCKVFLWFAFQQRYWTADLLXKHGIDSHSAYPFCTQHLETANHILLDCVFARXVWLRVVSLPGXGTHPLPRGSWLQDWXSSSRAYLPEHLCVGLDSLVLLVSWQLWKERNSRVFDFALSSVSVVLESILSEGHMWSLTGVAAFGDFLGV

SEQ ID NO: 175349 - protein, 66 aa, Oryza sativa
  Clone ID: PAT_MRT4530_73202C.1.pep
GRPCYNKAPGGFMPFFLQRVGVPPNVIWLGPPLARFPWQNPLPLKVSPFLGSFSYKAPPPGCLFGG

SEQ ID NO: 175350 - protein, 64 aa, Oryza sativa
  unsure (1)..(64): unsure at all Xaa locations
  Clone ID: PAT_MRT4530_73203C.1.pep
ASSRNGRLTEMSPAVFXPCTCSIXGWQLLEHSHLVIDINTSARIPGCLMVFLSPNTVPNSSMTW

SEQ ID NO: 175351 - protein, 457 aa, Oryza sativa
  Clone ID: PAT_MRT4530_73204C.1.pep
MAFHQRSISLPSRPISKVEEELHSIEAWISSPSLTIETISDGFRRLGDIYSSIEEIMCLPSNQVCSSEQRRLLDGEMECSLELLDLCNAMNEVFTELKAIIQDLQVSLRKGDGAVLQAKIQSYIRLVKKAKKHSKKTLTKVVSDKEDCRIVKLLSEAREITTSLFESTTHLLSKQIATPKLSLISKAFQKKNPVICNEDQLQVLECSIRDLEAGAGLLFRRLMAFHQRSISLPSRPLSKVEEELHSIEACISSPSMTIEMISDGLRRLGDIYSSIEEIMCLPSNQVCSSQQRKLLDGEMECSLELLDLCNAMNEVFTELKAIIQDLQVSLRKGDDAVVQAKIQSYIRLVKKAKKHSKKTVKKVASDKEDCKIVKLLSEAREITTSLFESTMDLLSKQIAMPKLSLISKAFQKKNPVICNEEQLQVLECCIGDLEAGAGLLFRRLVQSRVTLLNILSS

SEQ ID NO: 175352 - protein, 1165 aa, Oryza sativa
  Clone ID: PAT_MRT4530_73205C.1.pep
MAALRLPRAPTTAALAAGVPHRFPAPEGEPPPPRGPNRAHLNALLTSYGRRGRLRDAQLLFDQMPSRDVISWTALLTAYADGGDLASARLVFDDMPRRNAPSWNALLSVYLRAARPRAAHALFYKMPAKNAVSYGAIISGLAKAEMLHEAELVYEEMPWQWRDPVGSNALMAGYLRVGELAMALRVFEGMTVRDVISWSAMVDGLCKHGSVSEARRVFDAMPERNVVSWTSMIRGYVKRGMCRDGLLLFLNMRREGVQVNTTTLSVALDACAAASLAREGIQIHNLIISMGFELDIFLGDSIIIMYSRFGWMVDAKRAFDCMQQKDIVSWNSLITGYVQHDMVEEAHVLFKLMHQKDAVSWTSMVVGFANRGWMRESVELFEQMPVKDEVAWTAIISSFITNGDYLSAVRWFCRMSQEGCKPNTIAFSCLLSALASLAMLNQGRQAHAYSINMGWVFDSAVHTSLVSMYAKCGRLAEAYHVFSSISNPSLIAINSMITAFVQHGFVEDALKLFTKMQNAGYKPNHVTFLGILTGCARAGFVQQGYNYFESMRPVYGVEPNPEHYTCMVDLLGRAGLLAEALEMINSMPQNDHSDAWAALLSASSLHSNLAFAKIAAQKLLEKDPYDATAYTVLSRMFSSAGMEDEEMLKVVQWIFVVVSWKKLNCMRRRLPPGPPRWPIFGNLLQLSPLPHKDFARFCTKYGPLVYLRLGTIDAITTDDPEVIREILIRQDEVFASRPRTLAAVHLAYGCGDVALAPLGPNWKRMRRVCMEHLLTTKRLESFAAHRALEAEHLCQFVWAKAQSGKPVNLREVLGAFSMNNVTRMLLGKQYFGLQSAGPGEAMEFMHITHELFWLLGLIYLGDYLPAWRWLDPYGCEKKMREVEKKVDDFHQKIIDEHRKAREAKKSASLDDDNKEDMDFVDVLLSLPGENGKEHMDDVEIKALMQDMIAAATDTSSVTNEWVMAEVIKNPRVLRKIQEELDGVVGRGRMVAESDLGQLTYLRCVVRESFRMHPAGPFLIPHESLKPTTIMGYDIPARTRIFINTHALGRNTRIWDDVDAFRPERHLPASADGGRVEISHLPDFKILPFSAGKRKCPGAPLGVILVLMALARLFHCFDWSPPDGLRPDDIDTQEVYGMTMPKAKPLVAVATPRLPPQMYGRHGKQV

SEQ ID NO: 175353 - protein, 284 aa, Oryza sativa
  Clone ID: PAT_MRT4530_73206C.1.pep
MRRSPAGGEDAGAAGREIGGFSPSSIVDYTVYAHALVPKDDKCCLSSKQRSCSTNKNNRAAPTQDVERKYRPLATGMAFHQRSISLPSRPLSKVEEELHSLEACVSSPSMTIEMISDVLRRLDDIYNSIEQIMCLPSNQICSSQQRKLLDGEMECSLELLDICNAMSEVFTELKAIIQDLQVSLRKGDNAVAKIHSYIRLVKKAKKHFKKTVKVASDKEDCKIVKRLSKAREITTSLLESTMHLLSKQIQMPKLSLISKAFQKKNPVICNEEQLQVLRVLHRRS

SEQ ID NO: 175354 - protein, 120 aa, Oryza sativa
  Clone ID: PAT_MRT4530_73207C.1.pep
QMLQKFNGIRRCFTQENVFAHSSTSIAQSLKTSKASSPQVFNHLICAITKGDLTTWPINNSTWLASSRARATRIFFSPCTLLCNWEGKKLCKASFGSPQFKLATSVPKHCITHGLKCFNP

SEQ ID NO: 175355 - protein, 224 aa, Oryza sativa
  unsure (1)..(224): unsure at all Xaa locations
  Clone ID: PAT_MRT4530_73208C.1.pep
WPDGHRPRHVHGKQLFVLATATIILPTTWLKNLSMLAYVXAAGLVSSVALTVSLLWAGVVDKGFHVALXLSGLPTALSLYFLCFAGHXLNYAVTTMLGYLIYGEVVQAPVTLNLPTGKLYTRIAILTTLITPLAKVLTSTAVVVSTVVLACTVPFFSYLMPFNVSSLNFTIVVLFPCLSYLKIYMPRFGVGRFEVAAIVGILVIGVCIAFVGTYTSLHQIICTV

SEQ ID NO: 175356 - protein, 725 aa, Oryza sativa
  Clone ID: PAT_MRT4530_73209C.1.pep
MAMENEDEEEAPRSPASVIRINDQTHEDVLVPACCRRRHGGHRELAMATVDDPQGPQIEKRVLLFFNTSKPEDQFFIGLPEAIIKADRIAVLGRGSWRRYRSDEEKPDDYTKIFLELFSAFINGRSCLAVLYQTTLGYAQLAAVIGTMVISSLRLKRQDYVDPIYQQNDDHKNIRWSLNIFYGLALSQCIVYFLVSILANPLKRMLRVGLTYKLGFWGVLSLARYVEECLLKCVSGDLRGAVSMDLVSFSNELLSSDSIENQLIGFRIVDHLLRSKMYKQRVLKKIRVSIGTIQMAVHMLSLKIDMDTDTRGHAARVLLELAPDLQILEKLVDDQDNCTQVKDAKDLIPNIIELTREGRLDCKLDFEIVHSSLKALLKPGCEKPPVTARLPRLPSVPRGYGYPYRALLTDHTESQQADLLVQVTGILAFLAADDTARKEIRNSRLIVRMLISFLAGEMNVVQDPIPRKMMETLATEALVLLTTHFKEKIVLSIVRESNVQAILAETMVEDMENIVHVLSDESADHRIGVGKLLQNLRAYQGAEYTELFKIIDKALPKVLETIDLAESKIESDSSDDHSSHAQELIDSAEGKGKLLESFIGLTVQICTNGDEMVFTDALRSANITVDEFVLKLKMILTVYKSPTADFPGVRRVVIQQMNWMMEKNPAYIVVFKKHEMDIILKETAETATKIENFLLFHSGVGAFEHEESISSIVSKSLGLITGSFA

SEQ ID NO: 175357 - protein, 215 aa, Oryza sativa
  Clone ID: PAT_MRT4530_7320C.1.pep
MDSPATPMGLSPPLLSLVLRNESYYTKGKGGLLRQRLGFAVDRVHGSGSRERTAEIHPPKTDGRDPSVHDRATTDGPDDVSGDVTSGGGSGAQARRRTTARRRERRAPARRARRGELTGDQRSGGGATDGAGDEEEAATVFGSTVTAVLRRSLATTKGWTGTATTWRSRRWPSRVTTTTVATAAHGWTNGGDGGAKAHGARALHTAAVEGESGCR

SEQ ID NO: 175358 - protein, 460 aa, Oryza sativa
  unsure (1)..(460): unsure at all Xaa locations
  Clone ID: PAT_MRT4530_73210C.1.pep
MVADKSPIDKAVLHGKHEQDDLRDDKVVYDVEXKQLLLPTCRRCRTRYRRAGGSAWCSSPWSVPTASGSFCMTGASFRRSCLNLSNVICSIGMLYVSYVLSQGRWPSLVLFTMVGAICFHTGNLNDRCMXDRGVRRYSFGGYGRTAIGLVMYVELYLVAISFLILEADNLNKLLPAXVVEILVYXVHGKQLFVLATATIILPTTWLKNLSMLAYVXAAGLVSSVALTVSLLWAGVVDKGFHXLLSLSGLPTALSLYFLCFAGHGFFPTVXFSMKSKKDFPKVLVISSVLCSLNYAVTTMLGYLIYGEVVQAPVTLNLPTGKLYTRIAILTTLITPLAKYVLVIXPITTVNEEKLSTTTVAAADVEHNGLTRVLTSTAVVVSTVVLACTVPFFSYLMPFNVSSLNFTIVVLFPCLSYLKIYMPRFGVGRFEVAAIVGILVIGVCIAFVGTYTSLHQIICTV

SEQ ID NO: 175359 - protein, 517 aa, Oryza sativa
  Clone ID: PAT_MRT4530_73211C.1.pep
MDATKKRVAIVGAGASGLTACKHALAKGFRPVVFEAAGDGVGGVWRRTLASTRLQTPAFAYRFSDFPWPADVSGAEVFPRHDQVVEYLAAYARRHGVTECVRFGCKVLAAEYAGVPDEEAAAWERWSGNGEAFGDGSGEWLLTVQHPGSEATQIHRVDFLILCTGRFSGVAHTPTFPPNRGPEVFHGQVLHSMDYSNMGHAAADELIRGKRVAVVGSGKSAFDTVAECAAANGGRYPCAMICRSGRWMVNGGFVWGVSLGHLFCNRLAELTVHKPGEGLALALLAILLTPLRWLLSKLAETYFKMQIPMEKHGMVPEESFAGSMSGCRLGVLPDKFYDRVEEGSILIKRARSFSFCTDGLVLDDDDTGERVDADVVVLATGFRGDQKLTDMFVSATFKQQIVAAPLYRQCVHPRIPQMAVIGYTENLTSIYTFEMMAKWVAHLLAGAFRLPSVVRMEASAAEWDEHLAMRRHGEGGGGKPCLGGVSTWYNDEMCRDMGYEPRRKKGILAATLVSSEV

SEQ ID NO: 175360 - protein, 176 aa, Oryza sativa
  Clone ID: PAT_MRT4530_73212C.1.pep
ARRRTTNHKIANPGGSDCGLFRPTSASYRRSPHREFARRLRRRSPFREQRPPASCCSRRILAGRFEMAIHIQQKRSTASGRCHGKPISEKRRPSVKLEDLPEDVLCIIVSKLPLKEVSSTSVLSSSWRYIWSICRPKLSFSGFCGFYDDPHEREQYSQKFAEKVNAVLRKYDGKLI

SEQ ID NO: 175361 - protein, 119 aa, Oryza sativa
  Clone ID: PAT_MRT4530_73213C.1.pep
MARAATVAAASSALLLALLLALAWGAAAGAGEVPLGWELGVGGGGGSGDEDGFGFSGAAADGAAVVRRVLQGRGYISYGALRRDTTPCSVRGASYYNCRPGGQANPYSRGCSAITRCRG

SEQ ID NO: 175362 - protein, 55 aa, Oryza sativa
  Clone ID: PAT_MRT4530_73214C.1.pep
PRPDRGRPAQWLVGPRHNSDGKRHRRATTLPGSPTSTGATTTAAVKHTVAAVHVK

SEQ ID NO: 175363 - protein, 102 aa, Oryza sativa
  unsure (1)..(102): unsure at all Xaa locations
  Clone ID: PAT_MRT4530_73215C.1.pep
XXXPPXSRXRFCXSASXXXEHLNPIAXVXEAMRPPSVXPSAXDVGDPXXXXXXXXTVIXXMAXXCXCIXXRLXPIPCXKGXTXCDMXMLICRRDXVQXXRDT

SEQ ID NO: 175364 - protein, 49 aa, Oryza sativa
  Clone ID: PAT_MRT4530_73216C.1.pep
FRAFLHFIYMVVQIIFVTLRHRPSSSSLVSIVYCSAGQRTHLMRMYGSE

SEQ ID NO: 175365 - protein, 589 aa, Oryza sativa
  Clone ID: PAT_MRT4530_73217C.1.pep
MASKAMPRAPPAAPNLQSLKLCSQNDSSLETTSPSKRSALVPGRSAESSKPNPEVVQKEQKSTQHQNESIDLTGSNDPAEVKAEGNLVPKRLADEEKGVVEDGIANGSLKSSSALGKEHGIASASGSARLVGRSETGERGFSSSRCRPSTSSDVSDESACSSISSVTKPHKANDSRWEAIQMIRTRDGILGLSHFKLLKKLGCGDIGSVYLSELSGTKSYFAMKVMDKASLASRKKLLRAQTEKEILQCLDHPFLPTLYTHFETDKFSCLVMEFCPGGDLHTLRQRQRGKYFPEQAVKFYVAEILLAMEYLHMLGIIYRDLKPENVLVREDGHIMLSDFDLSLRCAVSPTLIRSSNPDAEALRKNNQAYCVQPACVEPSCMIQPSCATPTTCFGPRFFSKSKKDRKPKPEVVNQVSPWPELIAEPSDARSMSFVGTHEYLAPEIIKGEGHGSAVDWWTFGIFLYELLFGKTPFKGSGNRATLFNVIGQPLRFPEYPVVSFSARDLIRGLLVKEPQQRLGCKRGATEIKQHPFFEGVNWALIRCASPPEVPRPVEIERPPKQPVSTSEPAAAPSDAAQKSSDSYLEFDFF

SEQ ID NO: 175366 - protein, 866 aa, Oryza sativa
  Clone ID: PAT_MRT4530_73218C.1.pep
MDHRPDLSLALHPPPPPEGSSAAAAEEVGEEEAEGGEGRFSLMGQPLFLKRPRPRPPRPPRARGVGDDVDVDVDDDSSPCCSSSCLSPAAKRRAAAGGLEARRAAVRAWGCQPLTEADPDVHELMERERRRQAGGVELIASENYACRAVLDALGSHLTNKYSEGLPGARYYCGNQHIDAIERLCCDRALAAFGLDPSRWGVNVQPYSCTSANFAVYTGLLLPNDRIMGLDSPSGGHVSHGYYTPSGKKVSGASIFFENLSYRVNPHTGYIDYDKVEEKAVDFHPKILICGASSYPRDWDYARMRLVADKCGAVLMCDMAQISGLVAAKECRNPFDYCDIVTSTTHKSLRGPRGGIIFFRKGKNLRKRVGSLTQVVENDQYDFEDRINFAVFPSMQGGPHNNHIAALAIALKQVAMPEFKAYIQQVKKNAQALAMALLRRKCRLVTGGTDNHLMLWDLRTFGLTGTPAMTTRGCLESDFEIMAEFLLRAAHIASIVLKEHGRLQKDFLKGLENNNDIIELRNQVETFALQFAMPGFDPARAAAGALGGQMNGAAAGRAERGGRSGGAGRVEQRREAEGAPASSSSSSCTPFSEFLGTARTARICHRPSSVVYIALGSEVPLRVDKVHELALGLDVAGTRFLWALRKPTGVSDTDLLPAGFEERSCGRGVVETRWVPQMSILAHAEKASRQRFVQSRWRQDIKIMGFFISKRRGRGHGGSFRFHTTVEAAQQAIATGHVEAESAANGVGLTKLMGRSAGHRGEERQTARRAAQERDGRRCPTRLARHRPPPAMRCPSSRRPPPPRGPPSPAVLDATRREEGAERWGEPERKKKMIGFGYLRMTCVAHVGHTTVADMWDPPFLNYFFYG

SEQ ID NO: 175367 - protein, 500 aa, Oryza sativa
  Clone ID: PAT_MRT4530_73219C.1.pep
MAQAAVQSSLNGDLLIGRAAGVPRMKRKTPSELRGEQLKRRASDKPANDQSLHSAAFDRASNGFRNPEQSKISKYISTRVTEVFPVKKSRNLGKENFKNNEKAPKSADAVTTSDFASPSLPCGYGDSAKLDSAVPSHTEAAKPSFRKVEKCSENALRSVSELHIGDEQQSGTNKFDMEKVLKGFGARDAFVASKLTDPNIQVGVVPSKSLDLCPSEIAVPGKRAPLDLTLKTTLQFVSSSSVKWCHKISTSFGRSSIVGPIAQSYHHGCQNSGCSRPERNKEFLFSKALQSWVYPQSLLPASIISAMVSSTVRGVYTPQFVALFIGGNCLDKKQTCNAYLSQSTRGIRSLLRRHGVCFSMPLCNTEVEQVTEDDLIELSEIQKRNLGQVILKFSICHRYPGVIFPGAVSKWLPPYSRGEMQGDEEGRYRPGFRMATEPSSMGLNAALSCVSSNSQSKAHSSEGCESLGIPEATLVPSLRSASSLRRLSYKDGEYIAYTTV

SEQ ID NO: 175368 - protein, 199 aa, Oryza sativa
  Clone ID: PAT_MRT4530_7321C.1.pep
MDLQANTVRKLATERWNRRLLWRVGGLRWTGCTATVHGNGRPRSTLSKTEGRDQTVHDRLTGNGNDDVSTGGGSGAQARRRTTARQRERRAPGRRARRGELTGDQRSGGGTTDGDGDEEEAAAEIGSTAATVLRRSSATAKRRTGTATTWRSRRWPSRVTTTTVATAAHGWTNGGDGGAKAHEARALHTTAGEGERGGG

SEQ ID NO: 175369 - protein, 94 aa, Oryza sativa
  Clone ID: PAT_MRT4530_73220C.1.pep
PVVVAFFFFFFSLVTLVGFVFFKWLGPYPTLNLGGAIRGVYPKILFLAPPLFFSPLTFHIKPFFWFVLSRAPLSTGPERSFCQHSPPTNPSLPC

SEQ ID NO: 175370 - protein, 304 aa, Oryza sativa
  unsure (1)..(304): unsure at all Xaa locations
  Clone ID: PAT_MRT4530_73221C.1.pep
CDLPCSERTAFRTFGDDHEPRFGNLRNDERGAAEADGEGTTSAAILERRRDMAGTRLDDAEARTKTTTGXAAARLTNHGRRTRSAWRRDERHDDRERREDDDDDDRGRRGDDEGSRQWLHGGEDAVERAXAAAMPEGKMATSAGARARRRRLPKATSTRRKERPARATAFGDVQEPTGRPGRYWTPDEEATRASFGRGGGDAGEGGDXRGVDEGDGDVGRRSDEGQQPAGGSTVAPMPLVAGGDASPAISPRTGGSAGEEEAAATPGKVTARPGGARARRERRLEAAGTEEREGRRRERASGGH

SEQ ID NO: 175371 - protein, 40 aa, Oryza sativa
  Clone ID: PAT_MRT4530_73222C.1.pep
FVSMASKQELHQSNSALDEQQMNGPPLRVNVEPERPQRGF

SEQ ID NO: 175372 - protein, 308 aa, Oryza sativa
  unsure (1)..(308): unsure at all Xaa locations
  Clone ID: PAT_MRT4530_73223C.1.pep
MAPPIARNGRAIPGRLPWPPAPLPELPRGRTTSPRLLLFSLRRRSASSRLSLLARAPSGRAVAALGLAAASSPPXRPCRTAQVRAGCAVSSLGVAASTSTPAYPWFRRNAVARVGLALRLAGVPSATPSVVPVRRPTSPSPPPASQWQGRPWPRLPFDRTPPVFVVVVIVPPRRLVVSRRRLHRRIRSGVFHAVLVSVQLLLAVPRRLLAGPGRRRRRRRPPVVPGRRGVRPSVKPFSSVVRVRQVCRCSPVVVFVLASASSSLVPAASRLRPRIAAEVVPSPFVSVVPGRLRRARSSLSFPRLIAWW

SEQ ID NO: 175373 - protein, 269 aa, Oryza sativa
  unsure (1)..(269): unsure at all Xaa locations
  Clone ID: PAT_MRT4530_73224C.1.pep
RLAMRRRGRRRRRGCSGTLDGRGQRTRTAXRRDERHDDRERREDDDRNRRGGDKGSRQRLHGDEDGVERAAAMRTRVAAQRDDVPGDRRDVDVEDERRRRRRTAEGFGWRGGEAEGDLAAARPEEMTTRSTGEIPARRMERSARHDGVPAKYGRRRGLAGEEDGVPVPGEAATTKADAPAMRHRRLEVVQWRQRHCXQRGRVSDGPRAKRRAGRRRGDTCEAEEGGGDVSRRTGEAAQAAGGWPAPREEKEEAGRGGAATGELGKGLKR

SEQ ID NO: 175374 - protein, 407 aa, Oryza sativa
  unsure (1)..(407): unsure at all Xaa locations
  Clone ID: PAT_MRT4530_73225C.1.pep
RRSSLKSADSFGAGNARVFPGRFPWPPAVFPVAVPPSPVPGSLSSPIKWNPLDPFSSFSPLPHSPVVPSHLPAVALLFPPRRAPPXASPSSTVRRPAVPSPSPVLQPPPLPRPPALRFARXLPEARSRRRPVALPPLYCLQPPLXAPLRCGPAAPSPPSASPRRPPPRPALRRPLHPRRRRXPSAAPSSSPARRLAAPPPPPASXRQGRPRPRLPSTRTPPVFVVVVIIRPRRLVVSRRRLRRRIRSGAFPVVPVSMQLPPAALVVSSPAPVVVVVVLSSSXIVVAFVPPSSRSRSPXRFVKCAAAPSSSSSSAPRRQASCRPRLAFVQGSPPKSSPRRSSPSFPAASAAPVRRCRSLASSCGGKDPSXSLPRPCPFVVAXRTRCAVVDPGTRVPVSVVVHRSTAVL

SEQ ID NO: 175375 - protein, 1401 aa, Oryza sativa
  Clone ID: PAT_MRT4530_73226C.1.pep
MEVALGTAGWVVGKLVDLLSAELLKALDESYNLGGNASAIKAQGRNVAHSPALAELLRQLSHLAEDADNVLDKVDYYRIRDHVKRTHEAVDDDQVVDGRLVRRSILHARHAVGKCRRSLASSLSCRGRAAVDVEFFNRSIVSERIKSLMAQMQPLCAKISDFLKLELMDPRTTAANTTAAAAFSERVTTTTSTSLEAKLYGRYAEFYAAINEITGDRDGLAVLPVVGPGGIGKTTFTQHLFHDQRVKKHFHVRIWVHVSLRFDVLRLTKEIFNNMVASEVSWRRRWGNEREPHNLEQLQTLVERRLQSRRFLLILDDMWPCDSEYKWDKFLAPFRKTSAKGSTVIVTTRSEETADMVKSETNLLIRLGGLDSRPIWAFFLACALGDERAEHHKELLDLGREIVKKLKFSPLAAKTVGRLLKKNLTRRHWSRVLDSKEWEHADSVNDIMPALKLSYDCLPFHLQKCFTYCALFPDDYQYQDSELTHLWSALGVINCSGQDDRIQDIGLKYINGLVNNGIFQKVDGVKFSHKKGREVKHTYYVMHGLLHELARIVSSRECLSIDCSNPRFAYTPPSIRHLSIRTSCTSDTVGLDHYQNFKEEIRNLKEQISVANLHTVMFIGEYDERFSEAFKEILQDVKHVRVLRLFQTTLEFLPSKLIHLRYLRIQASKKTMNTQLKLNRSVTRKWDKFRLMMGEIQTPATNDHLTSLPSSLPEYYHLRFLDLQDWTGMTTVPKHMQISHLIYLRQFLASKELQSSVAKIGMLKLLQELSKFQVNREERAGFELQQLGELRDLGGALTISNLHKVKTRTEAEKAKLTLKRNLVRLKLVWDETGREQTEEEANSIEGLQPPANLRELCIKNHKGNSCPSWFDSTISLKRIEVLHLHGVSWNTLPPFGQIPYLQKLKLENIAIEKFEVRYESLETLKSIEFNGMLSMVEWVSGNTWHLFSQLEQVKVSNCPVLKELPFSHDLKLLQTPDAQERHIFRPDLQILRVIGWRTSQASPVEHKCMTLKTNLRELVVRDCPQLSLPLMPYTTKLELAKVASRPYKLLYDIHMLEIRGVDNILLNLGNLDNVLAFHDMEWLVRVTIKVCSSVPLATLQKLTSLETLAIEDCISLSSGRGESDAIQIPIKHLMLRNCYITGKELSEILACCPCLSHLEMEDCKGITGLCMQQSSHEMDDDDNDIDGMLQFPSQFTSSLSRLGIFSRDHLTMNVKDEVLKKLMSLHWLQLGGCVLSCAAMQAVHDDLPLMNNLKALRAYGYDIYDLEEDRLMTRMARTVVAGSKELEELDIGSISGVLAAPICQRLSASLHRLTFRNDTMVQHFTEEQETALKLLTSLQELIFYGCNRLQSLPSSLRSLRSLKRLEVSYRQLQGYSPELEEQCNNLRQHIPEVVLTCIPLF

SEQ ID NO: 175376 - protein, 287 aa, Oryza sativa
  unsure (1)..(287): unsure at all Xaa locations
  Clone ID: PAT_MRT4530_73227C.1.pep
PPRVLPRGLTASPCRPSLSPVPLATTSRLSLLARALAGRAVAILGVAAASSPPACPPFRAMTAGSAPSSTSSGVAATVPPXAACAASPVRRLSPSPPPASQQQGGPLPRLPFGXTPPVFVVVVVVLSSFPVIVAFVPXVKSISSTVRVPSSEPLQPRCRPRPRLRVVKPCTSRVSPPCKDRRRSRSLVVXSVVPEPSPLHPLLVVVPXPRRVVVRVPPXSLPRPRLFGVTPCPLCGCRPRYPCTGVGSRSCMRVVTVFVCPLGSRVVSTCAARVMSSGVRLSATRLG

SEQ ID NO: 175377 - protein, 176 aa, Oryza sativa; identical to SEQ ID NO: 149736
  Clone ID: PAT_MRT4530_73228C.1.pep

SEQ ID NO: 175378 - protein, 377 aa, Oryza sativa
  Clone ID: PAT_MRT4530_73229C.1.pep
MGRAPCCDKATVKKGPWAPEEDAALKAYVDAHGTGGNWIALPHKIGLNRCGKSCRLRWLNYLRPNIRHGGFTEDEDRLICSLYIAIGSRWATIAAQLPGRTDNDIKNYWNSKLKRRLLGGGRRPRGAPPRLVLAGPGPAVTAAATSRNAMAASAIERMQLSVRLRRLEAAAPPPPQPFTFYGSNNLAAPPWQQPISPAAGGSSEMPRRLHHHHPSGAAATSSYSGLISSWPSSRSHIIHDAWLDASSTPPLSTTSMGDAATTTTTAGGESSSSTPTVSTATTPFIGGSIDMDDEIDMLLQQIRCFDENGDDGDDDADQRLIVGDEAAAGAENYLRALIDEAAANGGDVGVGSWSSCSTPGVDSVFHEYAQLDYGQYN

SEQ ID NO: 175379 - protein, 105 aa, Oryza sativa
  Clone ID: PAT_MRT4530_7322C.1.pep
YIVTKSDRACPSVHTLVLVSQGMYSCICLILRSPVAQLHRFQLSHGTGPSRFKNLVIFPKSFHHSYWLTGSLVHCRITVSTVPPKFPFGCMARNKLNSRHILWDI

SEQ ID NO: 175380 - protein, 99 aa, Oryza sativa
  Clone ID: PAT_MRT4530_73230C.1.pep
KRETGPFFGSTLHLGLNPAGMLICGACSQKFMVILPKPERRLGVPIHGCGLCLHVRRGLLSHCVQLLEHADVEPLHLHQGLEGAVDSVHVSEAGHVIWS

SEQ ID NO: 175381 - protein, 310 aa, Oryza sativa
  unsure (1)..(310): unsure at all Xaa locations
  Clone ID: PAT_MRT4530_73231C.1.pep
LPHNGHGRHRKDEDGAARGRTLXHPATRRGNDNDERARRRRXGTTEANDEGTTSAAILERRRDTAGMRLDDAEARTKMTTGLXGSLDEXGRRTRSAXRRDERHDDRERREDDEDSRXRLHGDEDGVEHAAAMPTTEAAPRDDEPARMNGEDDDRHRRXRPKGKRCRGRRRGCDAEXWRRRRRPAHGHGGRGCRRRRCRGGRRGRRGGSGVPAKPRSSRRRGRRCDVDGGDGDVGRRTGDEQQPARDDVVAATPLDAGGGASPAISQRIGGSAGEEEAAATPGKATAQPDGAWARRERRLEAAGAGEREGQ

SEQ ID NO: 175382 - protein, 304 aa, Oryza sativa
  unsure (1)..(304): unsure at all Xaa locations
  Clone ID: PAT_MRT4530_73232C.1.pep
YHHATRWGNDNDERAWRRRPGTTETKGEGTTSAAILGRRRDAAGATLDDAEPRTKTTTGATTTGNDERTTTGTGEEATRAAGSGCTETRTAWNAPLRXRRGWQRSETTCRATDGTSTSRTNRDDDDGQRRGSDGGEARPRATLPLRGRRKRRRDRLGKFRRGGWRGRRGTTXSGEKRATPWPGQGRGRRSGAGRGSDDESRRSGKAAQAAGGGTVAATLLYXQRGRVSDGPRAKRRAGRRXGDTCEAEEGGGDVSRRTGEAAQAAGXGRRRXREGGGGERWCGHGGAREGAKARERTEGVPFYR

SEQ ID NO: 175383 - protein, 210 aa, Oryza sativa
  Clone ID: PAT_MRT4530_73233C.1.pep
MVVQIDNQDNVIPLTSLTLKTRNASPPSINQPNMAGSIKLSLTLVLLISGLVMLGKIESSEAAAAACNMLCARGTYITCCNRPGEALYGCACKCAPPGGKDCVVHYADGSTSKSNLLSLYINPGWSTHCTATHMASIKLSLACVLLISGLVMLERIEHTEAVCTLFCAKGTYITCSNHPYEQLYGCACRCAPPDGVDCVVHLADGSTQQC

SEQ ID NO: 175384 - protein, 464 aa, Oryza sativa
  unsure (1)..(464): unsure at all Xaa locations
  Clone ID: PAT_MRT4530_73234C.1.pep
KPRCYRAGTLTRSPHAQANDYRHRYTGTGVDNRTTGTXGDTERTRTGQREXDPYHHATRRGNNNDERARRXGEGTTSAAILGRRRDAAGMRLDDAEPRTKTTTATATLTKHRGRTRTARQRDERHDDRERREDDDDDDRGRRGDDEGSRQRLHGGEDGVEHAAAMSTTEAAPRDDEPARMNGDDDDEHRRGSVEGEARPRASLTLRCRRWRRPKGAAGVGADETEEEAARVTAVRARDHGRSREWAKTIERSEGIPFYSGGKRAGHGRGRNGDGKHGRQPWKAAGNGAAVPGDWGRHSRGKTGEIKEESMGINSPQXNLERAGLNGADLEEERXRVHGRERKEAGGWRPGTRLTGGTHAGGARSTRGNGAHARARARHGRXGAARLGPGEAEAAQEDRRERQPGREXGGGGSGPRGGGEEWAGRRRRGPGEEGKRGRRGRLWPRAKRREEXGPDLAQREGEGYF

SEQ ID NO: 175385 - protein, 91 aa, Oryza sativa
  unsure (1)..(91): unsure at all Xaa locations
  Clone ID: PAT_MRT4530_73235C.1.pep
MESGGAGGEGETAGWRFGAANPALAVAGSQSIRAAVTRIYRCLDGSGDARPVAPLAXTXDPSAFACFRAAPAATDAVAAAAAFRQYNYYSP

SEQ ID NO: 175386 - protein, 96 aa, Oryza sativa
  Clone ID: PAT_MRT4530_73236C.1.pep
QRPLWPQPAPRFFRAPREGAPPVNIFPPATLAGPQFIFIFPGKKKGGVFEGWKNFFNVRVNFRPVWGLFFKPVPFGLFIGRAQCLGFWLRNFFSLS

SEQ ID NO: 175387 - protein, 173 aa, Oryza sativa
  Clone ID: PAT_MRT4530_73237C.1.pep
MEQQQQLAGDRFRGPHKEKPLVSTIGKSTNILWHNCPIGQSERQNLLGQKGCVIWITGLSGSGKSTLACALNRELHCSGHLTYVLDGDNLRHGLNRDLSFKAEDRAENIRRVGEVAKLFADAGIICIASLISPYRRDRDACRVLLPESRFIEVFMDLPLEICEARDPKGLYKL

SEQ ID NO: 175388 - protein, 50 aa, Oryza sativa
  Clone ID: PAT_MRT4530_73238C.1.pep
YSACPNLAFGLRTLLTRNTTAWEFCLAFGSRWAISGSAWNQTNVRVGLVG

SEQ ID NO: 175389 - protein, 70 aa, Oryza sativa
  unsure (1)..(70): unsure at all Xaa locations
  Clone ID: PAT_MRT4530_73239C.1.pep
FFFFFFFFFFFFFTKISFLSMXREHIKXPXXTSXXXSTKNITLTTLKLHLNNMDKRAXNTKSTFHDLGRC

SEQ ID NO: 175390 - protein, 141 aa, Oryza sativa
  Clone ID: PAT_MRT4530_7323C.1.pep
MTSAMTSPRRRRLGDSGSHARRRTAARRRERRAPMGRGRRGELTGDQRNGGRPTDGGSDEEEAAKLFGSTTATALRRSSAAAKRRTGTAATWRSRRWPSRVTTTTVATAAHGWTNGSDGGAKAPEARALHTTAGEGEGGDG

SEQ ID NO: 175391 - protein, 71 aa, Oryza sativa
  Clone ID: PAT_MRT4530_73240C.1.pep
MSREPASLSKGTRTWLSPKEINGKISEKATKPKGNVGSAGIAVAGTKLVGLVMGVHVPSNPTEFSPCNWAL

SEQ ID NO: 175392 - protein, 82 aa, Oryza sativa
  Clone ID: PAT_MRT4530_73241C.1.pep
MSREPASLSKGTRTWLSPKEINGKISEKATSPRGMWGPQASLLLARRLSPEKLSWRCQLVGLVMGVHVPSNPTEFSPCNWAL

SEQ ID NO: 175393 - protein, 75 aa, Oryza sativa
  Clone ID: PAT_MRT4530_73242C.1.pep
MGPFAVQIETERRGWKGCGYEGGPVRGGGARTKPPWSRLGSSRPRPYTIGRQTEDGRAACASAVGGGPALARIPS

SEQ ID NO: 175394 - protein, 102 aa, Oryza sativa
  unsure (1)..(102): unsure at all Xaa locations
  Clone ID: PAT_MRT4530_73243C.1.pep
LXGVQGQGDQEWPXSQXXXCXVXFVXXXXTXKGPXENLXDXXPDPXAXXRXXXTPPSXPRVXEXPTPHCRXXFFFPSXDVPMLAXIVXCXXEXDMIHPEFRN

SEQ ID NO: 175395 - protein, 93 aa, Oryza sativa
  Clone ID: PAT_MRT4530_73244C.1.pep
AIVQGLRESGVFTSSIAAAQSLVNDKVSLKENNVQNKNHTKLEKVSRKFIRANSQASARKILHAVEPASHDSNVSAVPPLSPPSLDNHLLELS

SEQ ID NO: 175396 - protein, 300 aa, Oryza sativa
  unsure (1)..(300): unsure at all Xaa locations
  Clone ID: PAT_MRT4530_73245C.1.pep
MVMLRPKTKDQSENIHRRRCSGCGCASGLPGGGDGPSGGGGASAAENHGVAAAPSLRSPAERILSLEADLNRQSENTLKEKEEHEKTRTELEVKEKQLEEERQNHTLTVQRHGEELERQSRELERQREELERQGRELKMKDGKLNRMKTLTIVYEKFRQWIEGEASNSSSGFTEFSHSEVDDSIPKDQKYHLGKGSYGIVYKAEPRGKTVAMKILDKSSWQGEREFKQEVGILKRIRHPNLVILLGACSEKFALMYEFLPSGTLEDCLSKEERKESFSWXRVRVATSICSALVFLHNTKP

SEQ ID NO: 175397 - protein, 40 aa, Oryza sativa
  Clone ID: PAT_MRT4530_73246C.1.pep
DYMAIAMPRTETTPTELQAQDQAWWCTDDRTTQVNTIIGW

SEQ ID NO: 175398 - protein, 135 aa, Oryza sativa
  Clone ID: PAT_MRT4530_73247C.1.pep
MPESIAENRSNGFVFAVVVVVVLAVLTLICGSTTSPLPCAGSAAVVAAASCVLAARRMLAVLSPWFYVGGGPVIRRGHEWSPPFYMYARACDDDLSGVALTLGAAALLLALALLFLRRRRSVGLKKVDKVEGKSE

SEQ ID NO: 175399 - protein, 331 aa, Oryza sativa
  unsure (1)..(331): unsure at all Xaa locations
  Clone ID: PAT_MRT4530_73248C.1.pep
MPLLRRPPAAPHRTPIHHDKRLHLCLRIRYSSSNPVRHLCGIPSSRCHAAADPAPSKIPGGGSGALEAGVVGMGMTLTLDDLKTALLMPKELASGFLLQYSVMPLSGFLISKLLNLPSYYAAGLILVSCCPGDFKLRKANTLCRHSKQHCYIFSKFLTPLLTSKLAGQYVAVDPMGLFVSTSQVVLAPVLLGALLNQYCNGLVQLVSPLMPFIAVATVAVLCGNAIAQNASAILSSGLQVVMSVCWLHASGFFFGYVLSRTIGIDISSSRTISIEVGMQNSVLGVVLXASKHFGNPLTAVXPCAVSSVCHSVYGSLLAGIWRSLPPNDKGQ

SEQ ID NO: 175400 - protein, 181 aa, Oryza sativa
  unsure (1)..(181): unsure at all Xaa locations
  Clone ID: PAT_MRT4530_73249C.1.pep
MVDATSPTISISMLLISSLFGSATVGPFALVTRVSPVACLPIRAAWRSTSGNRXGGNQQGNVVQRALGIEQHIPIRPRGSXSPMRLIRXMLDMIDXMFNNVTLGFPVALWRSPATGKVRIXLRDIMDDDKRGEIRFDMLGLSREDVKVMVEDNMLVIRGEHSKXGEGTGGSDDGWWKERSM

SEQ ID NO: 175401 - protein, 76 aa, Oryza sativa
  unsure (1)..(76): unsure at all Xaa locations
  Clone ID: PAT_MRT4530_7324C.1.pep
FFLXANMXKFLXYCACLXMSFPISHCCLVGVXXRRSPHXNVLLLLLLVQTRGGIPSQXMLKESYXFMMXVLAVSWK

SEQ ID NO: 175402 - protein, 218 aa, Oryza sativa
  Clone ID: PAT_MRT4530_73250C.1.pep
MTIASHHRNRGFGLSRWRDAWILPERGEGGRHHHRWPPPQGAAFPLEARQARRAFASVFANRGDEQGYCFVGSSQTGLVRPVRPGHTGDMTAVRPVKKWRSDQRRHQATSGVDLGGSIGVTTSVRPTTSRRIPWVPWPPPTCSSCSSLTRSASSRPLEEGGRTPVSAAAAGSKPVNCDEGDHGRCWVEENGSSAHAIMQTGRCCEEQQQDDLTLLGPA

SEQ ID NO: 175403 - protein, 198 aa, Oryza sativa
  Clone ID: PAT_MRT4530_73251C.1.pep
MHPARRERNLGHLENDRARRPRTRRQAQTISQPIGRPVPAQRKAVHGDIVELGAWLWLTAFGSRLISSLAAPSLGRDACLLYKGRGSTSSSARGPGEELRWVGHGRPLGRTRREEAVVPGRARREAATTATSAEGEEGGGGCDYCGGRGGRGSRSGDHGDGIKAAKKREEKGRSWWVLGGLGIEKEIHNRGYVGWGIS

SEQ ID NO: 175404 - protein, 74 aa, Oryza sativa
  Clone ID: PAT_MRT4530_73252C.1.pep
MAIRDITRCRSAPERRESVWRAAMELEVAVGGRAASECKFCLIIKRFFTVLEVVQYQILTVDLASSNGGTAPPH

SEQ ID NO: 175405 - protein, 125 aa, Oryza sativa
  Clone ID: PAT_MRT4530_73253C.1.pep
NPRWPCPSPAPASRAPPRTPSRPAPTATAATSPPPSSAPPRTRASAAPPPPTTRTGCRTPPARPALRRRSPAPPPPPPRRRPSPSPRAPRPGRPRSGGGRGGRPWRRQGRSTAAPPRRTPPPRSP

SEQ ID NO: 175406 - protein, 60 aa, Oryza sativa
  Clone ID: PAT_MRT4530_73254C.1.pep
SLTRNDLRPFAKGWLREYESPIRGDYSPRYLVGSYFRSCAERRSNDLNLTLFPCLVRLKF

SEQ ID NO: 175407 - protein, 88 aa, Oryza sativa
  Clone ID: PAT_MRT4530_73255C.1.pep
ISLLDAESDQPSSQCAARRLGTTIWSRSCRRPCLRAGTARQVLTAGWPCLGRRCSPWAGMARPGVLPLPEQPPAKPGSCKDGSGGAPH

SEQ ID NO: 175408 - protein, 71 aa, Oryza sativa
  Clone ID: PAT_MRT4530_73256C.1.pep
QKRLVFPFCPAKMTLSYKVYLENFVSPPHKISAPYIPPICPKTGFPSLPQNRFFFPPQAFQKGFPPHVQKP

SEQ ID NO: 175409 - protein, 77 aa, Oryza sativa
  Clone ID: PAT_MRT4530_73257C.1.pep
MLLATPCAERAKGAVDLRTAVHEARSRRTTGARPAAPCRCTAPPERRPRGPPCRPPCPRPFPLPPPLPLPQPAPAPA

SEQ ID NO: 175410 - protein, 127 aa, Oryza sativa
  Clone ID: PAT_MRT4530_73258C.1.pep
RYRRSDSGATHRHPCCLATAPPTWRLGLHSGTPATWQLAAAAPWAASLAGLATAEPPSPLPAAPRCLVLGQAEPPPLLPAVAPDPGIGWPDLASRAPDPPPPHTAPPSPSDRSGGWTWSASPRLHRA

SEQ ID NO: 175411 - protein, 503 aa, Oryza sativa
  Clone ID: PAT_MRT4530_73259C.1.pep
MSVCTRRLLIPMSVCTRVGRVGLRNHELLRRLHGRAGDQVFGSARCDYSLFVNVYFVFTNMSNNGDNNNTGDKEKEASVNNNRGNTASNSSGGPFLGYNLLTLFQLEVLLLMFIAMSTLRYYVIVDAYSTLSMLMLITFTTITRSNPIELYLVTMNRRFLHVLVKDFTNHPCPYALHSINASGLFYPAAVRPNGSGEGTKLEEDYLPDRTVSFHHPSGSGGSMQFMSLGQSNNAIIGVDNECRTILYNTEWHSIRTMPSMHGCKWSPPVSLAVNNSLYVMELYPRQDGHVSFEVLAYGSQHAYGSQPVYGRMPSKPSRAYREDWYWRSLPPPPYVHYQGYEKDEAPPGYDISVEHPCKITATAVVGGGSGSSIWISTAGVGTFAFDTANDTWTKRGDWALPFRGNAEYVAEHGLWFGLSSQGDDLFCASDIAAASVSPPVVLDAWGLDHLGVTTSRKCYHSKSYLVYLGNGRFCVGRLFHVEEGDTETERFVVFDGRGGGGAK

SEQ ID NO: 175412 - protein, 57 aa, Oryza sativa
  Clone ID: PAT_MRT4530_7325C.1.pep
MCGCCCGADGEGQVLVVSGARARQRSSCSCGCQNRRARPACWRPAPTTLVATKVDVD

SEQ ID NO: 175413 - protein, 297 aa, Oryza sativa
  Clone ID: PAT_MRT4530_73260C.1.pep
MAGIHDVFHVSQLKKCLRVPTEEADPERIEIQEDLTYVEKPVRICERRRHVALAPPPPTPFQPRRAAAIAVTAAFRRHHRVREEEEHPVRPFAAAEDRQSAVVDVDPSRAAVGPRRRPSFVVVRRSFLRRLRSGEKSVGVAGESITSGFEGESTIQERCTVSPPPDLGAGRAALLPALPATASSRSRHTSSARSRPPPCRRCRRAHANSGHHLVVVVGRVHAAPSRRLAVVVIVVGRVHAAPGRYLAIVVVVGRAHAAPSRLPTSARRCREPAASPLRPLATVDPSAESRPEERRRR

SEQ ID NO: 175414 - protein, 111 aa, Oryza sativa
  Clone ID: PAT_MRT4530_73261C.1.pep
KPENNGGIPRRSSQKKKGGKNLWESYPKRGGSKDRGGAKQEKTKTLNSITNIFFFYGGNFTGSKIIHGGIKFRSGGEKNIGWGNLLGLKGGETGRIAPSWLTRGNWQGLQA

SEQ ID NO: 175415 - protein, 143 aa, Oryza sativa
  Clone ID: PAT_MRT4530_73262C.1.pep
MHDFCFTIPYGFAVLAGGVLGYARRGSTASLAGGAGAGALLLLAGFVSLKTFEKRRNSYLALALETLLNLLLERSSMHVVVSLLTMESSKICALALTYVMGQRYLETSKIMPAGVVAGLSALMSAFYLFKIATGGNHIPPKKE

SEQ ID NO: 175416 - protein, 392 aa, Oryza sativa
  Clone ID: PAT_MRT4530_73263C.1.pep
MRSSCCIVMAGRFLLGGREIVRTGDDGPLDDGPAVAPAAGSSAPATSAAAARVTPAVLFITVVLAVVLLASGLLHVLRRLFLKSHRANASAEAVERQLQQLFSLHEDGAGGAGPGLDQAAIDALPAFTYAELLAGAAAPNGGGGNGKRQFDCAVCLCEFDGGDRLRLLPLCGHAFHAACIDTWLRSSSTCPLCRAALSARALAALAAAAADTPAAAQHRQPDVEDQKLDHHHPPPPSDEPATSFVLSVRLGRFKNTQRSDGDADASGGGSRCIDARRCYSMGSYQYVLADDNLLISVHWRPGDGISAATAAAAAGANVATARTGIKQGGGGGGGKKVFGRGDSFSMSKIWQWRGGDRRLPVLHSDASPPADDGLPWATAAAASTRTRQESDT

SEQ ID NO: 175417 - protein, 61 aa, Oryza sativa
  Clone ID: PAT_MRT4530_73264C.1.pep
IRRTNSYATPSSTWVNTNKYTSKTPPKQPSPMYTLYKMLKKFLTGPNPVQSIHALPSTVEA

SEQ ID NO: 175418 - protein, 188 aa, Oryza sativa
  Clone ID: PAT_MRT4530_73265C.1.pep
MATSAYAATVAGEAAAGAASPSRRVLAGGRPPPPCISFLSKSPSWCASISLPPGPRRAAAAAEERVEEEEPTWVELEPIGSEQQLERALAEAQPRGPPIVLLWMASWCRKCIYLKPKLENLAAECYPRIRFRSVDVNAVPQKLVNRAGVTKMPSIQLWSDSQKQAEVIGGHKSWLVIDDVRRMIDQEE

SEQ ID NO: 175419 - protein, 127 aa, Oryza sativa
  unsure (1)..(127): unsure at all Xaa locations
  Clone ID: PAT_MRT4530_73266C.1.pep
MLTVAGRRLSIVLXWRPAVFVAEVDGGPRCVPLAGKNDDYDNYGNGRVQPWFSIESPFFDVGRWFFSSETLVPRNHNTVLAELPATVAALKNPNPQVEFDEYNHERPAPGDPSKRALAYFVLGERRF

SEQ ID NO: 175420 - protein, 68 aa, Oryza sativa
  Clone ID: PAT_MRT4530_73267C.1.pep
KENHRGALPLKKWELVRTLKHIFRYPLRIKLPLFVHSPIRCCYLPGMGGMPMPSVYSAATFFGETDNG

SEQ ID NO: 175421 - protein, 94 aa, Oryza sativa
  unsure (1)..(94): unsure at all Xaa locations
  Clone ID: PAT_MRT4530_73268C.1.pep
MVQKQWLKTSPCPRQLPPPSPWPRRRWLPPWSPRQWPPPRCXAPPVRPRAPPPLPQRQLPPTPRSPRRRPPPCPPRCXAPPPCPLRPLATADPP

SEQ ID NO: 175422 - protein, 72 aa, Oryza sativa
  Clone ID: PAT_MRT4530_73269C.1.pep
KNGNIGHPGSLICQTYGEAKLPTPCFPPDWLPYCKMGITYLQNLTLGLYMLENILNYGVSIAGFGGKIEKQN

SEQ ID NO: 175423 - protein, 1451 aa, Oryza sativa
  Clone ID: PAT_MRT4530_7326C.1.pep
MADEYKALVDNGTWRLVPRPPRANIVMGKWIFKHKFHSDGSLARHKARWVVRGYSQQHGIDYDETFSPVVKSATIWVVLSIAASRAWPIHQLDVKNVFLHGHLKETVYCQQPSKFVDPAAPDVVCLLQKSLYGGDRIAYLLLYVDDIILTALTTSLLQQLMARLHSEFAMTDLGDLHFFLGISVTRSSAGLFLSQRQYVVDLLQRAGMAECHSTSTPVDTRAKLSATDGLPVADPSEYRSIAGTLQYLTLIRPDLTYAVQQVCLFMHDPREPHLALVKRILRYVKGSLSTSLHIGSSMIQSLTAYSDADWAGCPDSRRSTSGYCVFLGDNLVSWSSKRQTTVSRYSAAAEYRAVAHAVAECCWLRQLLQELHVPITSATIVYCDNVSAVYMTANPMHHRRTKHIKVDIHFVREKVALGQVRWGMGGCKGDTPLKAQLLPLPAARNPVASTIKASNTPLPTPPTVAAATRPTFTTRWVKKRLQTLTALPCLPKAPFPSSLPANLAPLPLSDVIALLEDSLNVSHELPATEEAVPVSPPSLVAADVDPVVGPLDEIVVAAAAVDEIAAAVDVAGDASVAISTTSGVAAAPTPAIPASVAVAAIVAAVVAALDISSRVNSPSGHPKLHRYSTSFPANQRTRCGTLSVLGRFRKRYEDSKARFVQDLTKLTELDITDFPPELLFPGRIGTTLIRMGFHQLGKVFRPYLLVRFQDGSVCIAKFQQAPGDPSPLAGRLAQQRTWHRRQHNNHGGGEGSDLRASIQRSEQRKMIGLHEIRDLLSSLFVMLNQKKYILFRIEFLVVLVTVLFLVMFIMDIFRRHIHNATMKAIFTILDAVSDSIVIYLLGAMKTAPFKNQLFPVWALVLVNFRYSVDFISGYGVPDRRGRRFTEWRNVVKLLGSAFLNLSRGSKFGLPLWCLWALQMLRSWYRFHSRTLAINSNWHGRSSELVSEYMREANNWKPEECNPKTMEGFKYLVYGERVKLQKPRHLLCSCDNIPSPNNSGNIIQGKDQKDLSLAFALSRLLRCRLEDVKLQRGTFRININLVKRRIIEEKDANHAFGIMEHLLASMVTFCVICWLSIDIRKVYKPPEGELVHLKQGVNVDMIITWVFMLFMLFKEIWEMVTYLLSDWTRLLLVCMYARWDDERTRNRCMENLILSFFKSNIIANRWHGQIDQYVFLESYDDRPRIWNLIHKISTGMVPKKDNGAKLSNPIDIPECVKHAILEKLNSIDLTAGHLPKVVISLLDDKRKSYRWACSELQTCTHTILVWHIATSICEIKLAKNEGVDLSKPGFLCYLLSCFTNCFSSSLYLMDEKKLPGKLQERYIIANSLSRYCAYLLVSKPDLIPDSFFVPNMIFQEAVTLAHDDILKGCESLQERYDKLMPKEKNNTQNVGEENINEDVLRQGAKLADKLMKEEMKTVGRSYLGYGQNYLYTSPLVGMHQHIKNASSQEGSS

SEQ ID NO: 175424 - protein, 182 aa, Oryza sativa
  Clone ID: PAT_MRT4530_73270C.1.pep
MATHQQKMQMPPSSKDDEPAAATRPPPPKREERAEKAPEMEKKVVVTVVNGEEEDDDSGSTDNGRRRCVCSAAGQPAGHFRSGEMVSPDLIRNVVGIVGNAISFGLFLSPVLTFWRIIKEKDMKYFKADPYLATLLNCMLWVFYGLPIVHPNSILVVTINGIGLVIEAVYLTIFFLFSNKKN

SEQ ID NO: 175425 - protein, 413 aa, Oryza sativa
  Clone ID: PAT_MRT4530_73271C.1.pep
MSSETAASPPPPPPNPPAADSTHSSPASMTDETHGAGAHPDESQPHRSSSSSSSPPVAVDGETRVPLPVRSLPQPSHPSPPPSGEDEDDVVITGQIAVGDAAGAAMEERVKGPWSSDEDTLLSNLVEKLGPRNWTLIARGIPGRSGKSCRLRWCNQLDPQVKRKPFTEEEDRIIMAAHAIHGNKWAAIAKLLVGRTDNAIKNHWNSTLRRRHCTGGRCTQGGVMKRAIPERPRSVSEEPWPLGNLSSLNVREAMEAPAQTVSESYVGAWQIGDQSCKTEVVDPPYLARPVAKVGAFKPYNVGPAQSSQKEMLSFATKFDSNLHPFKPENGVCKFVDPTSFAAEVPNKCGHGCCSSHGQLRKNSLLGPEFNEFEDHPPISDSSFASLVSEISSIAWMKSGLQSSDTLARSVPPA

SEQ ID NO: 175426 - protein, 455 aa, Oryza sativa
  Clone ID: PAT_MRT4530_73272C.1.pep
MRIEEVQSAAKKQRIATHTHIKGLGLDANGAAIGLASGFVGQAAAREAAGLVVDMIRQKKMAGRALLLAGPPATGKTALALGISQELGSKVPFCPMVGSEVYSSEVKKTEVLMENFRRAIGLRIKENKEVYEGEVTELSPEEAESTTSGYGKSISHVIIGLKTVKGTKQLKLDPTIYDALIKEKVAVGDVIYIEANSGAVKRVGRCDSFATEYDLEAEEYVPIPKGEVHKKKEIVQDVTLHDLDAANAQPQGGQDILSLMGQMMKPRKTEITEKLRQEINKVVNRYIDEGIAELVPGVLFIDEVHMLDIECFSYLNRALESPLSPIVILATNRGICNVRGTDMTSPHGIPVDLLDRLVIIRTETYGPTEMIQILAIRAQVEEIEIDEESLAFLGEIGQQTSLRHAIQLLSPASVVAKANGREKISKADLEEVSGLYLDAKSSARLLQEQQERYIT

SEQ ID NO: 175427 - protein, 173 aa, Oryza sativa
  unsure (1)..(173): unsure at all Xaa locations
  Clone ID: PAT_MRT4530_73273C.1.pep
MSFCSPVFFLFFFFIFCFFFLCFLYFFFFFLFVSFFLFYWVFVYISNFLLFFSVLFAIFFYLSFILILFVVFFVLLLLYYLPTCLLFLCVVLLLLLFSCVFVLVVWLFVFIFCFRYLSLISLHCLYLVAHVSAVLXFLVSVFCWISVLLLFSAFHIIVVLFCFVYLLQHLFRA

SEQ ID NO: 175428 - protein, 49 aa, Oryza sativa
  Clone ID: PAT_MRT4530_73274C.1.pep
FLNGCIYEQVLLYKRVVRSIVLYPIVGSAQESTRVVMFTRSVLWAVHGG

SEQ ID NO: 175429 - protein, 201 aa, Oryza sativa
  Clone ID: PAT_MRT4530_73275C.1.pep
AGIRHEDAASICVCCACCNPRAGTPQGGMPLAATTAVGATPCAAAPSGPHAVHVHCSTPGWESCCTSSSTTYWHMTGLRSNGQAASHLHPAHMAWHAAPLRCTPGVLCSNLGGTQLEGHKRGYAARQQLLAVSVAWVVCRLHVAPGLLQLAAVWYAGARQDMPCMQCMSCPLPHLPPSCRCWSVSRMAHVHVCACCGGDDQ

SEQ ID NO: 175430 - protein, 80 aa, Oryza sativa
  Clone ID: PAT_MRT4530_73276C.1.pep
MFINLIEYFSGYMAPEYAMEGIFSVKSDVFSFGVLLLEIVSGIRNAGFHQRGNSLNLLCYAWELWKEGRWSELADPSIYN

SEQ ID NO: 175431 - protein, 142 aa, Oryza sativa
  Clone ID: PAT_MRT4530_73277C.1.pep
MRRSWRGRTPGHPRPGLAALDLDSPWISMPSLDLEMRGRILPLSLADSPSCQTITTLLVTARGKLRKNMRRLCQWWWCHWNGILVIILDMSAVNARRQRPNTKSRGDAEMSTQDEHTTIDDRLRWQAMPKIFTTDALWTDNF

SEQ ID NO: 175432 - protein, 264 aa, Oryza sativa
  Clone ID: PAT_MRT4530_73278C.1.pep
MALFAAARRAATSTLPLLRASASAAGTTRGAAALLRPLAAAAAARPQPRSMPFSSAPSTRPSSDGELLRIIDAEIKFAEESDDHDRVEEIPDNFPFKISDEKGFNSITLTRTYQGENIEVLVSMPSLVTGDEPDRENEADEDRNEDDQEEETQKAPKSSIPLTVTISKGEEGPSLEFICTAYPDEILIDALSVMPSESGEDEMITYEGPDFNDLDENLQRAFHKYLEMRGITPMATNFLHEYMINKDSREYLIWLRRLKDFVRN

SEQ ID NO: 175433 - protein, 126 aa, Oryza sativa
  Clone ID: PAT_MRT4530_73279C.1.pep
MAEGVAAFAVAHARRRRSHQIRRQPSMLPQLPPSVAAVASEGAAGRFVRGPPDPTPPTAGGCPTHEGCGEWMRLPHASAHTPRHPRPPPPPSPPPRPVLVVEREERGEEEPGVEEWVWSGREERSG

SEQ ID NO: 175434 - protein, 44 aa, Oryza sativa
  unsure (1)..(44): unsure at all Xaa locations
  Clone ID: PAT_MRT4530_7327C.1.pep
XSIPPKIXCKCAAVSLXYIRHQVSGLXYNAQLHCPATXAIQFVP

SEQ ID NO: 175435 - protein, 84 aa, Oryza sativa
  Clone ID: PAT_MRT4530_73280C.1.pep
MARQLDYQAMGQKQRLGLSGTRLRHSGAKRRLGSAVAAAWHSTARRRRDDPTVAVQAAAVPVATPGINDNARRRQKGEKLRLLD

SEQ ID NO: 175436 - protein, 104 aa, Oryza sativa
  Clone ID: PAT_MRT4530_73281C.1.pep
MPFAPLGFGIPPPPRGGLKGGVPPFPPKVFPGVFAGQKGPIAEAPGRKAPPPFFARGKVKPFPKGGGLPPEPPPPGGAPPPPESWVKISPSFWARCWGAPQIPP

SEQ ID NO: 175437 - protein, 73 aa, Oryza sativa
  Clone ID: PAT_MRT4530_73282C.1.pep
QKHSKSCNLKRGGGLTAQRPQRPNGAHWCGGWGCATRCLGERGKPAKAPKPYKLRSWGWGNPPKALKPLTTAL

SEQ ID NO: 175438 - protein, 162 aa, Oryza sativa
  unsure (1)..(162): unsure at all Xaa locations
  Clone ID: PAT_MRT4530_73283C.1.pep
MFLTGMKKLEKQQNMIFGHIGCIGCVRGKNSIRDSRGELLSIKAIMGPRGYDIFDRNEKVQKTPKHDFWTYWSVLGAFEAKAHFVIRAANFCQLMPLLAHVGTIFXDQNEKVQKTPKHDFWTYWSVLDSAVLVDYYNLTEPKMEALRQKASRAEASAVEESQ

SEQ ID NO: 175439 - protein, 151 aa, Oryza sativa
  unsure (1)..(151): unsure at all Xaa locations
  Clone ID: PAT_MRT4530_73284C.1.pep
MFLTGMKKLEKQQNMIFGHIGVIGCVRGKNSLRDSRGELLSINAIIGPRGYDVFERNEKVQKAPKHDFCTYWSVLGAFVAKTDFVIRAANFCQLMPLLAHKGTIFXDQSEKVQKTPKHDFWIYWSVLSAFEEKTPFVIRATIFCQLMPIMA

SEQ ID NO: 175440 - protein, 172 aa, Oryza sativa
  unsure (1)..(172): unsure at all Xaa locations
  Clone ID: PAT_MRT4530_73285C.1.pep
GGRXGKAIVSHLVASVAGGPSLITSPVSKVSGXHATAMWHLHAATTGSSQKTTAQVVVGFPHHAIQQSSKGRSQGRCKHGVRAHTILPPTGLSRCLWVDWXLVAVGSSRASPVXKLHSHLGSCPYYGSXATHSLRGPQHYRALFVLSVWMLGGQKMRPTPSPPAASGSVQRT

SEQ ID NO: 175441 - protein, 545 aa, Oryza sativa
  Clone ID: PAT_MRT4530_73286C.1.pep
MAAKVGLFPSSSLTTSPHAIAAAPTNAPRPRGARGLASPGRSAAAMDAFHVSSQAAEPLLRTTGAAAAAAAAATATSNPRLRVRNPDPNPPRPNYSRRRFFYPGARCGHMRRAARRPPAVAPEMARPGRSSRGRPSSFRKIAPLSISLSAELSGTTWFSLSSIQLGLVASGSLYGALGGSLLAYRVADFLGRRIELVTAAALYISGALVTGFAPDFVLLIIGRLLYGIGIGLTGYLVGSLEIDVVGGWRYMFGFGAPLAVIMAIGMWNLPPSPRWLLLRAVQGKASVEDNKKKAIQALRSLRGRFRSDRVLADEIDDTLLSIKAAYAEQESEGNIWKMFEGASLKALIIGGGLVLFQQITGQPSVLYYATSILQTAGFAAASDAAKVSILIGLFKLLMTGVAVFKVDDLGRRPLLIGGIGGIAVSLFLLAAYYKILNSFPFVAVGALLLYVGSYQVSFGPISWLMVSEIFPLRTRGRGISLAVLTNFGSNALVTFAFSPLQEFLGPANIFLLFGAISLLSLVFVILKVPETKGLTLEEIESKLLK

SEQ ID NO: 175442 - protein, 128 aa, Oryza sativa
  Clone ID: PAT_MRT4530_73287C.1.pep
MAVSLFVLGFSLCVSSPGSELWAATTSVAVAAAFMVTFSLGFGVGGAPRATDASEEAVGLWRHGLTERAREAAGCGEEGAPSPVHPPTSFAPSWRQLDAVHLIRLSSSLEAAGQDLPPPPCSALLTAP

SEQ ID NO: 175443 - protein, 59 aa, Oryza sativa
  unsure (1)..(59): unsure at all Xaa locations
  Clone ID: PAT_MRT4530_73288C.1.pep
FFSLFFFYFFFFFFFFFFFFFFFFFXMMKQVMGINATPTLHPVNDTTDCINKVLGPQNP

SEQ ID NO: 175444 - protein, 275 aa, Oryza sativa
  Clone ID: PAT_MRT4530_73289C.1.pep
MAVAHLLIQLISMAGNGVGACRVQIIPAIIFLQLLFRALGADGASSFSFTNSCQYPVWVGVLHGATSPALARSGFYLAPSGTYHLAAPSSGTWSGTFWARTGCAVDSSTGRFTCATADCGSGDVACNGRGPSPPVTLAEITLAAPGSGGQDFYDVSLVDGFNVPVRLAPSSSGGGGDCHAVSCAGDVNAACPSDLRVVSGGGAVVACRSACDAYRSARYCCTGAYGSPAACGPTDYSQVFKAACPAAYSYAYDDASSTFTCFGASSYDVTFCPLS

SEQ ID NO: 175445 - protein, 265 aa, Oryza sativa
  Clone ID: PAT_MRT4530_7328C.1.pep
MADEYKALVDNGTWRLVPRPPGANIVTGKWIFTHKFHSDGSLARHKARWVVRGYSQQHGIDYDETFSPVVKPATIRVVLSIVASRAWPIYQLDVKNAFVHDGDRITYLLLYINDIILTASTTSLLQQLTARLHSEFAMTDLGDHFFLGISVTRSSAGLLLSQRQYVVDLLQRTGMAECHSTSTPVDTRAKLSAIDGMPVAHPSEYRSIAGVLQYLTLTRPDLAYVVQQVCLFMHDPRKTWSSVSSGTLREISPLASTSAPTRFRP

SEQ ID NO: 175446 - protein, 1058 aa, Oryza sativa
  Clone ID: PAT_MRT4530_73290C.1.pep
MRLGCSGRRRRLLRAALLRLVVLVLVAPPRRCAGESATCLAVYREGGAPAVFQSAHCPRWTLLAPSAGSGGEGDGDRRSSSSSPPPPPHPRGCHVAVDRGRRRSQEDRAVCALGIRIPFIEHMRIKEVDVGVVAVFDGHNGAEASEMASKLLLEYFLLHVYFLLDGIYSIMFRKSTGKLTYKEVTILNNVINLYKEDQSSHSKGSCWALPAILDRSFHMEVLKESLLRAVHDVDLTFSKEGKRRRKRNSNNRDDFALANYDGPFYNVKELTKDHHPDREDERSRVEAAGGYVLEWAGVHRVNGELALSRAIGDVPYKRYGVIPTPELTEWQSLSANDTFLIASSDGVFEKMTMQDVCDLMLRVKLGVNQELGSFAVTQRNLADYVVDLALEKGTTDNVAAVIVPLGSHYSSKVTLEDWYMLEENSKTSISPLQTIPYQQKSDDGVSSALIGVDYYKRSSAKFHRFLVEAKMKRLGCFYLSESLDEDMDYIFRVPEAYQHEGVNDFDHSLVETVLFSDGNLDKYKDRDFCWYLGHQDGEMGRCHSPEAFANFFGLLDSVSHNGSKPHSSHSFGYKISDFRYKLKKRFDRGSYGEVWLAFHWNCSEDVDVHKDHSHFNTILKPDSYNCTSSNTTLPDENHDSDTIDGDLFILKRIMVERGRAAYLSGLREKYFGELFSNASRTLEALSRAESSTAFSVDSQLNPHIFAENNMSFTEEPLKHIARFIESFESELKELWLVYRNEGRSLSKLIYTAEETKLVTGNNNERVRHIQVLQPSKWWYWLRTTKAGQKQMQNLLWQLLMGLKACHDRNITHRDIKPGVLLTFGSAFDDFTLKHLYDSGPTRYDMWSVGVVMLELIVGSPHVFQISDRTRALMDHRLEGWSEQTKELAYKLRSYMELCILVPGISSQHQGSGDSEHGQFRPASWKCSEESFAHQVKIRDPLKMGFPNIWALRLARQLLIWHPILNCGHNALYLLCFSLKYEDDNGIKSTHFTECTDENYTQATAYCFCYLHPAKLENNYVNATIRPAHALQFYFMTTLFIDVVPSLNIYLPLSCRRTA

SEQ ID NO: 175447 - protein, 72 aa, Oryza sativa
  Clone ID: PAT_MRT4530_73291C.1.pep
ELADAGKVLQDIKVFVQSNRRRAPPPELRFESLICFVPCHTRFILKDVGSVFGDVHTDREWVYTGAVLGDSK

SEQ ID NO: 175448 - protein, 59 aa, Oryza sativa
  Clone ID: PAT_MRT4530_73292C.1.pep
PQVSKFLLLCAQQEVHYLSLLFMMSSSLLVVFLTLGAPLIYNTALNVVKVLSHAVLGLS

SEQ ID NO: 175449 - protein, 56 aa, Oryza sativa
  Clone ID: PAT_MRT4530_73293C.1.pep
HILRASRAALISQHNSSGVGKSTARWIVVHVKRTPSPAPKDKHRCRLAGYRQCHGG

SEQ ID NO: 175450 - protein, 239 aa, Oryza sativa
  Clone ID: PAT_MRT4530_73294C.1.pep
MVEPLSEGPCIAPRARGDTGGNSSSPATTPPHLLLPCLATAQACTENHTAARAVAAGPSPLSMEASEVRAHDQYQDDRGHNGGRLELARLIEVWPQHSRAIERMDVARCGASVLDLARERPCGSVGPCAMGQLGGAATFGSCDNDAVASGIDGEQGHSHIDWCLAGGGSLPYSEALDVMGHRWCCHIGRRLAAGALVLQGLRRRGIGAMAVGVGGPFGTLRRVRVGRRNGTGVVEFMCW

SEQ ID NO: 175451 - protein, 78 aa, Oryza sativa
  Clone ID: PAT_MRT4530_73295C.1.pep
MEGGSDAARVQRRQALPPFWPAQLRTVISCTAGAALVVCIPKDFLRCPLISGHGAMEMLKVTMLLQLEVKRWMVGKKR

SEQ ID NO: 175452 - protein, 65 aa, Oryza sativa
  Clone ID: PAT_MRT4530_73296C.1.pep
MAVERAEAGGIRMAGVPALVPANCYLQPATPAVLVIVCSLALFPLHGVTINQACRFQITEKGPKR

SEQ ID NO: 175453 - protein, 84 aa, Oryza sativa
  Clone ID: PAT_MRT4530_73297C.1.pep
HGRGEARLSRDWQAPFRAAMKSWGSINTRGGGGRLGSPRSCLTPWAQPSEKQRLPHSTRSLNPSHPSRPDAMEGLAATGAAFAS

SEQ ID NO: 175454 - protein, 176 aa, Oryza sativa
  unsure (1)..(176): unsure at all Xaa locations
  Clone ID: PAT_MRT4530_73298C.1.pep
VVPDPVHRLSTSLRRSSSPVVAAPSGEXLPPLSFPSPFPRAPPPPALAIAFGRRRRRGAVRCRRPRRRLPSPVDARVPPPLPWLAGRLCAEQSRARSPLHRPIGPGPIWAVDPVDRLWTTRVVPVHGRPATPCARVCVRWWFLRGVGFVRAVEDACGVVFPVDLNVNTPAGPGRGF

SEQ ID NO: 175455 - protein, 234 aa, Oryza sativa
  Clone ID: PAT_MRT4530_73299C.1.pep
TPSLFFPISPNSPELSIAPAPCIHPPPPFPPLRPPLAAARLAATPRRRRRWVRVAEIHPVHPSSVEVVPDPVHRLSTSLRRSSSPVVAAPSGEDSLPFPFLPRFPVRLRHPRSPSPSVVAAAGVPSAAAARAAACRRRWTHACRRPCHGWPVGFVPSRAEPGRRCTVRSAPGQSGPSIPWTGCGPPAWFRSTVDRPPRAPLTCGPRLSAPLYCLLCMSLRFRFFRRSGVLRDSR

SEQ ID NO: 175456 - protein, 1436 aa, Oryza sativa
  Clone ID: PAT_MRT4530_7329C.1.pep
MSTESTQSSTSSASSGSSSSSTTSEFLHPYATVAVKSHVPITLENTHPNYNKWRAFFTSLCGKFGLMAHIDGSAPPRPNDPAWEQADCCIRSWIFGSVADNVLDLAMEPDQTARELWVAIEDMFHANKEPRAIFLSHQFHSMIQGDSSIDDYCQKMETAADALRDVGHAVTESQLVLNLLRGLNERFSNTGDNIAGAAVLPSFTSARNTLLLKELRIANEARVAAATALVASGGFGSGSCPPGGCISSGGGGGGSGSGGGARQTFPGGGTGGGGFPAGQARTGGNTNRRNRKGNGGRGGGNGGGNGGGSGGGGGARQAFSGGGGGGVSSGGGGFSAGGSSTGWVANPSWRLAGPWVCFNPWPAQQQAWRPSSAGLLGPAPTAHYSQANTTYAGPFVSPTSAPTGQPNWEQAGLIAALNQMAFQSPNNWVLDTGATSHMSSTDGILVTRLPNSYTFITVGNGQTIPVTCRGTSFLPIGTTKFALKNILVAPSLVRNLLSVRQFTRDNKCSIEFDEFGFSVKDLQTRRVILRCNSHGELYTLPAATPSNTASCSLATSSTLWHRRLSHPGPAAIHSLRNMSSISCNKIDTSLCHGLPPAVAPSSEVEQPRPLTVAPSSEVEQPRRLTVAPSTEVEQPYVPLFGRRLPNDTVPAARDARSAGTPLVSASSIGAALSVGATRAGTMSPFRHVYTRRPTVTVPPSSSPNVVVTATAPQPHSMVTRSQTGSLRPVDRLTYTATHATAASPVPANYRSALADPNWRTAMADEYKALVDNGTWRLVPRPPGANIVTGKWIFKHKFHSDGTLARHKARWVVRGYSQQHGIDYDETFSPVVKPATIRVVLSIAASRAWPIHQLDVKNAFLHGHLEETVYCQQPSGFVDPAAPDAVCLLQKSLYGLKQAPLDTRAKLSATDGLPVADPSEYRSIAGALQYLTLTRPDLAYAVQQVCLFMHDPREPHLALVKRILRYVKGSLSTGLHIGSGPIQSLTAYSDADWAGCPDSRRSTSGYCVFLGDNLVSWSSKRQTTVSRSSAEAEYRAVAHAVAECCWLRQLLLELHVPIASATIVYCDNVSAVYMTANPVHHRRTKHIEIDIHFVREKVALGQVRVLHVPSSHQFADIMTKGLPVQLFTDFRSSLCVRAPPAATVGGYRFIGSHSRRHGNIYRQCERVDPGHIIKCIYRIKLYYQENWAQEGWGFWGSGGFSYLYEPLWWLGMITMILGEVANFAAYAFAPAVLVTPLGALSIIFSAVLAHFVLKEKLHMFGVVGCILCVVGSVGIVLHAPKEREIDSIDEIWHLATEPGFIVYSCVAVVSVLFLIFWVAERSGHRKMLVYIAICSTMGSLTVISVKAVAIALKLSFGGSNQFIYIQTWFFIVVVIVCCLVQLNYLNKALDSFNTAVVSPVYYVMFTILTIFANMIMYKVSLQIIRFRQLRNFSPAQD

SEQ ID NO: 175457 - protein, 60 aa, Oryza sativa
  Clone ID: PAT_MRT4530_732C.1.pep
MPHEHVTTSAGSFRAVFDLGLVRQGLHPTRSSNSSSTTAARIESYQEQQQQFNNSSSNAS

SEQ ID NO: 175458 - protein, 148 aa, Oryza sativa
  Clone ID: PAT_MRT4530_73300C.1.pep
INEKEEWRGKLSLHPAIQIPADSYALLSPFYFPLFLSSRAADTGGQKEQAGFKRSVPSHGERWANPEEVGEEREGMASWWLSAHQIWYMWRLSATIVLPFPTISHSEKLDPESERRSAQANEHMEERTRGFPSEPSALAGAARLSPPP

SEQ ID NO: 175459 - protein, 224 aa, Oryza sativa
  unsure (1)..(224): unsure at all Xaa locations
  Clone ID: PAT_MRT4530_73301C.1.pep
VNPEATEAVAGPAVIKGGGADRRGPHVSGARGGRSTVXGTTRVVHRRSTGSTARIGRRRQAAAADDAXDGGDDRRRRRARVAAAHGETGKERKGEGVLTGEGGDDRRRGATEGGRQAADGVRDDMAALTVARREWCSGGEPRRRRGGRGGSRPLEPNGGDGAVWRRARQLSFGGQHSFHGDHRSGDSGGLCYPACAGRDRSKIGCLVEDIKKLGVEFISVSFIH

SEQ ID NO: 175460 - protein, 141 aa, Oryza sativa
  unsure (1)..(141): unsure at all Xaa locations
  Clone ID: PAT_MRT4530_73302C.1.pep
YVRKLAVTINGHTLGPTIHAVQGDTIVVNVKNSLPTENVAIHWQDIRQIGTPWADGTESVSHPVGSSPNLQPXPPRPQPPPRLASVPPRPRRPRCPRTHASRAHFPLSRRCRCRVRVAKIHPVHPSFVEVRRRSAIPIVRR

SEQ ID NO: 175461 - protein, 240 aa, Oryza sativa
  Clone ID: PAT_MRT4530_73303C.1.pep
ARPISPRRLEEELSSRRAEMRRIHDDNQRLADEIVGLRQAMPRLKEDLHAASQAIPKLRAEKELESRELTQRNLKLEAELRSLEPLRQDALQLRSEAGKLQSIRQEMTAKVQGLLKELEHQNSENQKIPVMIAERDALRQELYHCRGTLEYEKKARPDLTAQVQAMEKDLVSMAQESEKLRAEIKKRNAPSFSGHGAYGPPMATPGMGLQGVYDDGYPSIGSRYGTGSWAPHDPHGYPQL

SEQ ID NO: 175462 - protein, 101 aa, Oryza sativa
  Clone ID: PAT_MRT4530_73304C.1.pep
QIWGDKCPGGEKTNDKKLKRRCMGEQKSQKVNGKQKSWGKGGPPPVKKKRHFSIGRIKMGGKKSGYIKMPKGKRVYIMRGGKNMWEGLTGDRSQGTGVFPG

SEQ ID NO: 175463 - protein, 151 aa, Oryza sativa
  Clone ID: PAT_MRT4530_73305C.1.pep
MARVAARAHPPATGSGGAGGGSGRRPGGDGDRRRRRAWVAAAHGESGKERKGEGVLTGGDDDDRRRGAAEGGRQAADGDRDDLKNEKEKIREGERGHRRRERRPKAAAMATLTVAQWEWRSGDEPRRRRGGRGGSWPREPDSGNGAVRRRA

SEQ ID NO: 175464 - protein, 202 aa, Oryza sativa
  Clone ID: PAT_MRT4530_73306C.1.pep
TPAPCIYLPPPFPPLRSPLAAAQRRRRRRVRVAEIHPVHPSFVEVVPVPVRRLSTSLRRSSSPVVAIPSGEDSLPFPFPSPIPRAPPPPALAVAFGRRRRRGAVRCRRPRRRLPSPVDARVPPPLPWPAGRLCAEPSRARPPPHSPIGPGPIRAVDPVDRRGTTRVVPVHGRPTTRAPLPSGARLPAPLFPLSRAADRWAPH

SEQ ID NO: 175465 - protein, 84 aa, Oryza sativa
  unsure (1)..(84): unsure at all Xaa locations
  Clone ID: PAT_MRT4530_73307C.1.pep
DLVVSRHGYPVXNLEXQPMKTPAHAKNMLNVTKGPVHGKLGKVYIPDQQVANMSLSIDVNRLKMDCLESNLVKDHLKXQKINPE

SEQ ID NO: 175466 - protein, 243 aa, Oryza sativa
  Clone ID: PAT_MRT4530_73308C.1.pep
QRRTGGRSNVDWDHAGGPPPVHGIDGPDRPGADRTVRWRPGSARLGLAQSRPAGHGKGGGARALPATATGDGRWRRKGGGARPGRRLDPARLGGRGRGIEEERCLTESGRRGGGRRRTATCEGMRAPATDLDGGGADWVDLDHANPTAATARAGERERGGSGRGRRGREGDVDDVAREARARGATAVAGAAASGWRLGEDPTGGPHLSVTPRERRGRGLSWAVASGRPSKARGERRGNGPAAH

SEQ ID NO: 175467 - protein, 407 aa, Oryza sativa
  Clone ID: PAT_MRT4530_73309C.1.pep
GTPPPGEVEAAGRCGVAADPAPPWPDLARQRGPAVVRGWGRRRWPDGAMRLGSGGGPAAGSGTARRRRLRRRPARIRRPHGRIRLPDGQGRYGRRRWRREDGACGRTAHARREDAGVEVDACGAVQRADVAVAGTGDACRRTSWMTTGGGCCQMDGCVVGDPTGTPACMAAAGSLRVARVAALQVLAGGDAAGSRVELGFSRTALPSRPAMTRGRVTPRNSQIEFQVECALKSPSRTGRGVDIQIHWEHHSTGILDGTDEAYSSEKPPSDTYSGARGGRSTVDRNHAGGPQPVHGIDGPDWPGADRTVQRRPGSALLGTKPTGQPWQGRRHACVHRRRQAAARAAAADGTPAAATTEGDGERGWRRRTGKRGRKGKGRESSPEGAATTGDEERRREVDKRWTGSGTT

SEQ ID NO: 175468 - protein, 61 aa, Oryza sativa
  unsure (1)..(61): unsure at all Xaa locations
  Clone ID: PAT_MRT4530_7330C.1.pep
SVGICCDIVPGRVQVMLHMDHDSEVALLKQRKGYALIAMETGSPLIPGGAFGQSXLYKWRR

SEQ ID NO: 175469 - protein, 241 aa, Oryza sativa
  unsure (1)..(241): unsure at all Xaa locations
  Clone ID: PAT_MRT4530_73310C.1.pep
MRQLEESYTTSPAVAHAGLWADIIKGGSAPTGGTRMSVAQGVAGIPWTGTTRVVHRRSTGSTARIGXGADRTVRRRPGSARLGTKLAGRPWQGRRRARVHRRRQAAARAAAADGAPAXGDDRRRRRARVAAAHGETGKERKGEGVLTGGGGDDRRQGATEGGRQAADGDQDDLKNEKEKVREGERGHRRRERRPKAVDMAALTVARWEWRSGGEPRRRRGGRGGSRPREPDGGDGAVRRRA

SEQ ID NO: 175470 - protein, 677 aa, Oryza sativa
  Clone ID: PAT_MRT4530_73311C.1.pep
MSAAGYRYQALKEALAAAISGHDLARHHAAADHRRPHALAVVAGLASNGYVASLLVSRYFRLGDAGAARNVFDAAATAAAPQKALLYNAMLRGYLAGGLPRMAVGIFGEMAAAACLPDRHTYHLAVAACARASEFEVGWRIGAEAAAKGFASDLLVATALIGMYAEAGDMGAARKVFDGMPQRDAVAWNAVIAGYARGGHLREVVELFMRMRSVDVVLPTEATLVTLVSGYAGFGSWEGRGMMHTIVIKLGFQLNLFVSNALLDLYVEFGCLREAVMLFRQMAVKDSVTWSAMIGGLVRNGRPDSALKLFRWMVTNSTVLVTRSILLNVIMACAELGEWREGKWVEENYVCCNGFEFKRDPSVVTALIYMYAKCGMLDSSVSLLYGVAEVRDDVFAWNAMIKGCGELGLVEKAVGFVVEMQKIGVDPDAITYLEILPMISSIPSLKTGMEAHAQIVRRGFLNERAIANSLVSMYGRCGSLRHSIEVFSRIVVKDVISWTSMMQVYAWNGHVNEVVKLYEVMKKTETEPNHYTFLAVLSACKNTGLVEEGMELIKYMQEKCGLKPEIEHISCVVDMLCRAGRLTDAYHLIKYNNSEHINNTILWGTLLSASRSCGDLVIGEAAAKHLLSLDPENRANSKMLADIYVLLGRRDDADNLLRVSMTRGLDIKPGCSWMEGV

SEQ ID NO: 175471 - protein, 39 aa, Oryza sativa
  Clone ID: PAT_MRT4530_73312C.1.pep
LQQPIFIHEKPWPLYTIRAYLLPIDLYLRVITLFHLIKV

SEQ ID NO: 175472 - protein, 104 aa, Oryza sativa
  Clone ID: PAT_MRT4530_73313C.1.pep
TPIDFPKVLLVFANVPHGAFFFKEKLGNMAKTSPGPFKISFVLNHPPKFWTGGVGFLSQAIFKALLPAPPGAIQILGGGPPPMNKAMVGPLFELGAPKEIRFPF

SEQ ID NO: 175473 - protein, 58 aa, Oryza sativa
  unsure (1)..(58): unsure at all Xaa locations
  Clone ID: PAT_MRT4530_73314C.1.pep
PXXXRGVVLRVRGGEXXRXXXXRGVVARWLPVLLDXALVGTVVHGSXRRGCXXIXXFL

SEQ ID NO: 175474 - protein, 231 aa, Oryza sativa
  unsure (1)..(231): unsure at all Xaa locations
  Clone ID: PAT_MRT4530_73315C.1.pep
MPLHRSAAIRSAVDGHICLVLIMLFLISTKLAADQPLAAAEPIARSCHDCGGVQIPYPFGVSSSGCAMAPSFEVDCNDTGNGVSKPFVGNIEVVSLGNGQARVMNHVSSSCYNRTSRQMNPADVWYLNLTGTPYRLSDPACRFTVIXCRTLALHLRRLQRVCKYMSGCVSVCPXGDLSSAINGSCVGIGCCQTNITTGLSYYQVMFXTPYTSGVYKQTPCSYAVLMESSSF

SEQ ID NO: 175475 - protein, 63 aa, Oryza sativa
  Clone ID: PAT_MRT4530_73316C.1.pep
IKLILEETKYYKVPPLHLRYAPTTVVPMLPSFYHFPLSSFLHISPFYISPFMRRLSQDPSICY

SEQ ID NO: 175476 - protein, 59 aa, Oryza sativa
  unsure (1)..(59): unsure at all Xaa locations
  Clone ID: PAT_MRT4530_73317C.1.pep
KARINPPRPKGQSERITHHQAKRQQPKXRGLRPPETRRRGXNGKDEXKQXGRQRDKKTH

SEQ ID NO: 175477 - protein, 33 aa, Oryza sativa
  Clone ID: PAT_MRT4530_73318C.1.pep
MTMGGGRAKHDESDQGLFFNMMHGAARRHGYPP

SEQ ID NO: 175478 - protein, 338 aa, Oryza sativa
  Clone ID: PAT_MRT4530_73319C.1.pep
FTGSGNYDIISAANTYAQIRGFAWPAVLVGLVAQSASLGMKDSWGPLKALAAASVINGVGDLLLCSVCGYGIAGAAWATMVSQIVAAFMMMQNLNKRGFRAFSFTIPSSSELLQIFEIAAPVFITMTSKVAFYALLTYSATSMGAITLAAHQVMVNVLCMCTVWGEPLSQTAQSFMPELIYGAKCNLMKARMLLKSLVMIGAITGTTVGAVGTLVPWLFPSLFTNDFMVVQQMHKVLIPYFCALLVTPSVHSLEGTLLAGRDLRFLSQSMGACFGIGTFLLMIIRNKFGSLPGCWWILVLFQWGRFGSALQRLLSPTGMLYNENFNNHHDEYVKVKAT

SEQ ID NO: 175479 - protein, 790 aa, Oryza sativa
  Clone ID: PAT_MRT4530_7331C.1.pep
MNNSIRTLLIQASMPPSYWAEALATATYLLNRRPSSSVHHSLPFQLLHRTTLDYSHLRVFGCLCYPNLSATTPHKLAPRSTTCFFLGYPASHKGYRCLDLSTRRIIISRHVVFDESRFPFAATPPAPSSFDFLLQGLPPAVAPSSEVEQPRPLTVAPSLEVEQPRPLTVAPSTEVEQPRRLTVAPSMEVEQPYVPLFGRRLPNNTVPAARDARSAGTPLVSASSIGAAPSVGATRAGTVSPFRHVYTRRPTVTVPPSSSPNVVVTAAAPQPHSMVTRSQTSSLRPVDRLTYTATHATAASPVPANYRSALADPNWRTAMADEYKVLVDNGTWCLVPRPPGDNIVTGKWIFKHKFHSDGTLARHKARWVVCGYSQQHGIDYDETFSSVVKPATIRFVLSIAASRAWPIHQLDVKNVFRHGHLQETVYCQQPSGFVDPAAPDAVCLLQKSLYGIKQAPRAWYQRFATYIRQMGFLPSASDTSLFVYKDGDHIAYLLLYVDDIILTASTMTDLGDLHFFLGISVTRSSAGLFLSQRQYAVDLLHRASMAECHSTSTPVDTRAKLSATDGLPVADPSEYRSIAGALQYLTLTRPDLAYAVQQVCLFMHDPREPHLALVKRILRYVKGSLSTGLHIGSGPIQSLTAYSDADWAGCPDSPRSTSGYCVFLGDYLVSWSSKRQTTVSRSSAEAEYRAVAHAVAECCWLRQLLLELHVPIASATIVYCDNVSAVYVTANPVHHRWTKYIEIDIHFVREKVALGQVRVLHVPSSHQFADIMTKGFAYENNRKLRFDSIV

SEQ ID NO: 175480 - protein, 107 aa, Oryza sativa
  Clone ID: PAT_MRT4530_73320C.1.pep
SLIRKKSKYHKFTDKCKGKFAYQKFYRITTHHIATCLKTMEMERILTLLANKAGLICAISYKKTSFQENRKIQNLNNLPDGKIPLFQDLLTGFKALCNYRTTVSKKI

SEQ ID NO: 175481 - protein, 85 aa, Oryza sativa
  unsure (1)..(85): unsure at all Xaa locations
  Clone ID: PAT_MRT4530_73321C.1.pep
RASCAAFLLHPYLSLSILPRVAMADTTNRVYTIPNGQQVILSRVGLGRXNPRVWDAPLEFRPXSCHLSPYPXAGGRGDAGVVALT

SEQ ID NO: 175482 - protein, 839 aa, Oryza sativa
  Clone ID: PAT_MRT4530_73322C.1.pep
MILRQQLEIIPLAIKDVFSLIQDTPGREFLLRVSYLEIYNEVINDLLDPTGQNLRVREDAQGTYVEGIKEEVVLSPGHALSFIAAGEDHFHHNLMIESSAHGDEYDGVMYSQLNLIDLAGSESSKTETTGLRRREGSYINKSLLTLGTVIGKLSEGRATHIPYRDSKLTRLLQSSLSGHGHVSLICTITPASSNMEETHNTLKFASRAKRVEIYAARNRMIDEKSLIKKYQREISSLKQELDQLRRGLIGGASQEEIMILRQQLEEGQVKMQSRLEEEEEAKAALMSRIQRLTKLILVSTKNNIPALTDTSSHQRHNSVNEEDKVSTSQDSSMLVQNDSATKDSLSSASPDAVDEINQLRCASGDHSSIAGSGPDEMQGGITASDQMDLLIEQVKMLAGEIAFGTSSLKRLIEQSIEDPEGTKNQIDNLEREIREKRRHMRALEQKLMESGEASVANASMMDMQQTITKLTAQCSEKAFELELRSADNRVLQEQLQQKNVEINELQEKVLRLEQQLTTNTEASPEQCTEHELHDLKSKLQLKEAESEKLKYEHMKITEENRELVNQNSTLCEEVAYAKELASSAAVELKNLAEEVTKLSVQNAKQAKELLIAQELAHSRVPGRKGRSAGRGRDEVGTWSLDLEDMKMELQARKQREAALEAALAEKEHLEEEYKKKFDEAKKKELSLENDLAGMWVLVAKLKRGALGISDLNVDDRSINLADITNGTKENKADKNVAVVEKQLSDNTVKSLTAEEYRNPEFEPLLVRLKAKIQEMKEKETDSLGDKDGNSHVCKVCFESATAAVLLPCRHFCLCKPCSLACSECPLCRTRIADRIITFT

SEQ ID NO: 175483 - protein, 711 aa, Oryza sativa
  unsure (1)..(711): unsure at all Xaa locations
  Clone ID: PAT_MRT4530_73323C.1.pep
MDHHRQMQDIQLARCSSQHHGSEAAVTARGDSAGGLEMCPALYLAASKGRAEEVMALLLQPRHGGVAQGHLDQVNGTWMVPHNGREVEGPGPGAGRAVQAPWAPPSQGPPDQRHGQCNISEVSAESNTVFHVAAEQGHDELIREVYLRFKESSLLSRRNSSQDTPLHCAARAGHAGAVTAIVQLLALDSILGCKNEAGDTALHLAARNGHGAAVEALVSAAAPELSSELNAAGVSPLYLAVMSKSVTAVKAIITTCSDASPVGPNKQNALHAAVFQISEMVDLVLKWKPALSGQCDVKGSSPLHLASSDGDRSIVSAIVRAAPPSTAFLKDSDGLSAIHVAARMGHHHVVEELMSAWPDAAELRDGRGRTFLHAAAEKGHAPVISLAVKNPMLCGIMNAQDKDGNTALHLAVAAXRVPCKGLAALLSAGDNVRVNIMNNDGYTPFDLAANSSSFLSMSSDLLLETESGKKERKKRDMRTSREDTWSKISLVVTLSAYGAQSCPQRQDHLNQWRGNDTTDWIRKTSNSLAVVAVLVATVAFSATFNVPGGYGDDGKAVLQAKTAYKFFIVFDSVAMTTSVVAVILIVYGKASGSWKSFILALHFMWVSMIGMIVAFWAALVAVMRRRTINIVIYEVIINGIYVLVLSIMILTKPASWISFVKFMFSSLLPERHHRRVARQYPFAGTYSRNYSVFVVTNILAYVGAFLALSKS

SEQ ID NO: 175484 - protein, 55 aa, Oryza sativa
  unsure (1)..(55): unsure at all Xaa locations
  Clone ID: PAT_MRT4530_73324C.1.pep
HSSALLLLFSAFCFLARRAAADYSYWQSAHATFYGGGDASXTMGRACGYGNLTAP

SEQ ID NO: 175485 - protein, 199 aa, Oryza sativa
  Clone ID: PAT_MRT4530_73325C.1.pep
YGPIFRTNIIAQDMIVSLDPELNNLVFQQEERLFQHVRNLVLRLFGPENLRRAMLQEMQKRAQASLLSWLDRPSIEVKEEVSSGRKNVMRMLRELLDERKKKTAHQLESIDFFDALIDELKQEKPAVSENVALDLLFLLLFASFETTSSGITAILRFLTDNPMALEELTEEHDRILKRKADPNSQITWEEYKSMKFTSH

SEQ ID NO: 175486 - protein, 63 aa, Oryza sativa
  Clone ID: PAT_MRT4530_73326C.1.pep
PPPINKNKHFIQFLQEQGQNQPHSKAGPLGGKKITTWNTRNQGTHHINKTRDGIYFQGGGNSS

SEQ ID NO: 175487 - protein, 649 aa, Oryza sativa
  Clone ID: PAT_MRT4530_73327C.1.pep
MDLDKSTSTGASLKKLQEDGALPSHETMERELGGIEPEPILGRMVAVEDYILCGFLPLPSEFLLLVLNFYGLSLLHLNPNSIAFLSIFSDLCEAYIGVEPFLDLFHFYYELRWMEPKKIENSDPVFVVPEEQPDKISSWTTKPALAPSLQSFIDIIDGLRIRGLSGYEVAADFIGLNSETVERRVGQVMINGPTTASNVPIPLCEKGTAEREAAINDRIVIHVVQALPLTDVIGPLVDHQAAASLKEGVTQEVSDVAAAAAAATTSGSNIPKKGRKFSSVVCNRRKAPTPSAVLMAITAILHRAARAKAAQDGSGGNSSASLAAASTEVVVVPKSREATPSGSVGGLVPARGPLADILTWGELQIEMERILQAGARRIGREIEEAKAVVSSSVNERAKLARDLAEVHEDLQKMRELVVGNEQQRQGLEQHMSELENNLSEIRGSLWTTYTGLNQLAVECGVTTTIPANPDEFSLMTSLAKLATAMEEIPSKHAARIGEETSNGIYIGACHVLSCVRLAHPELDLQRILDQGAANDAHLESALADRDRRIQYWRTKFEVAELERTMVEVKKDRAVEALRGREVWFNSYLRSCCAVMAGVSRELQVPRGDPEESAAGYISWLNGACAQLEGIDKHIDEALKQECRRSSRYA

SEQ ID NO: 175488 - protein, 148 aa, Oryza sativa
  Clone ID: PAT_MRT4530_73328C.1.pep
MAMWRCRLCRCIRFTPRPLAMDPLVPLSSALDPLTGQRSVFLEKGGAMSSESSESSLSPSLSSVPRSPRSPTTPAFLHCYLRQSLSPLMTPSYAPSPALPRALPLFPASVVHPAAYSSRSSPRDSNRGRRDRCLEARGDGGRRDRGGE

SEQ ID NO: 175489 - protein, 355 aa, Oryza sativa
  Clone ID: PAT_MRT4530_73329C.1.pep
MSIRRFVYLVLEEFAPRRSNYTLRNIDMERFFLPRPSPVPFVASGTDAAEYASLPCPAMTFYPPFSKLPGKQQMEFLLLGGNHNMVVAADQTCRTVLYDPGEHAVRTLPALPYQLELPTASVTVGDDLYILDHVEVGNVPCFHGLIYEDRLNEDWCCCALPPPPPLLSHKSDFQVDSYAVVGDTDIWISTHDNGGIYCFNTVSHVWSTVATGWTLPFVGLAEYCQEHGLWFGLSHSTRDRRKRSLVLSALDLDSSHLPVLLSLPLEFTPPDALKLVSSYLVNLGSAKFCIARFFRTDEDHRDGEELFAVLTAVEVERCDDDEDDAGGGANGGGLRMLKHRSEMYKLTSEMMYWVL

SEQ ID NO: 175490 - protein, 91 aa, Oryza sativa
  unsure (1)..(91): unsure at all Xaa locations
  Clone ID: PAT_MRT4530_7332C.1.pep
MVSSRWDRPKVYPAGKAMGDVRRHNAACRLLRNITRQPXEVMANKVXRATGVLKNQEEGRRYAKRGLENYVLDWTSXITPCINKYYTRATK

SEQ ID NO: 175491 - protein, 79 aa, Oryza sativa
  Clone ID: PAT_MRT4530_73330C.1.pep
MSIFEDWADKFILEIDKVTRDTSLLTAWMVHHSAICISATVPLRLLEGTVEKNRETLVLSTRHLGHVDVEYPALAEKHP

SEQ ID NO: 175492 - protein, 102 aa, Oryza sativa
  Clone ID: PAT_MRT4530_73331C.1.pep
MSIELDQPVIGHRRQDGGSAPTFRPVSGGVGAGGGAGPTWSQATMSLPVEAKDSGMIRAMWAPDGGVGANGACGIPLDYKRRTSPTEKGDDSQRTGARRKNS

SEQ ID NO: 175493 - protein, 408 aa, Oryza sativa
  unsure (1)..(408): unsure at all Xaa locations
  Clone ID: PAT_MRT4530_73332C.1.pep
MHCSYDIAENKHAVKKALNHVIRRHVVNEYGWQDRDTTRIGYRNDKPVMVVLLEHFHSTHSIYHTHSTSMIAAREHFYLIGLGSKAVDANGQAVFDEFHLLEDDNMKDKLDHIRSIYKQNGAAVLYMPSVGMDLSTIFVSNTRLAPIQVIALCHPATTYSEFIDYVIAEEDYIGSEACFSETLYXFPKDALPYVPSGLAPKKVKYLQRENLEVVNIGIAATTMKLNPYFLDALKVIRDRAKVKIHFHFALGQSTGVTHPHIARFIKSYLGDSATAYPHAPYHQYLTVLHNCDMMLNPFPFGNTNGIIDMVTLGLVGICKTGDXVHEHIDEGLFKRLGLPEWLXIADTVDEYIECALRLAEKHXNRLALRRHIIENNGLATLFTGDPSPMGSVLLAKLNEWREQQKTVA

SEQ ID NO: 175494 - protein, 141 aa, Oryza sativa
  unsure (1)..(141): unsure at all Xaa locations
  Clone ID: PAT_MRT4530_73333C.1.pep
LXXLLXXSLTXXNXXDESRGAXXXPXXXGGPXXLFSXHXXEFXPPGXRFXSSLTGXTXFVTRXFQHXRHSXFYDPLAXVXXXGLXPFGXPAXGXDLQXGXGQXVXLXXXLXXXXSLXCXPHGASXPKXKXVXSXXXCPPFX

SEQ ID NO: 175495 - protein, 57 aa, Oryza sativa
  unsure (1)..(57): unsure at all Xaa locations
  Clone ID: PAT_MRT4530_73334C.1.pep
TKHCLGTHFISILKLXPIWHNGSLKTMHMPLXXYCIDDQGVCDHTRXLAFGQXNLAG

SEQ ID NO: 175496 - protein, 159 aa, Oryza sativa
  Clone ID: PAT_MRT4530_73335C.1.pep
MLTLQCSDCEKVDCVLPLANVSGWLLECWVPWWTGCVDVSASLCAVPVRAWADQLVSIVIVSRENGKTISSVFTCAVRCAVSRCVNWELQCGMEKNREQLETATACWLGSRDLSLPSSVAGLKAVSLKVRLGPMWGTVQCEGVFGGENGDYTIVKTRLR

SEQ ID NO: 175497 - protein, 61 aa, Oryza sativa
  unsure (1)..(61): unsure at all Xaa locations
  Clone ID: PAT_MRT4530_73336C.1.pep
TKSDGQSERRXQCLEPYMCCVTQSCPSKWASRLYLTEYWFYTGDHASVGXKTFHVLYGHTP

SEQ ID NO: 175498 - protein, 142 aa, Oryza sativa
  Clone ID: PAT_MRT4530_73337C.1.pep
MADDDYNDMDMGYEDEPPEPEIEEGAEEEPENNEDGPDEVVGAEAEDKEQEKTQRPRKTSKYMTKYERARILGTRALQISMNAPVMVELEGETDPLEIAMKELRARKIPFTIRRYLPDGSYEDWGVDELIVEDSWKRQVGGG

SEQ ID NO: 175499 - protein, 91 aa, Oryza sativa
  Clone ID: PAT_MRT4530_73338C.1.pep
MSDSNPGAANPALGPDADAAAGEGLELAQFAAGRFWSVELTYQRLPGVARTEVGYSQGHRHEPTPARAVLAGPCARLAGVPLHICRCACLL

SEQ ID NO: 175500 - protein, 272 aa, Oryza sativa
  Clone ID: PAT_MRT4530_73339C.1.pep
MAAVMHRSSSDGGSSSGWSEAAAASAAGDERAGWEVRPSGMVVQAREEGPGGGGGGGGGMGIPPRPPPPEIKVRVKYGAARHEVAVSSIASFGELKKLLAARTGLPAADQRLTYRGKERGNADYLDVCGVKNRSKLYLAEDPTSVERRYIERQKSAKIETANRAIGAIALEVDKLADQVRSIEKSITRGSKVAEVQITTLIELLMRLAVKLDSIHAEGDSSSQKNIQAKRVQKCVETLDVLKISNARLQNVIVTTKWETFDAPATTQWELFD

SEQ ID NO: 175501 - protein, 33 aa, Oryza sativa
  Clone ID: PAT_MRT4530_7333C.1.pep
TVKKAFIPKSWEVLKELLLKGYETENETFTILL

SEQ ID NO: 175502 - protein, 45 aa, Oryza sativa
  Clone ID: PAT_MRT4530_73340C.1.pep
YYERLLSDADSSITKYYHNCRVHQRHFYYADGSQRRTHTSSYIID

SEQ ID NO: 175503 - protein, 187 aa, Oryza sativa
  Clone ID: PAT_MRT4530_73341C.1.pep
MSDSNPGAANPALGPDADAAAGEGLELAQFAAGCFWSVELTYQRLPGVARTEVGYSQGHRHEPTYRDVCGGGTGHAEVVRVHYDPKACPYEVLLDVFWAKHNPTTLNRQGNDVGTQYRSGIYYYTAEQEKAARDSLAEKQKEWKERIVTEILPATRFYPAEEYHQRYLEKGGQSAKKSCNDPIRCYG

SEQ ID NO: 175504 - protein, 1097 aa, Oryza sativa
  Clone ID: PAT_MRT4530_73342C.1.pep
MATAGVVVEEAVRRYAGGKPAALLPALLGLLSRQQPSSGWARALASQLHADVAKRPLSAAASNSLLCYYLRSSRLDLALHHLRCRSTPRDSLTYNTLLNHLPASSSSSTTFRLFRFAMRHAHAAFHPNIASLLSLLRASSSYSDHFLHMIHAYLLKTPASIHTPVANSLLSLYATLGDFASAAILFGEMPDRDVASWTSMIGACLGSGYADQALRLFREMLADGALQPDGVVAVVVLRACAMLEDVRAGASVHAVATRRGLQGDLFVDNSLVDMYAKCLDLRSARKVFDLIAVKNVVSWNTMLSGLVHAGSYPEALHLLALQIGVVGDETTLAVLLQLCKKKRLGGQAARSVHGAAIRRRLLSMALLNALLDAYGKCGLVEDVLRLFQGMRERNVITWSTVIAACAHNARPHAAMACFVAMLVTGERPNSITVLSLVEACGSCAEMWASRRAHGVAVRSGLGFELAVGNALVHMYGKCGELGASARVFDTMPVKDVLTWNSMIGALGMNGRARDALALLHRMEAEGDEVRPNGVTMLAALWACAHGGLVEEGIGCLESMARQSLQPRVEHVSCVVDMLARAGDLDGAAEIVRRSSGGGSPAAWSALLSACRRRGDGGGGEVGRSAAARVLELEPGKSAGYLMSMGMGLGKGWAAGMRWAMREKGVKVESGHSVVQHAGGSERDLRPGGVRNELILLALPAVLGQAIDPLAQLMETAYIGRLGALELASAGIGVSVFNIVSKIFNIPLLSIATSFVAEDISKNASKHSSSGKLELSSVSSALVLAAGIGTIEALALFLGSGLFLKLMGVSPASPMHKPAKLFLSLRALGAPANVIMLAVQGIFRGFKDTKTPALFIGLGNLSAVVLLPLLIYVFRLGITGAAISTVASQKRKDYRRVDGVGTVTASIFYRYVDQLVIDRAFIHGPCPFCPLMNGLFRELLFSILFRGGMLLGRTLSILLTMTIGTSMAARQGPTAMAAHQICLQVWLAVSLLADALAVSAQAMIASSYAILDYKRVQKIAMFALQFVCASQPINALAFIFDGLHYGVSDFDYVAQATIAVGIMSSLVLLYAPSVFGLAGVWAGLTTLMGLRMASGILR

SEQ ID NO: 175505 - protein, 283 aa, Oryza sativa
  unsure (1)..(283): unsure at all Xaa locations
  Clone ID: PAT_MRT4530_73343C.1.pep
MSNLLKAKSWVPEEKAAATASDEQNDKIKKVRELLGSQMTAEMPSFLSDATIRRFLRARNWSTEQATKALKETVKWRRQYRPDTIRWEDIPGREHEARRTYIADYFDKNGRIVFISNPTIKSKSSIKDQIKQLVYXLGIFAMHSENMEDECTVWLTDFQGXVLTNTPLPVXRECTHIIQNHYPGLISVAILSNPPRIFESFWKIVCYFXEPKLXEKVKFVYTNNPESXKIVALQVDLDKLESAFGGRNTLPFDMDKYAERMKRSDQMRGAPMHANGYSCSTQT

SEQ ID NO: 175506 - protein, 118 aa, Oryza sativa
  Clone ID: PAT_MRT4530_73344C.1.pep
MVKGHGLVALQIHPFTPLRRHGLHRHHHSGTGTGVMARPPPASHSTPSERRFATAESTGSVLGPSPAATGSSSAPRPSLPRQARRPQEGGTSRQVRSQAHAPRRPKAELARRGYAPTQ

SEQ ID NO: 175507 - protein, 163 aa, Oryza sativa
  Clone ID: PAT_MRT4530_73345C.1.pep
MVKGHGLVALQIHPFTPLRRHGLHRHHHSGTGTGVMARPPPASHSTPSERRFATAESTGSVLGPSPAATGSSSAPRPSLPRQARRPQEGGSGISPGEIDVRAELGQERCPQCTRLAFSAPRASSLRRSFALLSLGTSRQVRSQAHAPRRPKAELARRGYAPTQ

SEQ ID NO: 175508 - protein, 485 aa, Oryza sativa
  Clone ID: PAT_MRT4530_73346C.1.pep
MGGGPSRLGLPRLLMVVALVLLPLCGFGVHGRNHIHKKPHGGGGGGGRQHRGGGTVVSSPAVPPADEQTQPPGIVPSDPVIPAQPEQCVFDVRAFGAVGDGTTDDTEAFRAAWRAACAVESAVISVPSDGTFTITTTTFTGPCKPGLVFQVDGVLMPPDGPDCWPPSDNRRQWLVFSNLDGLTLRGAGTIEGNGEGWWNLPCKPHRGPNGSTLRGPCDSPTLVRFFMSRNLVVEGLRVENSPEFHFRFDGCSDVRVDGLSIRSPANSPNTDGIHVENTQRVAIYNSMISNGDDCISIGTGSYDVDIQNVSCGPGHGISIGSLGVHNSQACVANVTVRNAVIRNSDNGLRIKTWQGGMGSVSGINFDTVSMENVRNCIIIDQYYCLDKRCMNQSTAVHVTDVSYANVRGSYDVRAAPIHFACSDTVPCTNITMSEVELLPFSGELVDDPFCWSAYGLQQTPTIPPIYCLQDGLPDSLLDNPDLRCR

SEQ ID NO: 175509 - protein, 39 aa, Oryza sativa
  Clone ID: PAT_MRT4530_73347C.1.pep
MDEITYEIEEIEDAGYELITYGKKVKRKQRSTMTDHAVE

SEQ ID NO: 175510 - protein, 78 aa, Oryza sativa
  unsure (1)..(78): unsure at all Xaa locations
  Clone ID: PAT_MRT4530_73348C.1.pep
SLHPPHSPPDRRPTEDRPTHDSRLVLXENVGELGLLARGARARLSSHFTFCGGYKKSVSLFHCFPASLVCNVGVSSRL

SEQ ID NO: 175511 - protein, 142 aa, Oryza sativa
  unsure (1)..(142): unsure at all Xaa locations
  Clone ID: PAT_MRT4530_73349C.1.pep
MTRRCRLPSGRSSPWDSPRRSGPPRALRPGPGGATAPPWAPPGRQEPPGIQASGPGPAPWPEARRSXKPGGANHRALEPPARGKPARPPKPNPRQPGEAGAPRSQPRPPRPHGQKLPGGSSKLVRSDHRRRRREPEKWELVS

SEQ ID NO: 175512 - protein, 51 aa, Oryza sativa
  Clone ID: PAT_MRT4530_7334C.1.pep
VSSLALETEKQAQNFKTSSSIHSTANFSQAYNRYLLLEVTYQYIHESLKLW

SEQ ID NO: 175513 - protein, 238 aa, Oryza sativa
  Clone ID: PAT_MRT4530_73350C.1.pep
MRNSSRSEGDSQIILEMEEIYTVEDSELKKKKKNGKEIQNTPMAEDSGALSVITLVMFFSSENKDEDEEYVFYIKQGGINVNIWTKIIRHVTKYTSGQSDTITRFGGPTCQSKPPKIESSQSCSSGQPENTTDDTDEANTNNSSSSGTNGLTPNTTGNTRELGRNLNLHFTSTSPSELAELYIYRARPWSPSPCGSNTSGDLGLSRQGISKANTGLPYANERGPGPTTGSSRIFEKSA

SEQ ID NO: 175514 - protein, 123 aa, Oryza sativa
  Clone ID: PAT_MRT4530_73351C.1.pep
MKREEAERPWVAARVGATADGSGSGWQAVAAGGSGDSGQQQLAAAARRQSTEAAGLALPARIRRRRPFLAQPRTDSVGGSAMINGSGKQLGGAPLARIRRRLLSLTRLHHDPAGDNGRSPAPR

SEQ ID NO: 175515 - protein, 109 aa, Oryza sativa
  unsure (1)..(109): unsure at all Xaa locations
  Clone ID: PAT_MRT4530_73352C.1.pep
MGALKQVSNLVLIDEMDKQSKSYTRLLVTTNAVSIPVGLKTSFFITSNDVAHSXAIQGLGLKIDAIPGRINLKTVIASKLGLYSGMCSELCGIEHGFMPISLQVLTLNK

SEQ ID NO: 175516 - protein, 76 aa, Oryza sativa
  Clone ID: PAT_MRT4530_73353C.1.pep
DVVLSGDDSTPLVVMTGLTSDFTASIPWLKLGSLHESGNGRSGVKPKSMMEHVEISKPSNTESCTRKKDVTELHVW

SEQ ID NO: 175517 - protein, 203 aa, Oryza sativa
  Clone ID: PAT_MRT4530_73354C.1.pep
MVKSPARQGTAHKPSGRHGLIGTSCRAVLAYGLHLPPRHGTPAVGPCRASSKARENRSEDTLGALEVPLALSYAVRPRPASKMGLLSFHPENVQHPGRSALKKTQAFMCFHNHHAPKMINVYIINILAKAGHSSRVFKNEPRSWPLLINSIIEEARIWVAAGIELPPAALKEYITFTEKARNSYINRRKREKYEPLNHDVSVL

SEQ ID NO: 175518 - protein, 94 aa, Oryza sativa
  Clone ID: PAT_MRT4530_73355C.1.pep
METEGIAVSFQELGGDRDRKLQCAGEKPVGRRKRNHEVLTIAESEKKHMHCDDFRKKGARMLTDVVLRRPELNGELGLAGSWRARLEQLGPVAN

SEQ ID NO: 175519 - protein, 174 aa, Oryza sativa
  unsure (1)..(174): unsure at all Xaa locations
  Clone ID: PAT_MRT4530_73356C.1.pep
PLADMIADVMREHFGLRPKDSGIIYRHPYPEYFDRVPLPNRYKIPDCSKFLGLDNVSTYEHISRFLAQCDEASAVEGLRVRFFPLSLSGSTFTXFSSFPYNSIRSWADLEKQFDKYLFSGVQEMKLSDLTATQQKVNESVPDYIQRYRXNRCYSLNLIDSQIXLADLAFQGSIV

SEQ ID NO: 175520 - protein, 171 aa, Oryza sativa
  Clone ID: PAT_MRT4530_73357C.1.pep
MAAAGSSSRFAVTCGLLSQYMRERQQPQPPVTVLEAVAEEEEEEDARTMQLFPPRAAAADGVATPSAGTAPLTIFYDGRMVVVDDVPVEKAAELMRLAGSACSPPQPAHAAALPEMPIARKASLQRFLQKRKHRITTTSEPYKKAAVASPAPEKSFAVAPVKDEPATWLGL

SEQ ID NO: 175521 - protein, 751 aa, Oryza sativa
  Clone ID: PAT_MRT4530_73358C.1.pep
MVDIKQTEVNPENIIPITKDQLTLEQKVEYEQMMNNLQNRFLHSFVQTRSGTVIQRYKLKVPSNDDLESSTSKDGKPKDDKPKDEKPEEEEPQEFRNLQDQIDYVVHHALINQSGVLVNTLTNMINSVVDEDNDPEVAAAEWARNMKVVMCQLVKSLGKDERYDFDITKADKIFDLLLWEKQIQLPAGHSIPSADELGKRKYCKWHNTRSHTTNDCKVLRQQIQSTIEQGKIKFDDSRRPMKVDEYEANQVDVDVMEETFTKLALSPEQAIFEKPEGTENRHLEPLYVKGFVKEFDSMARRRASIVALREGVVEGSNFYTKDTVDDLDGKLGQGFMSADDLEEVDIGPGDRSRPTFISKNLSSEFRTKLIKLLKEYRDCFAWEYFEMPGLSRSIVEHWLPIKPGYRPYQQPPRRCKADMYDAIKAEITHLYYVGFTRPSRYAEWVSNIVLVIDKNDKLRVCIDFRTLNKATPKDDYSMPVADQLVDAALGHMIISFMDVVKSKEVDDHIADLRKVFDRTRKYGLKMNSTKCAFGVSAGQFLGFLVHERGIEVTQRSINAIKKIQPPEDKKQLQSLIGKVNFIRRFMSNLSGSIGLVIISPRAASFEFAYTIKPYATNYQAEYEAVLKGLQLLKEVEADAVEIMGDSLLYLKDPSQSASRKLRYKALKYALLDDELYYRTIDGVLLKCLSADQGKVVMGEVHEGICGTHQSAHKMKWLLRRVGYFWPTMLKISSDIIKVVKIARNSEQYKEH

SEQ ID NO: 175522 - protein, 124 aa, Oryza sativa
  Clone ID: PAT_MRT4530_73359C.1.pep
GNGGVVALWNVEWSRWGRAKGKGRRTKRVWGICKPSTENTADDKKRFQQQFDGQESCKNGAKKEHNPRIMFGHLKRVATHPHAHSLCSSPHDPKTIVIVALPRADVVGEEEDEMIQRAQAKRQS

SEQ ID NO: 175523 - protein, 710 aa, Oryza sativa
  unsure (1)..(710): unsure at all Xaa locations
  Clone ID: PAT_MRT4530_7335C.1.pep
LQHTLKQDLISLSTSCVFLGYSTSYKGYRCLDLSTRRIIISCHVVFDRSQFPFAATPPVALSFDFLLQGLPPALAPSSEVEQPRHLTVAPSMEVEQPYLPLFGRRLPNDTVTTASGTRLARAPLIGASSTGATPSTSATRAGTIVSPFRHVYTHQATMTVSSSSSTDVVATAVAPQPHSMVTRSQTGSLRPVDRVTYTATHATASPVPVNYRNALADPNXRTAMADEYKALVDNGTWRLVPRPPGANIVTGKWIFTHKFHSDGSLARHKARWVVRGYSQQHGIDYDETFSPVVKPATIRVVLSIVASRAWPIYQLDVKNAFVHGHLKKTVXCQQSSGFVDLAAPDVVCLLQKSLYGLKQAPRAWYQRFATYIRXMGFMPWASDTSLFVYKDGDRITYLLLYINDIILTASTTSLLQQLTARLHSEFAMTDLGDLHFFLGISVTRSSAGLLLSQRQYVVDLLQRTGMAECHSTSTPVDTRAKLSAIDGMPVAHPSEYRSIAGVLQYLTLTRPDLAYVVQQVCLFMHDQRKXLVKRILRYVKGNLSTGLHIGFDTIQTLTAYSDADFQSCYTSACGVPNYCLFAGNSIVQSKKILILSIPTLNGDFVYRSVXSVVQECCMLRNPFLEGAPLMKSSPVDIAEXKSAIYLTKDQMFQERTKHIDIKYYYIHDIVAXGKLKVCKISTRDNPADMMTKPVPVAKIEHCSSLVSTGV

SEQ ID NO: 175524 - protein, 60 aa, Oryza sativa
  Clone ID: PAT_MRT4530_73360C.1.pep
KKREKIRVIPIFKALKNKNQLPVCVSSLCGEVTKLPFSMLFIKQFFSLFLYPKKFWAFFS

SEQ ID NO: 175525 - protein, 698 aa, Oryza sativa
  Clone ID: PAT_MRT4530_73361C.1.pep
MDGYKYLVHGESKQKIKLLRPRYALYLNVTDENLLVTLDKIWRSDGPVLQSANSVHGDDCKDLCLAFSMSRFLRCRLEDVRLDADSLSMSRNLIVTRILHVDQNPARVFRIMELEISFLKDYFYTLYPIVFWQGLASLSLSVLQSLAALGLALWLASGVNRVKKDLPDPVNVVHGHNVEVTITWVFMSFMMFKEIWEMITYLLSDWTRLLLVCEYTRSRCRWIRNATMEKLLSSFLTLSSFLSRKIFSDPWHGYIDQYDFLQSFDYSPSLWNLMYRATLGVIKERVKGQKPGTAIKIPECVKPAILQALRSMDLAGLGGRELPRDVPSLSAARLLEDFRWALLDLYTCSQVILVWHIATSMCEIKLARDRGIDLSKPGLLRSAFTYLKIFLCGCCCTPQPYLVAENILGDDQLRTSYIVANSLSRYCAHLVYDKLNGLFSPEAAELKKLNGTIVEKGAVLGRQLLETIPDDQQRWQILAGVWADLLVHIAPSWNAEAHKICLEYGGELITFIWGLLWYCGIEKSSLWRDQDDAPGDANVQPQPQPAAEEPQGGHNVEDDAMVEDAQNGIEAREAGVQNQPAEQVLQQAAEADVEIADEAREDEPEPGNDIHAQSAADMEITDEAQEGESEPGSNVQTSAAGVEIIDEAQEEESEPGNNVHTPFSADVEIADQAQEEESESSNKAQSAAGVQIADEAHQ

SEQ ID NO: 175526 - protein, 679 aa, Oryza sativa
  Clone ID: PAT_MRT4530_73362C.1.pep
IATVGHAASHNNGLVDTKRDTARALAVSKSETALLRGPPPRSGFASDDRRYRIAGDYKSFKKTVARLEEAAVSCRGGERVELLRRWLGALQDIEAELSGSDLKDPEDRDPSSETDISKAPLALFYDADIEGGPMNFRDVFLYSQALEGITLSMVLEAPSEEEVSLLLEIFGLCLTGGKEVNKKIMDTVQDLAKALSNYKDEVLVKREELLEYTQSVISGLKRNADIMRIDAETLELWKKLDEKEKSRAQITEDQDKSSGNISVENIEDQFSRLLENTNRSLIMRKFVIDKLKILADSLANSSSKAEQRILENRRQKEDALNFRVKKENEVSTVEKEVLDEIAELEKQRDELEAQLKKVSLNMEIAIQDLAYPIGDRDTKSLSMIKMVNISLNAAAGRLKKTREERDQFDEANNQIIFKLKTKEDDLSKSIASCNVEANVVKTWINFLEDTWQLQSTYNEQKEKKTCDELERCVSSFLKLTKHHLSVFKEVLSPSIESIRTYVDNLVVLNSREETKQDEDDEASEKTNPRISLEEEYLETEKKIIIALSIADHIKKLFYSEQWANSRRDDPEVKNLIAEIEKLRGEFESIERPMLSIEANKSKPLPEERSELSPSPIQAPATPKAAHVDSPKSPMKPEQHLNPDNELANLGAELGSEDRDFSGEEINGWEFDELEEDLKN

SEQ ID NO: 175527 - protein, 131 aa, Oryza sativa
  unsure (1)..(131): unsure at all Xaa locations
  Clone ID: PAT_MRT4530_73363C.1.pep
MAAYATHIFGLSALIALTANDNTVINTMQYFPPTLHMRTMDPSRHNMMRTVXMCTSTVMYXSHAMLLLNQQCCMQLRSMMXYASIVATYCHMMYIMHXVICAGLTQPHMMNMLMHMPYMCNMHPDNFRLSS

SEQ ID NO: 175528 - protein, 123 aa, Oryza sativa
  unsure (1)..(123): unsure at all Xaa locations
  Clone ID: PAT_MRT4530_73364C.1.pep
QFPSILYKQCNKTVTNLQFTTYHTYHGTRSTKRYINAYSLQLLRHMCTHADVCDATMVPSRAQLLPCVLLCFCMCLLLHRTEHVVRPWXPEHGGFLLLHCLYHLRRRVHVHHPVAVAARAWYL

SEQ ID NO: 175529 - protein, 113 aa, Oryza sativa
  Clone ID: PAT_MRT4530_73365C.1.pep
MAAPRAKLAERLAERADHNGAPTPVQQSKQTVHPSRSTTPLLASPDHRNAPSPTLTPAACRDSGMSTWVLWPTSSANNHHVRWPGSLLHVDVIQSVASTSNKIHIDNIAKVSI

SEQ ID NO: 175530 - protein, 51 aa, Oryza sativa
  Clone ID: PAT_MRT4530_73366C.1.pep
MLDPHIEGQAPKHLKNKLGEKSSGRTFTPRLSTLQDTTPGFSNESENEPHE

SEQ ID NO: 175531 - protein, 89 aa, Oryza sativa
  Clone ID: PAT_MRT4530_73367C.1.pep
MAGKRTISRRVAAGVKRGERSSHRDGGDLIRGQRTLQKEAVNMRPTATMTMASIGYPVHRLGRRYINPDPYIGNGQCQKARDYIWFSIV

SEQ ID NO: 175532 - protein, 422 aa, Oryza sativa
  Clone ID: PAT_MRT4530_73368C.1.pep
MRIRRAASRLLGSASAAFSAQAEAPPVIATATASELPPPPAPAAADAAAAVDVGLAGPEGPCEQSLSPWDLPCELLDDSTDSQNLQEAPFDKYLVRIPRRASFVLNSELELEDDTMESKDKIWNHDDEEEEVKNQKPAAHSLKKDGAVRKRSRKGNDEPILQEEELDMVMKTEESEDKEATIWFCKKNDGKKWHCRSIVDRPNALCDYHLARSRSSYTPSSENGASATAAATCSSGPTKADAIGKIKAPPAKSSGAKRNSPGGAAASSSKAAAATATAPSSSKASSSSSVSVTVPTSSISQRRKRRKKSTNGSGGDYYFYDLFGPFRGKDRRNHGVVSASEEDHKGLLKAKEKMEYIDVDNLSNNSSITGGGDKENDEDYVVGGAGKARAEKRKGKIAVEKMPFPKMVKKRTVKERSLKSLL

SEQ ID NO: 175533 - protein, 943 aa, Oryza sativa
  Clone ID: PAT_MRT4530_73369C.1.pep
MGLPTLALTQAPASLRGFGGEAVLVLGQVQLMVAFGMEENRREKQILFDVVDIPYSYNAIFGCATLNKFEAVSHHNYLKLKMPSLTGMIVVKGAIHNVEAKPHDRARHTPKPTPHGKVIKVKVDDADPTRFVSLGGDMGEREAENILEVLKKNIDIFAWSPDEVGGVSTDLIMHHLAVKPEAKPSKQKLRKMSADRQEAAKAEVQKLLKAGVIQEIDHPEWLANPVLVRKLNGKWRMCVDFTDLNKVCPKDNFPLPRIDQLVDSTAGCELMSFLDAYSSYHQIHMNPADIPKTAFITPFSTFCHLRMPFDLRNAGATFTRLVYKVLYKQLGRNVEAYVHDIVVKSRKAFDHASDLQETFDNLRAAGVKLNPENAIKSQVLVDFVAEWTPAFSPEPEPVEQPWVMYSDGSWSHKGAGAAAVLTLPRGVPIWYAARLQFDTTNNTIEYEAVLLGLRKAKELGVRRLLIRTDSKLVASHVDKSFETKEEGMKRYLEAVRSMEKCFAGITVEHLPRGQNEEADTLAKSAACGGPHSPSIFFEVLYAPSVPTESLDIMAIDQAELGEDPEDWRTPFVKYLKNGWLPEDEAEAKRLQLRATKYKLVSSQLYRSRVLQPLLHCISFAEAEEMAKEIHQGLCGAHQAARTVASKVFCQGVYWPTVLKVCVEQAKKWGLDIIGPSPVARNGYKFAIMAIEYFSRCIEAEPLSAIISVAVQKFVWKNIVCRFGVPKEFIADNGKQFDSDKFREMCEGLNLEIRFASVAHPQSNGASKRSDGKILEALKKRLEGAAKGKRPDEMLSVLCALQTTPTRPTKFSPFMLLYGDEAMTPTELGANSPRVIFSGGEDGREVSLELLERVRVEALEHMRKYATSTSATYNKKVRPTELLPGHLVLRKKANPVAVGKLELKWEGPYLIKYRSRTGSFHLATLEGEEFNHSWNAASLKRFYV

SEQ ID NO: 175534 - protein, 204 aa, Oryza sativa
  Clone ID: PAT_MRT4530_7336C.1.pep
MVTSDEDAKKAYADFEKKVKRTIYIDHLSPQVTSSVIKAALAQCPNVVDVEFIVNYTVPYDIPSAALVELDDEIQAKAALDLMNDFPFIIGGMPRPVRAICAKPEMFRERPPHPGIRKEFRWVKQEDGTEYQGMKKLRILAKRQEVENMALIKNQLEEEKELAKQQQELLDGNYNKYDMLENVVQNGNMKSLAQHYGVSLADEF

SEQ ID NO: 175535 - protein, 47 aa, Oryza sativa
  Clone ID: PAT_MRT4530_73370C.1.pep
EEEARMLYQDLDSIPQETAAADHSAVCRTIFDKVVAIAISSVDGYDT

SEQ ID NO: 175536 - protein, 36 aa, Oryza sativa
  Clone ID: PAT_MRT4530_73371C.1.pep
RQDSCNFLEFTKTKSWVLGYSIAQVMGTAYVPFGHG

SEQ ID NO: 175537 - protein, 117 aa, Oryza sativa
  Clone ID: PAT_MRT4530_73372C.1.pep
TSRSQNDRTSGRVVGDWVNYSHALRWPRAWISFSPTSFVGLFYFRRVIDICLRFHCIAAAVYSLALKHGISPTFVLRSNGDKCMLSLVSGVNCEVCVCLNVLLVDGVSQRGVHFYCL

SEQ ID NO: 175538 - protein, 62 aa, Oryza sativa
  Clone ID: PAT_MRT4530_73373C.1.pep
LGLLHILVVVVEDPALARKSKVGVWVQLWSHVAPFGCQSAASLADQVEHTHLFFPRAVHGAA

SEQ ID NO: 175539 - protein, 253 aa, Oryza sativa
  Clone ID: PAT_MRT4530_73374C.1.pep
MGVAWSSRAAAKLDVRVAVIGDHGTGKSSLVATIATGRFPDQDDGVARVLPPARLPVDYFPARVPVTIVDTSSRPNTLERITTFWLPKIRRLLQSKVPVILAGCKVDLSDKQQQAGLENVLDFIMCTFREVEIYLECSALHRIKVDEVFYCAQMAVLRPTTPLFDKATRSIKPRCMMAFQQIFSLYDRDKDGAVSDAEMNAFLVRCFKVSLQPAEIADMKRVVQQHMIGCVNDNGLITFIGFLYLHVVFIAKG

SEQ ID NO: 175540 - protein, 208 aa, Oryza sativa
  unsure (1)..(208): unsure at all Xaa locations
  Clone ID: PAT_MRT4530_73375C.1.pep
VGWQGISXILDGMCGTLXTGSVASVENAGLLALTRVGSRRVIKISTLXFMIFFSLFGKFGAIIASIPLPIFSALYCVLFAYSAAAGLCFLQYCNLNTLRTKFILSISLFLGLSIPQYFREYEVFYVFGPVHTHSPAFNVIVNVIFSSPATVAAILAYLLDCTHTYWDGPVWKDRGFHWWEKFKSYRHDPRSEEFYSLPYGLSKYFPSF

SEQ ID NO: 175541 - protein, 117 aa, Oryza sativa
  Clone ID: PAT_MRT4530_73376C.1.pep
LLRNMMTWPCVMCMENGFLTDDGVVHTVFDGNGQKHSTLRKRQVNLRTLSKIDLDSPDTARSSSALPISASSKRNGTRRWKRSLSESFRSRPRSAPSLVELTPKHKGSAVPEVAPDK

SEQ ID NO: 175542 - protein, 474 aa, Oryza sativa
  unsure (1)..(474): unsure at all Xaa locations
  Clone ID: PAT_MRT4530_73377C.1.pep
MAPVKAEELVAFVPKEQYDGVDYCITSPPPWLTAVLLAFQHYLVMLGTTVIVATILVPLMGGGHVEKAIVVQTILFLAGINTLLQVHLGTRLPAVMGASYAYIYPAVAIILSPRFAIVVDPFERFVYTMRSLQGALIIAGVVQAIIGFFGIWRIFIRFLSPLAAVPFVTLSALGLFYFAFPGVAKCIEVGLPALILLLLFTEYAAHFFARGSFLFGRXAVLATVLVVWIYAEILTAAGAYNERSLVTQFSCRADRSGLIHGAPCIASIVFVLLLRRGRVRFPYPFQWGYPIFFADDCFVMIAASFVSLIESTGTLMAVTRYAGATFCPPSVFARGVGWQTYTWFLHETAAAGLCFLQYCNLNTLRTKFILSISLFLGLSIPQYFREYEVFYVFGPVHTHSPAFNVIVNVIFSSPATVAAILAYLLDCTHTYWDGPVWKDRGFHWWEKFKSYRHDPRSEEFYSLPYGLSKYFPSF

SEQ ID NO: 175543 - protein, 513 aa, Oryza sativa
  Clone ID: PAT_MRT4530_73378C.1.pep
MVWREGKNWNHHGNRNWGSSGGGFREQEEEDFYHGAGRSEGGRLGFQPGSGIGAQRDFGNLQQEYGRFRQGIRPRGSRSFGARRGGFGGRPGRSGFGGGACFSQGGDGPAGTNRNNRGEVGGLSGKEGHNSKVTREGAGKELVGGARSSNGSGAIHNDIGSEDTKGKKKVVMVEDSGIIGLGYDPTLFEDQKCVVDDVRSVAKVIGCSKCAQKGHVVADCTIEVCCDICNSDSHVNHRCPILKIPKPSVQAVGYAVEGLGFNHIPHTPLQRSKKGTKMALVKKEEGCLLPKVWIRVFGLRKRLREYLTLWVVGSLVGATQLVDMKTTRKSDFGRIFVAVLDPTIIPRKLDVVIGDHYFELKFEVEKKGFDENGEEVEFMQEGGGDGDGSKDNEKDMRDEEEEEEGRSPKRARNDDMVVEGKEGGNGDSEEAMSNGRGEREYEEVFLGGIADEVIDVAMEKVLGEIFDNIEVEGDGREDGQKRKRREEEGAGKEEKVVQLASVKEVLLTPKRAS

SEQ ID NO: 175544 - protein, 161 aa, Oryza sativa
  Clone ID: PAT_MRT4530_73379C.1.pep
MASSVSFMATAMAMACVLLAASSSRTCYAARMLADTPATAAAAAAPPAALPVLPAVPALPTTLPPMPAIPAVPQAALPPMPAVPTVPAVVPNAAALPPMPAVPAIPAVPKVSLPPMPAVPAVTLPPMPAGIPAVPAVTLPPMPSIPTVNVPMPFQAPPPSA

SEQ ID NO: 175545 - protein, 106 aa, Oryza sativa
  unsure (1)..(106): unsure at all Xaa locations
  Clone ID: PAT_MRT4530_7337C.1.pep
MVTSIDNVRGLNLAISSSAFIGSSFIIKKIGLKKAGDTGVXGGFSYLYEPLWWLGMITMILGEVANFAAYAFAPAVLVTPLGALSIIFSAVLAHFVLKEKLHMFGV

SEQ ID NO: 175546 - protein, 63 aa, Oryza sativa
  Clone ID: PAT_MRT4530_73380C.1.pep
GSGGMDHAFAMHWVCMLLPDGTLLRCCFKDRIVRHPDHQSQRRDSGCCLVYIGGIPILQMRSQ

SEQ ID NO: 175547 - protein, 281 aa, Oryza sativa
  unsure (1)..(281): unsure at all Xaa locations
  Clone ID: PAT_MRT4530_73381C.1.pep
FTGPVPTNLKNLTKLAEFHLANSNLTGPLPDLTGMSSLSFVDMSNNSFSASDAPSWITTLPSSLTSLYLENLRISGEVPQSLFSLPSIQTLRLRGNRLNGTLNIADFSSQLQLVDLRDNFITALTVGTQYKKTLMLSRNHIAXSERRRALKATGQSNPALPPYKTTSNXPGLAPTCLSTQQLSPTCICSVPYRGTLFFRSPGFSDLGNSSYFIQLEGTMKAKFLNLSLPVDSIAIHDPFVDTNNNLEMSLEVYPSGKDQFSEQDISGIGFILSNQTYKPPS

SEQ ID NO: 175548 - protein, 147 aa, Oryza sativa
  Clone ID: PAT_MRT4530_73382C.1.pep
HEGLKSLGSVIMEGNPHPGAAKGRMSFAQNHRTSAKVAQEATGGQQSQWASRSNTRPDGPRTSRTDEVSRTRFSDFNIDSSESISLNELKRKQPELEMETPPSHRQPKTTGKSIDGDSSSQSNGRGSHKSNKREKLDWNLLRPRKSK

SEQ ID NO: 175549 - protein, 933 aa, Oryza sativa
  Clone ID: PAT_MRT4530_73383C.1.pep
MESMNAFLFKIADANEDNDPQVRAWLNQVRDVAVRSEFFVDRYVYCLDGTHDAGCCGPLRHFARLLATILARHRLATHIRDLTARARDVGERRMRYGVIDMWMWRPGPARQMIIPISQPERRPEQELDAIPDQHRPRAIDSRPFGELDQPEAAIPGEPVPAREQQHQRAASEHEDLERRRILADDDSDLLTEVSKELLDRIPLMDQYVHFLQHREPNVISILGLRGTGKTILARKVHDMYGQYDPDCSRTAYWISLGDDQSSKKVLESILVSIAPNVPGVENVSSWEQGSILGMIIRRLNDTRFLLVFDDVRSESLMSDIGDIVRCNCYAGSAILLVTSIPQVAATSCNPQNIFDFNDFPEQHKESLINFFLERAVSLVANSQQNDLLEVLKSILTRCAPSIFTMKMLLRCLFVNPNRNIEELRDLNNSLQPSSALNANSMLNFCYRSLPSHYRHCLAYLAISPRNHTFRRTSLTTRWLAEGLISRTDVTSASEEPSDVANRCFDALCNHRFLLPAGDFTGTSFWGRFKSCTVHGIVRDFLSTIMEDEGVVDEDLFPDMAKRISIQNEFLHACRDRSLVESLATHPGLHLINVLDLEGCSGFQAKDLKVICTRARHLTYLSLRDTGIYHLPKQIQELHNLQTLDIRQTNVRVLNVVFPRLKYLLAGKEAPSGESFSTVKMPDISFMTDMEVLYHVEISSQDDGLIDLGRLRRLRKLGVVFNRGRVDLMKFLLSQIQMLESCLRSLSIRIIEGATGSEAENSGSGYSLIDSHMLSPPRLLQTLNIRGARGGLPRWMTELHQLAKITLRETYLTEDALRMLGSLRGLQCLRFLRKALTEGTIIFRDSEFKKLVDLSFEGSYLSTVIFDNGTAPKLERVAFKVPRVASLHGIQHLPSLKELEFIGNLCEEHIVKKAIAEHSNHPHYTYLDIDIKGS

SEQ ID NO: 175550 - protein, 141 aa, Oryza sativa
  unsure (1)..(141): unsure at all Xaa locations
  Clone ID: PAT_MRT4530_73384C.1.pep
PLPCPPPPAPSPSXPLPLPRCHLAPPSRLPPAPPSRLPLVPPPRPPPPLPSAVAADPSRCHLRFQPSPSPXPPPPLPLAPPPPPPPPPSRRRLWAPPPPPSRCYRHRVQPSLPPPPLSPSPSAVAAASASLRCCCCCRALP

SEQ ID NO: 175551 - protein, 289 aa, Oryza sativa
  Clone ID: PAT_MRT4530_73385C.1.pep
MSSRTSRAVQNNQPSGFAPVVEPPESSIAMLVSMGAAAAAAAAALPAGSQDHMNALRSTALRRSTLHWDAAAAFFAPPFRSRSCRRRRVPAPAAAAETRPTRSPSRARARARAKLLADADTRDPWLASLSLLPVDDGEAAAAAAAASTGWAIGVDPDTGGAIAVLSPDGSSQVFDNPFVHIVVSEFIRKRLDTKSIIELLRGLDAPPAISTRDMAIMITHYGTTAYIEKSSPFPTDGKLDYSRQAASILFPDKALSLNRKKHHGRAEALLLAAYGKGLVLPSGEFSKTL

SEQ ID NO: 175552 - protein, 57 aa, Oryza sativa
  Clone ID: PAT_MRT4530_73386C.1.pep
AGHTFYYYSTYTQTFGQYWSNSYCSSTMIGLGWAQHQTLINHSVLFTHQGVKYVQES

SEQ ID NO: 175553 - protein, 120 aa, Oryza sativa
  Clone ID: PAT_MRT4530_73387C.1.pep
MCESQTPEHDTIQEDKQEKRLLGSEEEKMMILILHELIRIRIQEQERLTFDMSPANQNGQSGREELDDQWSRGEKAEQRLVVAKARRVYHHTSSCRSRGRGGMGEIAGKGPKYSHFPSRF

SEQ ID NO: 175554 - protein, 518 aa, Oryza sativa
  unsure (1)..(518): unsure at all Xaa locations
  Clone ID: PAT_MRT4530_73388C.1.pep
MTKDDAVPVAVAPAKRPPINKYAFGCALLASMNSVLLGYDISVMSGAQIFMKEDLKITDTQIEILAGVINIYSLFGSLAAGMTSDWLGRRYTMVLAAAIFFTGALLMGLAPNYAFLMAGRFVAGIGVGYALMIAPVYTAEVAPTSARGFLTSFPEVFNNSGILLGYVSNFAFARLPVHLSWRAMFLVGAVPPIFLGIAVLAMPESPRWLVMRGRIEDARRVLLKTSDSPDEAEDRLLDIKKAVGIPEDASDGEDVVAIVRANKASQGEGVWKELPPNPTWPVRRMLVAGLGLMSIQQATGARLPQCMHSPRAXSAPVLRRRPTSPGAPTAVGACKTFFIPIATLLLDRVGRRPLLLASGGGMAIFLFTLATSLLMMDRRPEGEAKALGAISIAAMLSFVASFASGLGPVAWVYTSEIYPVRLRAQAAAIGTGLNRLMSGATTMSFLSLSNAITIAGSFYLYASIAAAGWVFMYFFLPETKGKSLEDTVKLFGKDTDDDDDVDTSRHERKRSTELSAQH

SEQ ID NO: 175555 - protein, 91 aa, Oryza sativa
  unsure (1)..(91): unsure at all Xaa locations
  Clone ID: PAT_MRT4530_73389C.1.pep
MEIQYEFNSDRDSNRSPMGLGGPNHGSYIFVRGVIGGGIASSWEYGEENARGGEGQAGAIDYFLYINARYFAKVPSTSXRFLPLRSVSSGN

SEQ ID NO: 175556 - protein, 214 aa, Oryza sativa
  Clone ID: PAT_MRT4530_7338C.1.pep
MSQVGSAPAPMVTSHEDAKKAYADFEKKVKRTIYIDHLSPQVTSSVLKAALAQCANVVDVEFIVNYTIPYDIPSAALVELDDEIQAKAALDLMNDFPFIIGGMPRPVRATCAKPDMFRERPPCPDIKKEFRWVKQEDGTEYEGMKKLRILAKRQEAENMALIKNQLEEEKELAKQQQELLDGNYKKYDMLENVVQNGNMKSLAQHYGVSLADEF

SEQ ID NO: 175557 - protein, 201 aa, Oryza sativa
  unsure (1)..(201): unsure at all Xaa locations
  Clone ID: PAT_MRT4530_73390C.1.pep
MTNGDLFREYIMAKFTGVRFSDVPINLNLSFNFILSFGIDYTSPDGGATAMSTNGEYTTNWDTCXLTPDEDDAVKEVHPNGRAMXGLVGDRVWDTDKGFISPTSVDSRVANDDDSVYDIIEAYWLEGVDDEXIVVHENCAAGVYTFAEXIMSVRTEIQGEXPNIATSVAAIQDAMMMRXYYQKVMRYYCRVIELCNFQLYG

SEQ ID NO: 175558 - protein, 208 aa, Oryza sativa
  unsure (1)..(208): unsure at all Xaa locations
  Clone ID: PAT_MRT4530_73391C.1.pep
MATPRCGRLDHAPRLVARGAALLTHADQASFGFRSVAFLLAHSHAHKVAAYLFTVLVIEPTKPLACDPASLPKLPLSKEYNAKLRGKEAIRQNTTAIGGKGSMFIKPGRNKPSKAAPAQDAIGGGAHRRAPGAPEEREPPLQLAVPLTLCRAWREEREMKKGEMXRGGGRRRGVKMTCGAHIGSTXFINLCETDMWVPXGLSGSNRHV

SEQ ID NO: 175559 - protein, 164 aa, Oryza sativa
  Clone ID: PAT_MRT4530_73392C.1.pep
RNRHEGQRRRLRAACLPRPGCFTVSAADEGPSGSGGGGGGSRPAPTHLVVTVNGIVGSAENWRYAAKHFIKKHPEDVVVHCSGCNGAVRTFDGVDVMGTRLAEEVLSLVQRRPELQKISFVAHSLGGLIARYAIALLYKSATEIDSHEEHEKQITDVSSNQLID

SEQ ID NO: 175560 - protein, 37 aa, Oryza sativa
  Clone ID: PAT_MRT4530_73393C.1.pep
FFFFFFFFFFFFFFFFFFFFFFLEWHIRDLNKKTQTQ

SEQ ID NO: 175561 - protein, 67 aa, Oryza sativa
  Clone ID: PAT_MRT4530_73394C.1.pep
MATSEESSCNDGLDSTVMAGAVLHVARAAQGRSDPLPVVHLRRVHHALPRAPRWKAAHRESHGPGAG

SEQ ID NO: 175562 - protein, 87 aa, Oryza sativa
  Clone ID: PAT_MRT4530_73395C.1.pep
RGHMGCLPPSSGGGGGLDRLSQAQPDGVHERHRQDGGSRHAAVRTCSPPRRRPRAMSAAVDETPASFQTLPRGRWRRRGSHLRAGRA

SEQ ID NO: 175563 - protein, 119 aa, Oryza sativa
  Clone ID: PAT_MRT4530_73396C.1.pep
MALRGVWQLQKLVVNYCDWGGSSRGIRAFMEAHLPAFKEKNPHLEVVTELVRGQHPNLKGIYKNHNERVVCVRNLAPEDILLQATRLRNSLGRKVVKLRTRHVTKRPSVQGTWTTELKM

SEQ ID NO: 175564 - protein, 313 aa, Oryza sativa
  Clone ID: PAT_MRT4530_73397C.1.pep
MERRPELRRTMTLSEQLSAPDQAIRDFLKIPHDGLGGGDGEGGRIPAAAGASGGGGGVGGMINWKPLRDRLRLRRAASAWMSASPKPAASNSGGGGGGGATLSSSNSGSNHSNKYNYSPGEAAAAFSRTFSRTRSLRPTPTFSRATSTRLGATAFSSGSRRAAVDGGGHANEDDDEDHTDDDDDDDEEEQGKDDAPAAQMSLMALLEQSDSQWDSEDEDDQGHGGGGGGGGNGGGGGGGGARKNGDGDDDEDDGEGREEEMVHVCCVCMVRHKGAAFIPCGHTFCRLCSRELWVSRGNCPLCNGFIQEILDIF

SEQ ID NO: 175565 - protein, 1007 aa, Oryza sativa
  unsure (1)..(1007): unsure at all Xaa locations
  Clone ID: PAT_MRT4530_73398C.1.pep
CPYHKGNHLSFRQQLAPTVGTSERNHXERMLPKRVVKEKVTRRKASEVGGEMAAEDGAEPSAPIAEDRGAPSASAPAPQPPSSAPAASSGQVPNTVDAAKAAAAASALQTRAETLSTGQLLVPQAASSXPATVSTALAAAQVNPDLXAHVEADMEAMRRNMTRLQDMVRQMQEQQQAYKTARQAKVASAPILQYSAGYIPPQVYPQAPIQPHPPQAMQMPVYFTGQPPTTAMQPAPHVQPQAQPVAAQVHPPPLGQMSQAMAEGASALQAQLQAFLQHLSQPHSISGTAPSAQPERNTSQGAPNWLPSNQPGPGASPWSXGPQFDFTNAAQAPTVRPXAPTLGFGANQEPNXVTMAWTQPTFDPSMAAHQASPIRARQPNTVAQPHAQAMTSPFATPYPQQGAANRAGGEKGLPLSGGIKIRPIPPQFKFPPVPRYSGETDLKEFLSIYESAIEAAHGDENTKAKVIHLALDGIARSLYFNLPANSIYSXKQLRDVFVLNFRGTYEEPKTQQHLLGIRKRPGELIREYMRRFSQARCQVQDITEASVINAASAGLLEGKLTRKIANKEPQTLEHLLRIIDGYARGEEDFKRWQAIQAEYDKASVAAAQAQVQAQVVEPAPLTVRQPQPANQGQPPRQGQAPMTWRKFRTDHAGKAVMVVEEVQALRKEFNAQQASSHQQPVRKKYLNQQISFGPEDDQGVMFPHQDPLVILAEIAGFEVRRILVDGGSLADVIFAEAYAKMGLPTLALTPAQASLRGFGGEAVQILGQAQLMVAFDTSENRCEEQILFDVVNIPYNYNAIFGRATLNKFEAISHHNYLKLKMPGPAGMIMVKGLQPSATSKGDLAVINGAVCNVEAEPHDRAKHAPKPAPHGRVIKMXIDDANPTRLVLLGGDMGKREVENILEVLKKNIGIFAWGPDEVGGVSTDLIMHHLAVKPNAKPRKQKLRKISTDRQEAAKAEVQKLLKAGVIQEIDHPEWLANPVLVRKSNGKWRMCVDFTDLNKACPKD

SEQ ID NO: 175566 - protein, 67 aa, Oryza sativa
  Clone ID: PAT_MRT4530_73399C.1.pep
LLYTQSPSFMTMIFCVALSCQSCRNPETGILGIIGECCRTPMCAQLFLIKKYLILSQVNFVLTWWLK

SEQ ID NO: 175567 - protein, 93 aa, Oryza sativa
  Clone ID: PAT_MRT4530_7339C.1.pep
SVRQFTRDNKCSIEFDEFGFSVKDLQTRRVILRCNSHGELYTLPAATPSNTASCSLATSSTLWHRRLGQPGPAAIHSLRNMSSISFAPFELVH

SEQ ID NO: 175568 - protein, 125 aa, Oryza sativa
  Clone ID: PAT_MRT4530_733C.1.pep
MGSHAQQNHGRRGTCPARVHQCGNGFRDNFDALDVVPINHDVQYIGNSGIGDNQMQMTPVTDGINCECSSTAITTDTQLVSRLNTRDPPDATLLEHLLGDLRELHLKPDVPLLSDLISAYAWPCS

SEQ ID NO: 175569 - protein, 458 aa, Oryza sativa
  Clone ID: PAT_MRT4530_73400C.1.pep
MGMPTLALTQAPASLRGFDGEAVQVLGQVQLVVAFGTSEKRRKEQILFDVVDIPYNYNAIFSRATLNKFEAISRHNYLKLKMPGPARVIVVNGLQPSATSKGDLAVINRAVHNDEAEPHDRAKHTPKRAPHGRVIKVQVDDANPTRLVSLGATWAKEKLRTSWRCSRKTLISAPGAPTRCCELMSFLDAYSGYHQIHMNPADISKTAFITPFDTFCYLRMPFGLRNAEATFARLVYKAYVDDIVAKSHKAFDHASDLQGTFDNLRAAGMKLNPEKCVFGVRMGNLLGFLVSERDIEANPEKIDAIQQMKPPSSVREIQKLAGRIAALSRFLSKAAERGLRFFKTLRGAEKFTWTPECQAAFDELKQYLQSPPALVSPALGSELLLYLAASPVAVSAALVQETESGQKPVYFVSEALQGAKIRYIEMEKLAYALVMASRELKHYFQAHKVTVPSQYPLG

SEQ ID NO: 175570 - protein, 1098 aa, Oryza sativa
  unsure (1)..(1098): unsure at all Xaa locations
  Clone ID: PAT_MRT4530_73401C.1.pep
MAKKRPNTVDTAKAAAAARALQTRAEILSTSQLLVPQAASSQPATASTALAAAQVNPNLEAQGEADMEAMRQNMTQLQDMLXQMQEQQXAYEAARQAKVASVPILXYSAGYIPPQVHPQASIQPLPPQAMQAPVYFAGQPSAATIHPTPYVQPQAQPVTIQVHPPPPGRPXVHPVGCRRASLPQQGAANKAGGEKRLPLSGRIKIRPIPSQFKFPPVPRYSGETDPKEFLSIYESTIEASHGDENTKTKASSHQQPVRKKVRKDLYCAFHGRSVHTTEQCRNIRHRGNAQDPRPQHGAAAEASREAIQEQAPPAEQHQGVQCRVIQVITRTDPPNQLSKGQKKMQLPMVHNITLASEGAPRYLNQQISFGPEDAEGVLFPHQDPLVISAEVAGFEVRRIIVDGENSADVIFAEAYAEMGLPTLALTQAPASLHGFGGEAVQVLGQAQLVGPDEVGGVSTDIIMHHLAVKPDAKPRKQKLRKMSVDRQEAAKAEVQKLLKAGVIQEIDHPEWLANPAYVDDIVIKSRKDFDHASDLQETFDNLRAXGAALVQETESGQKPVYXMEKLAYALVMASRKLKHYFQAHKVTVPSQYPLGEVLRGQEITGRLNKWAAELSSFDLHFVARTAIKSQVLANFVAEWTLAFALEPEPVEQPWVMYSDSSWSHKGAGAAAVLTSPGGMPIRYAARLQFDTTNNTAEYEAILLGLKKTKALGVRRLLIRTDSKLVASHVDKSFEAKEEGIKRYLEAVRSMEKCFAGITVEHLPRGQNEEADALVKSAACGGPHSPGIFFEVLYAPSVPIESLDIMAIDQTELGEDPEDWRTSFVKYLKNGWLPEDEAEAKRLQLRAAKYKLGLCGAHQAARTVASKVFRQGVYRPIVLKVCVEQAKKCKSCQRHSRSQTAPQYELQPIAPIWPFSRWGLDIIGPFPMARNGYKFAIVAIEYFSQWIEAEPLGAITSVAVQKFVWKNIICRFGVPKEIITDNDKQFDSDKFREMCEGLNLEIRFASVAHPQLNGVAERTNGKILEALKKRLEGAAKELLPGHLVLRKENPVVVGKLESKREGPYLIKHMSRTCSFRLAMLEGEEFDHSWNAASLKRFYV

SEQ ID NO: 175571 - protein, 62 aa, Oryza sativa
  Clone ID: PAT_MRT4530_73402C.1.pep
LIGDYSKTSAMVDIFNLLDLGNNAASFKGTEDFSCSASVTIYLLFSKRKKKNLTYVNKRMIF

SEQ ID NO: 175572 - protein, 1290 aa, Oryza sativa
  unsure (1)..(1290): unsure at all Xaa locations
  Clone ID: PAT_MRT4530_73403C.1.pep
MKPSRRPFHLLQPPAIATLAAAAPRRCRLRVRRVVPRPGRHSTRPFRRPRTASTVDPSSTTAVVASNHCSSPPQPSPHKSAATLGFAALPRTPAATPNPQTITGAPFPPPTRATTTSTASSGLFSPLRSPISLPNRSNIFPRSCRPSAVAPPWSGVVGTPFPSPPVPVAAIFSAAGRLPVVVSPSPSSGAANKAGGEKRLPLSGGINIRPIPPQFKFPPVLRYSGETDPKEFLSIYESAIEAAHGDENTKAKQLRDVFVLNFRGTYEEPKTQQYLLGIRQRPGESIREYMRRFSGEEDSKRRQAIQAEYDKASVAAAQAQVQAQVAEPAPLAVHQSQPAIQGQPPRPSQAPMTWRKFRTDRAGKAVMAVEEIQALRKEFDAQQTSSYQQPVRKKVRKDLYCAFHGRSSHTTEQYRNIRQRGNVQDPRLQQAYNKMGLPALALTQAPASLRGFGGEAVQVQGQVQLVVAFGTGDNRREEQILFDVVDIPYNYNAIFGRATLNKFEDISHHNYLKLKMPGPAGVIVGDLAVINRAVHNVEAEPHDRAKHAPKXPQVDDADPARLVSXGGDIGEREVENIMEVLKKNIDILTWGPDEKSNGKWRMCVDFTGLNKAYPNDDFPLPRIDQLVDSTVGCKLMSFLDAYSGYHQIHMNPADIPKTAFITLFGTYCHLRMPFGLRNAGATFARLVYKILYKQLGRNVEAYVDDIVVKSRKAFDHASDLQETFDNLRTAAYAKYKKLAGQIAALSQFLSKAVERGLPFFKTLRGAEKFTWTPECQAVFDELKQYLQSTPALISPAPGSELLLYLAASPVAVSAALVQETESGQKPVYFISEALQGAKIRYIEMEKLAYALVMASRKLKHYFQAHKVTLSKWVAELSPFDLHFVARTAIKSQVLADFVAEWTSAFALEPEPVEQPWVMYSDGSWSHKGAGAAAVLTSPGGVPIRYAARLQFNTTNNAAEYEAILRGLKKAKALGVRRLLIRTDSKFVASHVDKSFEAKEEGMKRYLEAVWSMEKCFTGITVEHLPRGQNEEADALAKSAACGGPHSPGIFFEPSEDEAEAKRLQLRAAKYKLVSGQLYHSGVLQPLLRYISFAEGEEMAKEIHQGLCGAHQATRTIASKVFRQGVYWPTMLKVYVEQVKRCESYQCHGQSQTAPQYELQPIAPIWPFARWGLDIIGPFPVAQNGYKFAIVAIEYFSLWIEAEPLGAITLAAVQKFVWKNIVCCFGIPKEFITDNGKQFDSNKFREMCEGLNLEIKFASIAHPQSNGAADRTNGKILEALKKRLEGAAKGK

SEQ ID NO: 175573 - protein, 133 aa, Oryza sativa
  Clone ID: PAT_MRT4530_73404C.1.pep
MGNAALSALHGDAELGLGNGDANAAAEMVEAGQDVAELRRALFAGGVGKAAAALYLALFRPPAGLFLRSNPLFYSYYVVLVAVVLFGVAEAWVGLWASRDGRRRAAGVTMLWLSVIPALFLVGTGGSAILELK

SEQ ID NO: 175574 - protein, 109 aa, Oryza sativa
  unsure (1)..(109): unsure at all Xaa locations
  Clone ID: PAT_MRT4530_73405C.1.pep
CKPXHASTLTTAITTHSKGDINHNPQHFTSHEHYSHGTQXATTDTLGTHYPAGVLHSFTFHPLHTLRVGISLGIRQAVFPLPSSGHIRGKRGRQRAQTEYRSPSEHHNY

SEQ ID NO: 175575 - protein, 756 aa, Oryza sativa
  unsure (1)..(756): unsure at all Xaa locations
  Clone ID: PAT_MRT4530_73406C.1.pep
MSFLDAYSGYHQIHMNPANILKTAFITPFGTFCHLRMPFGLRNTGATFARLVYKVLYKQLGRNVEAYVDDITVKSHKAFDHASDLQETFDNLRAAGMKLNPKKCVFGVHVGKLLGFLVSERGIEANPKKIDAFQQMKPPSSVREVRKLASRIAALNRFLSKAAKRGLPFFKTLRGAGKFTWTPECQAVFDELNAALVQETESGKKPVYFVSEALHGAKIRYIEMEKLAYALVMASRKLKHYFQAHKVTVPSQYPLGEILRGKEVTSRLSKWAAELSPFDLHFVARTTIKSQVLADFVAEWTPAFALEPEPVEQLWAKALGVRRLLIRTDSKLVASHVDKSLEAKEEGMKRYLEAVRSMEKCFASITVKHLPRGQNEEADALAKSAACGPHSPGIFFEVLYTPSVPIESLDIMAIDQTELGEDPEDWRTPFVKYLKKGWLLEDKAEEKRLQLRAAKYKRVSGQLYRGAPTLASLHLLCRRWGLDIIGPFPXRETGTSSQLWPLNTSPDGSRPNHLGRSXSTAVQRFVWNNIICRFGVPKEFITDNGKQFDSNRFREMCEGLNLEIRFASVAHPQSNRAAKRTNGKILEALKKRLEGAAKGKWPDEMLSVLWALLMTPTRPTKFSPFMLLYGDEAMTPTELGANNSPRVMFSGGEEGREVSLELLEGVRVEALEHMRKYATGTSATYNKKDRPTELLPGHLVLRKKANPVVVGKLESKWEGPYLIKHKSRTGSFRLATLEGEEFDHSWNASSLKRFYV

SEQ ID NO: 175576 - protein, 1509 aa, Oryza sativa
  unsure (1)..(1509): unsure at all Xaa locations
  Clone ID: PAT_MRT4530_73407C.1.pep
QVHPLQPGQMSQVMAEGALALQAQLQAFLQQSCQPHNISGTAPSAQLEENTSQVXLRQRCSSTNHSATGTNTRLRSKPSTKPGRHGMDLADLXPIHGSPPSITNRSRAAEHHGPTSRATTEWGNQDPSNPSLQGEGTYEEPKTQHHLLGIRQRPGELIREYMRRFSQARCQVQDITEASVINAASAGLLEGKLTRKIANKEPQTLEHLLRIIDGYARGEEDSKRRQAIQAEYDKASIAAAQAQVQAQVAEPPPLAIRQPQPANQGQPPRQGQAPMTRRKFRTDRAGKAVMAVEEVQALCKEFDAQQVSNNQQPVRKKVRKDLYCAFHGRSSHTTEQCRNIRQRGNVQDPRPQPGAAVEAPREAVQEQAPPAEQRQDVQGIVIQVITRADPPNQLSKQQKKMQLXMVHNITSAGEGAPQYLNQQISFDPKDAEGVMFPHQDHLVISAEIAGFEVRRILVDGGSSADVIFAEAYAKMGLPTLALTRAPASLRGFGGEAVQVLGQAQLLVAFGTGKNRREEQILFDIVXTMNKFEAISHHNYVKLKMPGPARVIVIKGLQPSATPKDDLAVINRAVHNVEAEPHDRAKHAPKPGPHGRVIKMQIDDADPTRLVSXGGDMGEREVENILEVLKKNIDIFDWGPDEVGGVSTDLIMHLLAVKPDAKPRKXKLCKMSTDRQEAAKAEVQKLLKAGVIQEIDHPEXLANPVLMRKSNGKWRMCVDFTDLNKACPKNDFPXPRIDQLVDSTAGCELMSFLDAYSAYHQIHMNPADIAKTAFITSFGTFCHLRMPFGLRNARATFARLVYKVLYKQLGXNVEAYVDDTVVKICKAIDHASDLQETFDNLRAXGIKLNPEKCGFGVHAGKLLGFLISXRGIEANPKKIDAIQQMKPPSSVLEVQKVAGRIAALSRFLSKAAERGLPFFMTLRGVGKFTWTPECQAAFDELKHYLQSSPGLISPAPGSELLLYLAASPVAVSAALVXRDRVRXKLVFFISEALQGAKIRYIEMEKLAYALVMASCKLKHYFQAHKVMVPSXYPLGEILRGKEVTGRLSKWAAELSPFDLHFVARTTIKSKVLADFVAEWTPFDTTNNAAEXEAILLGLKKAKALGVRRLLILTDSKLVASHVDKSFEAKEEGMKRYLEAVRSKEKCFAGITVEHLPRGQNEXADALAKSAACGGPHSPGIFFEVLYAPSVPIESLDIMAIGQTELGEDLEDXRTPFVKYLKNGWLPEDEAEAKRLQLRAAKYKLVSGQLYHSRVLQPLLCCISFAXGEEMAKEIHQGLCGVHQAARTVASKVFRQGVYWPTMLNVCVEQVRKCESCQRHGQSQTAPQYELQPIAPIWSFARWGLEIIGPFPVARNVYKFAIMAIEYFSRWIEAEPLGAISSAAVQKFVWKNIVCRFEVPKELITDNDKQFDSEXSREMCEGLNLEIRFASVAHPQSNGSAECRNGKILEALKKRLEGAAKSLRPLELFPLVDGQAKEPPQPIRPWKXFALAAGAEALPPSSHGRRSPAAK

SEQ ID NO: 175577 - protein, 241 aa, Oryza sativa
  unsure (1)..(241): unsure at all Xaa locations
  Clone ID: PAT_MRT4530_73408C.1.pep
HNVEAEPHDRAKHAPKPXVDDADPARLVSXGGDIGEREVENIMEVLKKNIDILTWGPDEEINNPEWLANSVLVQKSNGKWRICCKLMSFLDAYSGYHQIHMNPADIPKTAFNTLFGTYCHLRMPFGLRNAGVTFARLVYKILYKQLGRNVEAYVDDIVVKSRKAFDHASDLQETFDNLRTAAEWTSAFALEPEPVEQPWVMYSDGSWSHKGAGAAAVLTSPGGVPIRYAARLQFNTTNNAA

SEQ ID NO: 175578 - protein, 44 aa, Oryza sativa
  Clone ID: PAT_MRT4530_73409C.1.pep
TWAVLQKSETDQRRLLLGAKLIRQVASDIFNSKFRWRADARRIG

SEQ ID NO: 175579 - protein, 133 aa, Oryza sativa
  unsure (1)..(133): unsure at all Xaa locations
  Clone ID: PAT_MRT4530_7340C.1.pep
REGAAAAPPRTRPPSGVATXVWGRPNPKLEGGCRRNTPGSTPLGGSHVGLGAASSIXLGGSCRRSTTGSTPPRGEPRGFGXRPNPKLGGGCRRSTSDSTPLGGSHPAGPKPAATGEPAQGASGVDGVQSSTQG

SEQ ID NO: 175580 - protein, 1053 aa, Oryza sativa
  Clone ID: PAT_MRT4530_73410C.1.pep
MAWTQPSFDPSMAAHQASPFGAEQPNTVAQPHAQAMTLPFATPYSQQGAANKARGEKGLPLSGGIKIHPILPKFKFPPVPCYSGKTDPKEFLSIYESAIEATHGDENTKAKRPGESIREYMRHFSQARCQVQDITEASVINAASAGLLEGELTRKIANKEPQTLEHLLRIIDGYARGEKDSKQRQAIQAEYDKASVTAAQAQIQAQVAEPAPLAVSQPQPVHQGQPPRQGQAPMTWRKFKTDRAGKAMIAVEEVQALHKEFDAQQASSHEQPVRKKVRKDFYCAFHERSSHTTEQCRNIRQRGNAQDPRPQQGAAAEAPREAVQEQAPPAEQRQDVQRGVMQVIIRADPPNQLSKRQKKMQLRMVHNITSAGEGASQYLNQQIFFGPEDAEGVMFPHQDSLVISAEVAGFEVRQILVDGGSSADVIFAEAYAKIGLPTLALTQTLASLHGFGEEAVQVLGQAQLVVAFGTGENIREEQILFDVVDIPYNYNAIFSRATLNKFEATSQNNYLKLKMSGPAGVIVVKGLQLLATSKGDLAAINRAVHNVEAEPHDRAKHTPKPAPHGRVIKVLKKNIDIFVWGPDEVGDLNKACSKDDFPLPRIDQLMDSTAGCELMSFLDAYSGYHQIHMNPADIPKTAFITPFGTFCHLRMPFGLRNAGATFARLVYKVLYKQLGRNVEAYVDDIVVKSRKAFDRASDLQETFDNLYAAGMKLNPEKCVFGVRAGKLLGFLVSERGIEANPEKIDAIQQMKPPSSVREVQKLACRIAALSRFLSKGAERGLPFFKTLRGTGKFTWTPECQAAFDELKQYLQSPPALVHKVTVPSQYPLGEVPRGKEITGRLSKWAAELSPFDLHFVARTAIKSQVLADFVAKWTPAFALEPKPVEQPWVMYSDGSWSHKGVGAVAVLTLPGGVPIRYATRLQFDTTNNAAEYEAILLGLKKAKALGVRRLLIRTNFKLVASHVDKSFEAKEEGMRRYLEAVRSMEKCFVGITVEHLPRGQNEEADALAKSAACGGPHSPGIFFEVLYAPSVPIESPNIMAIDQAELGEDPEDW

SEQ ID NO: 175581 - protein, 256 aa, Oryza sativa
  Clone ID: PAT_MRT4530_73411C.1.pep
QRKLKKVVNPHIMHQDIKASNILLDKDLTPKISDFGLAKLLPPDASHVSTRVAGTFFTYSVLHDRGYLAPEYAIRGQVTRKSDVYSFGVLLLEIVSGRSNTNTRLPYEDQILLERFPEITNGVLLLQTWVHYEEGDLEKIIDASLGDDLDVAQACEMDVELAKISKPAIISDFMDLKVRSMRKEVDIVSSSTSTLLSSIMAHSSPLLSQETTEASMTFTAISDPSEVVHECMQMQACNNGWSIRDQHMSELEVITN

SEQ ID NO: 175582 - protein, 121 aa, Oryza sativa
  Clone ID: PAT_MRT4530_73412C.1.pep
PPPPAKTRTPIFFFPSEKPSVLLFRLNFFSTTVSKTFLSFPKVLPIFLTAIFPTLKGKPNFIFPPLFGFSKFFSKSFFFFGYSIFFFFTSGHSSDFSPNFSFEFFSKSQIFSHPLPFFFYN

SEQ ID NO: 175583 - protein, 716 aa, Oryza sativa
  Clone ID: PAT_MRT4530_73413C.1.pep
MGLPTLALTQAPASLRGFGGEAVQVLGQAQLVVAFGTGENRREEQILFDDVDIPYNYNAIFGRATLNKFEAISHHNYLKLKMPGPAGVIVVKGLQPSATSKGDLAAINRAVHDVEAEPHDRAKHAPKPAPHGRVIKEQVNDADSTRFVSLGGDMGEREVENILEVLKKNIDIFTWGPDEVGGVSTDLIMHHLAVKPDARLRKQKLRKMSADRQEAAKAEVQKQLKAGVIQEIDHPEWLANPVLVRKSNGKWRMCVDFTDLNKAYPKDDFPLPWIDQLVDSTAGCELMSFLDAMPFGLRNTGATFARQVYKVLYKQLGRNVEAYVDNIVIKSRMAFDHASDLQETFDNLRVVAFDELKRYLQSPPALVSPAPGSELLLYLAASPVSISAALVQETESGQKPEYFVSEALQGEKIRYIEMEKLAYALVMASCKLKHYFQAHKVTVLSQYPLGEVLRGKEITGWLSKGRRTAVLTLPGGVPIRYAARLQFDTTNNSSEYEAILLGLKKAKALGVRCLLIRTDSKLVASHVDKSFEAKEEGMKRYLEAVQSMEKCFAGITVEHLPRDQNEEAYALTKSAGCGGPHSPSIFFEVLYASSVPIESPNIMAIDQAELDEDPEDWRTLFLKYLSNGWLPEDEAEAKRLQLRAAKLLVFLNDFTRNIIPSNGAETLLEARYIKVDTNQSLTSRSINSTYYTGNPKAQLIEKYEETRKTRANTTGV

SEQ ID NO: 175584 - protein, 126 aa, Oryza sativa
  unsure (1)..(126): unsure at all Xaa locations
  Clone ID: PAT_MRT4530_73414C.1.pep
LETMPEISFPLGGKKFALNPKKKILKVGKETSPQCTSGFTPMDTPPPRGPLWIRGKVFMGAHQTVFNXAKIRVGFAKSAQKGCCPVPKNKVDANPKKKKPKLLTRVFIRQGGKKSKQQKMFMFSKA

SEQ ID NO: 175585 - protein, 271 aa, Oryza sativa
  unsure (1)..(271): unsure at all Xaa locations
  Clone ID: PAT_MRT4530_73415C.1.pep
KGKEEXKXXEXFXXPRLXKGKKFXVXFXNLXFREXGKGXVKTPLWEXILXTFSXKPFXFFAPKRKFSXNFXXXAXXXGSLXXXGGRXEXGESGXVKKGKXXXXGKRVXPXGGNAXKKXGFXGTXGKNGRVREWAAPIGXGAGFXENKGVFQXLARXWRXRPXPKXXWESXEGLEGXXXKFGGVKXFPRGGGPFPPVKTNLLGGGEXWHXVQPPLPGGXFXIRSSGTPKGWVFFNFFRXGFFFSXPPFXFRAGRGGRGVKLSVPGKSPXNPP

SEQ ID NO: 175586 - protein, 84 aa, Oryza sativa
  unsure (1)..(84): unsure at all Xaa locations
  Clone ID: PAT_MRT4530_73416C.1.pep
MSFVISFTLLTIIKDAITGNNLIRSWFGMVYSWFXDRTVQPGWLFRMVGPMQQDMLYSVGLIFFNYYLTILLNSEMFIKCYLCK

SEQ ID NO: 175587 - protein, 614 aa, Oryza sativa
  Clone ID: PAT_MRT4530_73417C.1.pep
MSSDPVFPVLRHGDYFTKPSIDELVEREAADPGYCSRVPDFVVGRVGYGRIHFPGDTDVRGMDLNGIVKFGRHSVEVYKDEASKPPLGQGLNKPAEVTLMLNLSVLPEPSALGELLKCQTRKQGARFVSFNHSSGRWKFEVDHFSRFRLVDEEEEDVVMDEVVVRQPIAEVRDPPANGHELELSRSLPAHLGLDPAKMHEMRMTMFSNEEGDEDMEDGFPSDQRYFSSEKMNVDSPNSSAKGLRLRSLSPLHGSSLKVSRRPGVIGRREPQALLEYSVNSSEHGPSSHGILMSGQNKGFPVRMTKVMALSCHLIRKLLWLGTSFRVGWGPNGILVHSGSLVNRPGTGLSSVIHIEKVAGDKVVRDEKNKIKEELTDLCFSDPLDLHRRLHHEYLETESDLFKLKLQKVVASRFVLPDICRSYIDIIERQLEVSDLSMSSRVLLMHQVTVWELIRVLFSERATGNQLEPTGDEDQEGMILDKKEGTVAIDLEALPLVRRADFSNWLQDSVCHRVQGEAGSLNDARYLEHIILLLTGRQLDTATEVAAFRGDVRLAILLSQAGGSMLNRSDLSQQLDLWKTNGLDFDYIQEDRLKIYELLSGNVQGALVDSSIDWK

SEQ ID NO: 175588 - protein, 106 aa, Oryza sativa
  Clone ID: PAT_MRT4530_73418C.1.pep
MEPDLEQYVRLKCQGLSFLGTTSDGRAIVFGNIVPPTWTMGDTFQGNGQLHITVQPVHNYKFVGVVDDNLVALAGDGVDGKRVDYAAGSLGNVLGILEQLLIVLFE

SEQ ID NO: 175589 - protein, 103 aa, Oryza sativa
  Clone ID: PAT_MRT4530_73419C.1.pep
MANYLPRQGQRWLGCTRGEEDGPDPTAAAARSVVAASICHRHRSICTGERGGAAREGSTGERGPGRGEAALSGKGEPEREEAWEEIGRGDMVMRGGVDVYICL

SEQ ID NO: 175590 - protein, 113 aa, Oryza sativa
  unsure (1)..(113): unsure at all Xaa locations
  Clone ID: PAT_MRT4530_7341C.1.pep
LCQNNKYFTSTRITNLXAENEHKLEKNRHKNKRSFNXTMSRIRLINEWIKNAEMTRPIGPKFTSLKXATEEEAASQKWVGLDRPLVRANQXSAEPILAPLDGRCGLAPNDGWR

SEQ ID NO: 175591 - protein, 689 aa, Oryza sativa
  Clone ID: PAT_MRT4530_73420C.1.pep
MGVLAFYRWLADRYPQTVSDAVEEEPVELEPGAFVPVDLRRPNPNGLKFDNLYLDMNGIIHPCFHPEGHARSYSPIPSVFSSSNQPILCSISPWIWTPSPAAGTDHLRRGAALKGNFVEQDECVARNFKQAAKLLGLDSKLEKNLLIPFREIKEFDILGHRLGLRHHRGPRLPSLDESDVTYSECLGTLSVELLLFNRCTLDKMATNDRFSDLLWMPHCQHKVTKIWDSPTNCINIRLHRVGIPYHSLCQTALENLGFFQIARMKEINNDKYLISALVERWRPKTNTFHLPVGEMTITLQDVSCLWGLPIHGRPITGQADGSWVDMIERLLGIPMEEQHMKQKKRKKEDDMTMVSYSRYSISLSKLRDRFRVMPKNATEREINWYTRALVLDIIGSMVFTDTSGDGVPAMYLQFMMNLSEQTEYNWGAAALSMLYRQLSIASEKERAEISRPLLLLQLWSWSRLPLGRPVKAMKITKEREEEDEQEELDYCLVFGAKWCLSHEFRAPHNAGTISILIISYVPIMVFFLGVLVYLSYSNVMQCLGGLENPIPYPRDIFEWTGYMPSGPPLARISLHVIKNAAWGIKCAITNSCKKLGKSILKTCLGNLRDLNLEPRLQNMLTDAGLPINIEDIPSDDDLSAHVHHPSPPKDSNSDIFDEWVYSGRGFERYLHAGGIAATQDLGQVTRIDE

SEQ ID NO: 175592 - protein, 37 aa, Oryza sativa
  Clone ID: PAT_MRT4530_73421C.1.pep
RDSSELAPFGATELQKIRTSSSRLAINLAPAPAYEFL

SEQ ID NO: 175593 - protein, 99 aa, Oryza sativa
  Clone ID: PAT_MRT4530_73422C.1.pep
SSVSGINNAVLRPERAAAVEREFSQHPGADGSSLVSELPRSSLHMAVISQPISWLVQASHHAAPCAPTGTAGSHQAPPQLQGQCVCDEKSQKYLFFCVF

SEQ ID NO: 175594 - protein, 119 aa, Oryza sativa
  Clone ID: PAT_MRT4530_73423C.1.pep
MGKSLLPTLIFLVALLPPPSPSLSLSLFDLETAIDPEPLDLLILAAAMWHQSQTFRVIGVAGLSSMPCRFSLSCISEFVQINNWQDIGMPKNGTKLRARTFGANTTLPAFGHENIREST

SEQ ID NO: 175595 - protein, 83 aa, Oryza sativa
  Clone ID: PAT_MRT4530_73424C.1.pep
LVLTTAKTLAVPCANAIIYTGDRVRGSGDPAIERMTDAAYLARLLASKLTGKANAWAVDADCFAGSYADDRAHDPAVDTEGDP

SEQ ID NO: 175596 - protein, 94 aa, Oryza sativa
  Clone ID: PAT_MRT4530_73425C.1.pep
TAKHNPMLCHGEHVQTNNCTHRYPLLITFTFLRWLVEIVPSASVLFVLRKLPTKRGITQHQATLGQSGSPQYVISNCSATLCEQKCRLSDTDEP

SEQ ID NO: 175597 - protein, 120 aa, Oryza sativa
  unsure (1)..(120): unsure at all Xaa locations
  Clone ID: PAT_MRT4530_73426C.1.pep
MHSVLRALTRVSSSMCRLCSIRDDIGRSLLAGVTVSVLVSCVGLALLDPAGTSPEHGWASAMHFDISDFDFQDTTADIIGPSXLGGVPVQTQDQSPSPLLLEPRATRAMPPNRFMYSFGA

SEQ ID NO: 175598 - protein, 126 aa, Oryza sativa
  Clone ID: PAT_MRT4530_73427C.1.pep
MRFPPPATRGHSRSQGWATPAPPTQAEARGEGGAPPHWGANPPPGPQQQHGPTPHQHKAPTPTQMWGQAPTADAARVRPAERRPRRGTTGRGRRRTRPNTRGPPRAGRSGPENSRPGRMRTTPTPA

SEQ ID NO: 175599 - protein, 52 aa, Oryza sativa
  unsure (1)..(52): unsure at all Xaa locations
  Clone ID: PAT_MRT4530_73428C.1.pep
FNLKRKRPSFGAQKIKLTXKQFRKFCKDKKKKGGLMELVVLKKNFYYLGNKF

SEQ ID NO: 175600 - protein, 428 aa, Oryza sativa
  unsure (1)..(428): unsure at all Xaa locations
  Clone ID: PAT_MRT4530_73429C.1.pep
QVGCGKPRFSKQKNKQVQRCRCCIPSGAAATHSRAPLGLSTLCTRDQAYWMTTVPMAIDICVEPHAPYRVMRQFGFRXSFQVPFPTSVPAAIHWYSRKGQQLAGDWPAKLGPFVEDWLLATEEVVDHVGVAHTEEAYQAYLHWYQPRTRTRVTFAPMEQQAHTASTRDLYARHRDQDFAHAVVECNRVVVDASTTIQHLGTGIAVPVDEHLTTYTXMHSVLRALTCRATDVAQANATPQQPPRPTGPRPAAHIPRPAPPPYGGFCAPFTTPPSTGTPPFGPHIGFAPFGTTXAAHFSQASRLASXSAASASHSAQFWQDAGTSSQAASMSQQGPPXLDPAGTSPEHGWASAMHFDISDFDFQDTTADIIGPSXLGGVPVQTQDQSPSPLLLEPRATRAMPPNRFMYSXDHVRAHAQRTKRGRGMGQSQ

SEQ ID NO: 175601 - protein, 989 aa, Oryza sativa
  Clone ID: PAT_MRT4530_7342C.1.pep
MAAVEAKVESLTGRVSELTTSLNAILGRYKGWRSGFRRMYHVPFDTWSSFATLHFTGNAALWLQTYEELHCVESWAELCVAVHSKFGKDEYLEHLEELENLTQSGGVDDYYSKFEELMHRVLVYNKAYDDTIFVTKFVGALKTEIKAAIKLHKPRSVDAALSLAKTQEELLGELNKKTYSKTTYKEPYKPVIKAPFPGKGILGAAPEEQKKLEEKPKARGECFKCGEKYGPGHKCPRSVQLHVVEEIWDIFQLADDKQKEEGLESDDEELVLSECAATGTMGKRTIRFLGLIQKQQLLILVDSGSSSNLLANHVVEKLGLWTEKVAATQVTIADGGRMVCDKFVHAVEWWCQRKTFIIDFKVLGLGGCDTIAQIVHLCVVEEKATNEQPVPSEIQQVLAEFEGRFQEPKTLPPHREIDHRIPLLPNDKAVSKKPYRYAPHQKNEIEKQIAQMLKQGIIQASTSPFASPVLLVKKKDGTWRFCVDYRGLNDITVKNKYPMPMEDELLDELAKAKWFTKLDLRSGYHQIRLIEADEVKTTFKTHQGHYEFKHLDYLGHMIGVNGVATDPDKVRAVQQWLEPKNVKQLRGFLGLAGYYRKFIKGFGVLAKPLIELLKKDVAYKWEFSQQQSFDSVKQALVQAPVLALPNFNLQFVVETDASEKGIGAGSENQVADALSRRDNEENLTISISTPRWMEIVTEGYLNDPHTKQLLASLSVTPEGIDGYQLVNGMTATYQRVKSLFAWNGLKKAVQGYVAQCDVCQQAKVEHCKTPRLLQPLPVPLQAWTTVSLDFIEGLPKSGGYDAIMVVVDKFTKFAKFIPLSHPFTAYSVAQAFIQQIYDVFGMPQMIISDRDSCFTSALWQELFKLADVKLNMSSSYHPQTDGQTKRLNQCLEAFIRCTVHAAPHKWSQWLSQAQHWYNTSYHSSLNKTPYEVLFARKPTRFGIVDMGSTTVPDVQVWLQERAQMNEVLHQQLQRAQQHMKSQADKKRSE

SEQ ID NO: 175602 - protein, 179 aa, Oryza sativa
  Clone ID: PAT_MRT4530_73430C.1.pep
MESDELTEQLRRRRRHVDWRVSCGPLGRGADDKPSPPPERRSTSLPLPLRRTLVLVRVGGERRTSGLEARGGDHQVDGERIIRLPESSQRRNTELLNGRHSSGSFSLGHSPQLPLSVADRGAEPLPSFALPAAQSTERQRVEEPPRQGTMATTLPLAGHREAGAISRWRREPKTPGQPA

SEQ ID NO: 175603 - protein, 1046 aa, Oryza sativa
  Clone ID: PAT_MRT4530_73431C.1.pep
MEGGNHGGGGYPYPPPQQYPYPYGQYPYQYPPPQQQPPPPSAYLSPSRSFHGYPSAPPPQPQPQPYAHHSAPLQPYPPPPQHHAYPPPQPHPPSPYVYDPYHAPAAAYPSYPSPNPSPSISPSSSFHHHPEPPSPSPSAPSYPSIADGLANMHVSDRHDYPPPPSPAAVPAASSPSVLPPSASFPGGGSSHGGGGMQMVPYGPPAGGSQHGGMQMVAYGSPAGGSQHGSVRPSLKVVLLHGTLDVWVYDARNLPNKDLFSKRVGDLLGPRLIGAVGSKMSSANMTSDPYVTIQVSYATVARTYVVPNNENPVWTQNFLVPVGHDAAEVEFVVKDNDVFGAQLIGTVSIPAEKLLFGERINGIYDVLESNGKPCAQGAVLRLSIQYIPVAQLKMYHHGVIAGPDSLGVPNTYFPMRRGNRVTLYQDAHVPDGCLPDFCLDHGMRYQHGQCWRDIYDAICQARRLIYIVGWSVFHTIHLIREGVEKMPSLGELLKMKSQEGVRVLLLVWDDPTSRSILGIKTDGFMGTRDEETRRFFKHSSVQVLLCPRSAGKRHSWVKQQETGTIFTHHQKTVILDADAGNHKRKIIAFVGGLDLCGGRYDTPSHPLFRSLQTVHKEDYYNPNFATVDARGPREPWHDLHSKIDGPAAYDVLQNFQERWLKASKRHGIKKLGKSYDDALLSIERIPDFISINDAIYFSDNDPETWHVQVFRSIDSNSAKGFPKDPREATRKNLVCGKNVLIDMSIHTAYVNAIRGAQHFIYIENQYFIGSSFNWDSNKDIGANNLIPIEIALKIANKIKAKERFSAYIVIPMWPEGNPTGAPTQRILYWQHKTMQMMYETIYRALKEEGLDDLYEPQDYLNFFCLGNREVADSPSTSNSTSTPQEQARKHRRFMVYVHSKGMIVDDEYVIIGSANINQRSMEGIRDTEIAMGAYQPQYTWASKVSAPRGQIYGYRMSLWAEHIGVVEEGFNYPETMECMRRVRQIGEQNWERFVDNEVTEMRGHLMKYPVSVDRKGKVKPLPGCTSFPDMGGNICGSFRAIQENLTI

SEQ ID NO: 175604 - protein, 87 aa, Oryza sativa
  unsure (1)..(87): unsure at all Xaa locations
  Clone ID: PAT_MRT4530_73432C.1.pep
KKRSKSSIRIQLICCRTDKCYMTDFALXGTNLIXYEPKINANQIVDVNKEKLSSYHWCSPIWLAWPSERFYFMITTKILPPSQNEAI

SEQ ID NO: 175605 - protein, 69 aa, Oryza sativa
  Clone ID: PAT_MRT4530_73433C.1.pep
MDSGPEMHWLLLHQSLFDFEEAGDNPNFNEEPTKGDGGWEGEVTSTIDAFQPAGEVGQQYRRWHGSRSH

SEQ ID NO: 175606 - protein, 74 aa, Oryza sativa
  Clone ID: PAT_MRT4530_73434C.1.pep
FIQSCHGMFIREGQLIDIMAWHTHLRKPGALCSQHEACNYQLLLKHATINCCFNLILSVLIVSNQRVANILTIK

SEQ ID NO: 175607 - protein, 535 aa, Oryza sativa
  Clone ID: PAT_MRT4530_73435C.1.pep
MSMQASNRPYRYPDNSQIPYYSRSSMHVGQNGTYHVQQNHEDLYASSDDGSQNGNSKAQGLQAQYCTLDSSSGNFVYPAHSSTSSHISGSPISQQDSHSEHTSGSPASASCVTEVPGLRFTTIEEIENAMFGPEPDTVSSDCSLLTDSAFYQDNWREHLGINTGDLKQVIAACGKAVDENSWYRDLLISELRNMVSISGEPMQRLGAYMLEGLVARLSSTGHALYKSLKCKEPTSFELMSYMHLLYEICPFFKFGYMSANGAIAEAVKGENFVHIIDFQIAQGSQWATMIQALAARPGGPPYLRITGIDDSNSAHARGGGLDIVGRRLFNIAQSCGLPFEFNAVPAASHEVMLEHLDIRSGEVIVVNFAYQLHHTPDESVGIENHRDRILRMVKGLSPRVVTLVEQEANTNTAPFFNRYLETLDYYTAMFEAIDVACPRDDKKRISTEQHCVARDIVNLIACEGAERVERHEPFGKWRARLSMAGFRPYPLSALVNNTIKKLLDSYHSYYKLEERDGALYLGWKNRKLVVSSAWR

SEQ ID NO: 175608 - protein, 150 aa, Oryza sativa
  Clone ID: PAT_MRT4530_73436C.1.pep
MTNSNGSDETIQDLFFVCHFAKFIWHAIQIAFGLPPPISFSNIGIWLQDVSKRLKNLILVRASAMCWAIWISHNDVVFEKTNDLSPMQFLANPKYFIIDASHDMINPAVINNGQLLVTFSVSTSGEYGKLVSYISVFTVLSNVLSLTTSD

SEQ ID NO: 175609 - protein, 76 aa, Oryza sativa
  Clone ID: PAT_MRT4530_73437C.1.pep
MLTRSRQQGSLPSRIRIRRDQRQRYVSPDSIRRHRRGLAMLISEVDIRRLVLAHNSIHPSLCGTPPISEGCFRIKH

SEQ ID NO: 175610 - protein, 158 aa, Oryza sativa
  Clone ID: PAT_MRT4530_73438C.1.pep
MAVAMPSHFIGRRQVEGDCRLLEQVIAVVLLVGVAFEMVLTRLLVGVELLGQWDVSDALLETPTTTGPGSAPQQHILTPRRLEFSMINNVAHYDFNGHTIVPLSCIIQGSTQNNNKTIFVAENSALYKNDSVKAMCSRAMEDFFLLPLSDQAYSEYLQ

SEQ ID NO: 175611 - protein, 119 aa, Oryza sativa
  Clone ID: PAT_MRT4530_73439C.1.pep
PPPPPPPPPSPPSPSPPNNIVGIVVVPIAGLLFLGLLAGLFLLARARRRRRAEAAEEETMEEVDDVEVAHHVRAEEHVVAGPSGEMLKVLDVTDEVDVHEHIVRHEHEHERHDVVEREG

SEQ ID NO: 175612 - protein, 376 aa, Oryza sativa
  Clone ID: PAT_MRT4530_7343C.1.pep
MKCFKQQQQQGGGNGGGQGKRLERRLSLGEYKKAVSWSKYLVAPPGAKIRGGGEELWSADLSKLEIRTKFATGRHSRVYSGRYAARDVAIKMVSQPEEDAALAAELERQFASEVALLLRLRHPNIISFVAACKKPPVFCIITEYMAGGSLRKYLHQQEPHSVPIELVLKLSLEIARGMSYLHSQGILHRDLKSENILLDGDMSVKVADFGISCLESQCGSGKGFTGTYRWMAPEMIKEKHHTRKVDVYSFGIVLWEILTALVPFSEMTPEQAAVAVALKNARPPLPPSCPVAISHLITQCWATNPDRRPQFDDIVAILESYIEALEEDPSFLQSYIPPPHPLHHHHHQHHNHHHQQSLLRCFPRYRTTRRSASLRV

SEQ ID NO: 175613 - protein, 138 aa, Oryza sativa
  unsure (1)..(138): unsure at all Xaa locations
  Clone ID: PAT_MRT4530_73440C.1.pep
MALARGGGPRWTGSTDRGGGGAPRGADVAPTRRPLVSHAGGETDGPDLPPGRSDGGGGSRTGGXGSSNRPGGHGTRRRSATRRRRKAASGXPAESGDDATTTRVALAADRLGSDATAKRRGGEREKREGFLTDDDRRR

SEQ ID NO: 175614 - protein, 181 aa, Oryza sativa
  unsure (1)..(181): unsure at all Xaa locations
  Clone ID: PAT_MRT4530_73441C.1.pep
HGFAPPSSAPASWRSRSRLAVVTARAHQLTKXAITTFGVVLLACRWREIGSGERDVGAWVLPLSPGRHFIQHGDDRSHPLDRTAQICPASGHRRRXLRCAQRAAKVHRTXPHICVLRQLLGLRAVELTQLTKDGPAQVWPGXGRPGPKVFKVSHYRTVFFPLQCTGTIASKKKKLKPMTPS

SEQ ID NO: 175615 - protein, 45 aa, Oryza sativa
  unsure (1)..(45): unsure at all Xaa locations
  Clone ID: PAT_MRT4530_73442C.1.pep
KKMGIFFKILITKXNTFTCIXKKKNNLSLVMKVPPNEKNKTYLAT

SEQ ID NO: 175616 - protein, 326 aa, Oryza sativa
  Clone ID: PAT_MRT4530_73443C.1.pep
MEIHLHLHFLAILVVVPMLGSPAAGGLCRDSCGGIPVRYPLSIDDGCGSPYYRNMLTCADNATLRLRTPSGTYPVVGADYADPHLVVTDPSMWTCERPFTSVRAAPFSLDTSTRFSLSPRNDYLFFDCDEERVIVEPRPAVCDRYPERCDSTCDSAGYLCRNLPGCRGALEENNMSCCAYRPRAAESLRLMLRHCESYTSVYWRAVGDKFPPYDQVPAYGVRVDFEIPVTTRCLQCEDRRRGAGGTCGFDPVTRDFVCICNDARNSTTDCAGALAKFSPIQSVFIGQTSISISAAVGITGLVWYIRKIKSTKVVTCGVQSNENRFF

SEQ ID NO: 175617 - protein, 99 aa, Oryza sativa
  unsure (1)..(99): unsure at all Xaa locations
  Clone ID: PAT_MRT4530_73444C.1.pep
PPFFPARPPSPWLCGPVLXCFLSLSVRVWXXLGXFAPSFVRLAVALVPWLVAWVVLSPSXAAVASGXALFVPGRLCVAGGRCPFRVALASAPCSRSFPF

SEQ ID NO: 175618 - protein, 195 aa, Oryza sativa
  unsure (1)..(195): unsure at all Xaa locations
  Clone ID: PAT_MRT4530_73445C.1.pep
LCFLVHERGIEVPQRSINAIKKIQPPEDKMQLQSLIGKINFVRRFISNLSGRLEPFTPLXTLKXHQEFTWGAEQQKALDNIKAYLSSRPVLIPPQKRVPFRLYLSADEKSIGSVLIQELEGKERAIFYLSHRLLDTETSXSLVEKLCLCLYFFCTKLRHYLLSNECIVVCKADVIKYMLLAPILKGRVGKWIYAL

SEQ ID NO: 175619 - protein, 80 aa, Oryza sativa
  Clone ID: PAT_MRT4530_73446C.1.pep
HASAIKELTNYDIFRKKVKENFVNGECPLFIFATNSWDSLWILLFHQAPFPHIHQPALSLPSGNLLLPPSPPALARTFSL

SEQ ID NO: 175620 - protein, 68 aa, Oryza sativa
  Clone ID: PAT_MRT4530_73447C.1.pep
FFFFFFFFFFFFFFFFFFLLVQYKPQFSFIHFIRCMSTPTHVKMLFLHLLATPRQVMLQPLAYCNPRA

SEQ ID NO: 175621 - protein, 120 aa, Oryza sativa
  Clone ID: PAT_MRT4530_73448C.1.pep
MRGTSTEQSSLACRTRALRSSLACALHEEPGLASIQHTIVLPPAATRKDGDYLSELRSGASDLSGGRRGGRRVGEAAHAAAEEAGGGGGGGSEEEVSWGIFRVGAGISTRWPVRVVRGLS

SEQ ID NO: 175622 - protein, 113 aa, Oryza sativa
  Clone ID: PAT_MRT4530_73449C.1.pep
LIEHLWNIESSLIHCIYLQLCLFDKDSFVFAGVEIKENFSFDDVHLHQNQNIQMFPWQKTERHTVHYPIVLVHHMLQVCTVQARKREAYYFSCHFRAKAHLVWVFPSHQAKHE

SEQ ID NO: 175623 - protein, 159 aa, Oryza sativa
  unsure (1)..(159): unsure at all Xaa locations
  Clone ID: PAT_MRT4530_7344C.1.pep
HLTIWKPLAPPRCRYFLWXLVAANRCXATDRLRHRGRXLPHPVHCVLCNQHEQSIDHILVDCPXPAXLWRWVLRVINQPDCLPLHEASFHXWLCLSRKKVAKDRHQGFDTIVALVAWMIWKERNNXVFNLQQWPWVEVVKTMAAEAELWRLAKVVVPAL

SEQ ID NO: 175624 - protein, 479 aa, Oryza sativa
  Clone ID: PAT_MRT4530_73450C.1.pep
MVEVLEEEVEVQTLTPSRSEGASGSRNPRHRRRGSRTPPLSDPLRREAGGALLRHPPVNVEPEAPVQRWLDDVANLVTTAQRRLAVSGRSTATGTSRTSTTLSSSARRRARRIATASRRSTAPTSSGASESRRRHDSLYGEQDARVNIERRRDERRATRMGEGASSSGVPRFSSRGGPPLTSTPGGTGYKAFVASLRNVRWPPKFCLNLTEKYNGSINPSEFLQIYTTIIVAAGGDDRVMANYFPMALKAHAVVYAFWNGVRHNRKLEKIASKEPKTTAELFELADKVAQKEEAWAWNSPSTGAAAAAAPETAPRSKRRDRRGKRKPARSDDEGHVLAADGPSRAPRRERATDGKTSYTAPSGKGRSADKWCSVHNTYRHSLADCRSVKNLAERFRKADEEKRQSRREGKALTTPANDQREESKKKAPADDGDDSEGLEFQDILCKVLRDKCGQKSVAKTCGILEFVRDNSRVRYGHIL

SEQ ID NO: 175625 - protein, 88 aa, Oryza sativa
  Clone ID: PAT_MRT4530_73451C.1.pep
ADPIAAAHVRNACATSFSVASLGHTRLDSMVNTWAAHRSSDCRRTWWASRSTGASPESAGRAPPWQHQAQRLELPHPAQHSMEMTMPV

SEQ ID NO: 175626 - protein, 1099 aa, Oryza sativa
  unsure (1)..(1099): unsure at all Xaa locations
  Clone ID: PAT_MRT4530_73452C.1.pep
MVEVLEEEVEVHTPTPSGSEDPSGSRDPRHRRRNSRTPPLRDPPRREDPARLGGSALSLPPDGGRPRHVRARRRLTYRDGSSPQGTLQAAGALLRHPPRQLAASGRSTATGTSRTPTTLSLSARRRAHRSAMASRRSTAPTSSGASGSRRRHDGLYGEQDARINIERRRDERRAARMGEGASSYGVPHSSSXGGPPPTFTLGGTGCRAFVVSLQNVRWPPKFRPXEFLQIYTTIIVAAGGDDRVLEDLCQQFITNFXGTYPRPGEEADLHAVQRKDDESLXSYIQRFYQVRNTIPCILAHAVVYAFRNGLRHNRMLEKNASKEPKITAELFELADKVARKEERKSARSDDEGHVLAADGPTRAPRKGKATGDKLSSTAPSGEGRLADKWCSVHNTYRXLADCRSIKNLAERFRKADEEKWQGXREGKAPATPPDDRRGEAKKKAPANDGDDSEDLXFQIPQGTVATLDGGGGGGGGCAHTSRRGFKAMRRELLAVIPTHEAARKARWSEVNLTFDQSDHPTVLARGGKLALVVSLTIHNVRMKRVLVDXRGGSLSIISPAAFDALKAPGMKLQPSLPIIGVTPGHTWPLGHVELPVTFGDSTNFRTERIDFDVADLNLPYNTVLGRPALVKFMAATHYAYLQMKMPGPSGPITVFGNVKVALACTEQRVDILAVATEPQAPEASASCASKKCLTSADEVPVKEIPLGNDPSKTAKIVRRQAPERXAFIREEVALLLEAGFIREVIHLEWLANPVVIPKANGKLRKCIDYTDLNKACPKDPFPXPRIDQIVDSTAGLGERALPLFKLLXRPGPFVWTEQALSQLKAYLTSPHLGSLGAGGTIGALLGRDPPCGPVPEAPNPREDPEASVGGGEALASGPEAYGPDMARDPPLGPXEQGRPRSSAPDNKDRPHRKVQRPVYFRLLVLGDSQLVVNQVSKEYRCTDPEMDAYVREVRRMERHFNGLELRHVPRRDNAIADELLRIASARAPLPPGTFEERLAQPSVXLAPPRDPGATTSAPSPDDPRASGPEGVDPDTPHILGPYKATRGRYQHLYVAIDKFTKWPEAYPVVKIDKHSALKFIRGIMSRFGVPNRIITDNGT

SEQ ID NO: 175627 - protein, 1742 aa, Oryza sativa
  unsure (1)..(1742): unsure at all Xaa locations
  Clone ID: PAT_MRT4530_73453C.1.pep
VEVHTPTPSGSEGASGSRDPRHRRRDSWTPPLREPPRREDPARSGGSALSPPLDGRRPRHIRARRRLTYRDGSSPPGALQAVGALPRHPPVYTEPEAPVQRWLDDVANLVTTAQRQLAASGCSTASSTSRTSTALSSSARRRARRTAIASRRSTAPTSSGVSESRRRHDGLYGEQDARVNIERRQDERRAARMGEGASSSGVPRSSSSGGPPFTSTPGGTGWRAFMASLRNVRWPPKFRPNLTEKYDGSINPSEFLQIYTTIIVAAGGDDRVMANYFPMALKGQARGWLMTQPPDSIHSXEDLCQQFITNFQGAYPRPGEEADLHAVQRKDDESLRSYIQRFYQVRNTIPCIPAHAVVYAFLNGVRHNRMLEKIASKEPKTTTELFELADKVARKEEAWAWNSPSTGAVAAAAPETAPRSKRRDRRGKRKPARSDDESHILEADGLSRAPRKERATDGKPSSTAPSGEGRSADKWCSVHNTYRHSLADCRSVKNLAERFRKADEEKWQSRREGKAPATPANDRXEESKKKAPADDGDDGTVATLDGGACAHTSRRGFKAMRRELLAAVPTHEVARKARWSEVKLTFDQSDHPTAPGMKLQPSLPIIGVTPGHTWLLGHVELPVTFGDSTNFRTERIDFDMADLNLPYNVVLGRPALVKFMAAIHYAYLQMKMPGPSGLITVFGDVKVALACAEQRANNLAVATEPQAPEASASRASKKRLTSVDEESMLVSFLRANSDVFAWKPSDMPGVPREVIEHRLAVRPDARPVRQKVRRQAPERQAFIREEVTRLLEAGFIREVIHPEWLANPVVVPKANGKLRMCIDYTDLNKACPKDPFPLPRIDQIVDSTAGCDLLCFLHAYSXYHQIRMAREDEEKTAFITLVGTFCYTTMPSGLKNTCPTFQRMTRITLSNQIGRNIEAYVDDLVVKTRHQDTLLQDLAETFDSLRSTRMKLNPDKCVFVVEHDESKPRAPSTGDGPSSPRSPMPKAPNPSEGPEAPLEIGEALAGAPEAYNHDMVLDSPGAPELECPGPVAPDIKDRPHRKVXRPVYFVSEALRDAKTRYPQAQKMLYAVLMASRKLRHYFQAHRVSVVTSYPLGQILHNREGTGRLVKWAMELAEFDLHFEPRHAIKSQVLADFIAEWMPVDDPLPSDLPSLPGDGGDLSADIRAGHWVMHFDGSLNLHGAGAGVMLTSPTGDSLKYVVQLDFRATNNMAEYEGLLAGLRAAAGMGICRLLALGDSQLVVNQVSKEYQCTDPQMEAYVREVRRMERHFDGLELRHVPRRDNAIADELSCIASAQAPLPPGTIEERLVQPSAQLGPLKDPGATTSAPSPDNPRALGPEGVDPDPPRHVAWMTDIRAYLDNNTLPKDRAEAEKLARISKRYVLVEGTLYRRAANGMLLKCISREQGVELIADTHEDILGPFKAARGGYQHLYIAIDKFTKWPEAYPVVKIDMHSALKFIRGIMSRFGVPNRIITDNGTQFTSELFGDYCDDMGIKLCFASPAHPKSNGQVERANVEILKCLKTKTYKVLKNHGDSWLEELPAVLWANWTTPSRATGETPFFLVYGAEAVQQSELSLGSPRVTLYNEVTQDVLRRDDLDYLEERRRRAALRAACYQQSLRRYHQRHIRARSLQVGDLVLRRVQSRLGLSKLSPMWEGPYKVIGVPRPSSVRLTSEDGRELPNLWNIEHLRRFYPXCCNSFLLSRNSGQPPHSPSACAGLAGGYHCALLCIFFPFQAINLVDAV

SEQ ID NO: 175628 - protein, 976 aa, Oryza sativa
  Clone ID: PAT_MRT4530_73454C.1.pep
MGGGRGMFERAASSSPQGALQAAGALLRHPPVDADPEAPVRRWLDDVANIVTTAQQQLAASGRSADTAAFDALKASGMKLQPSLPIIGVTPGHTWPLGIIDLPVTFGNPANFRTERIDFYVVDLNLPYNAVLDRPALVKFMAATHYAYLQMKMLGPNGPITVSSDVKVALTCVELRADNLAVATGRQTPEASVSRASKKRLALADEESALVSFLRVNSDVFTWKPSDMPGVPREVIEHRLAVRPDARPVRQKVWCQAPERQAFIREEVARLLEAGFIRPTFQRMTRITLSNQIGHNVEAYVDDLVVKTLHQDTLLHDLAETFDSLRSTRMKLNPDKCVFGVPAGKLLGFLVSSRGIEANPEKIRAIERMCPPSKLRDLQCVAGCMAALSRFISRLVAPGLEEPLLLYLAATPHAVSAALVVERNESRPGAPSTGDGPSSPQDPMPEAPNPSEGPEAPAGRGEAPTGAPEAYDRDMIRDPPGVPEHEYPGPVAPDIANRPHRKILHNREGTGRVVKWAIELAEFDLHFKPWHAIKSQVLADFVAEWTPVDDPLPSDLPSLLGDGEDPSTNIHAGHWVMHFDGSLNLHGAGAGVILTSPTGDVLKYVVRLDFRATNNMAEYEGLLISKEYQCTDPQMEVYVREARRVERHFDGLELRHVPRRDNAIADELSRIASARAPLPPGTFEERLARPSAQLDPPKGPGATTSTPSPDNLRASGPEGVDPDPPRHVAWMAHIRAYLDNNTLPEDRAEAEKLARISKRYVLVEGTLYRCATNGMLLKCISREQGIELIADAHEGECGVHSASRTLVGKAFRQGFYWPTALQDAQEWVQRCKACQFHAKQTYQPAQALQVIPLSWPFAVWGLDILGPFKAAQGGYQHLYVAIDKFTKWPKAYPVVKIDKHSTLKFIRGITSRFGVPNRIITDNGTQFTSELFGDYCDDMGIKLCFASPAHPKSNGHVKRANAEILKGLGPLRSLGL

SEQ ID NO: 175629 - protein, 128 aa, Oryza sativa
  unsure (1)..(128): unsure at all Xaa locations
  Clone ID: PAT_MRT4530_73455C.1.pep
MATMDTIVAHIMDEQEDIKIKSSKCWNPIRQPATLLTSNGRQICIRPLFSTREYLIESSQSPLSKGSSLISEFHIVWLQSXKQDVASPIIGLWAXNFVWDPGPSGAHVGNKVDLHWEDQQPTERCIDR

SEQ ID NO: 175630 - protein, 107 aa, Oryza sativa
  unsure (1)..(107): unsure at all Xaa locations
  Clone ID: PAT_MRT4530_73456C.1.pep
SRKLRHYFQAHRVSVVMSCPLGXILHNREGTGRVVKWAIELAEFDLHFKPWHAIKSQVLADFVAEWTPVDDPLPSDLPSLLGDGEDPSTNIHAGHWVMHFDGSLNLH

SEQ ID NO: 175631 - protein, 87 aa, Oryza sativa
  unsure (1)..(87): unsure at all Xaa locations
  Clone ID: PAT_MRT4530_73457C.1.pep
VTKVMDGKFHLVSSPSPLSFAFFFLFSQRPQMTRAGEAPPLPGIMAANISPMAGEQKNCGGRTKKXSSFLLPSTRNRTILWTLTSDY

SEQ ID NO: 175632 - protein, 137 aa, Oryza sativa
  Clone ID: PAT_MRT4530_73458C.1.pep
MASKILVFLLAINLLFFTTANACGCACGKCPTPPPPALPPPPPPTPTTPSYHNKCPVNTLKFGACADVLGAISGEVGQVPAQPCCSLISGLADLEAAVCLCTAIKANVLGVVVNIPVKLSLLVNYCGKCVPSGYTCA

SEQ ID NO: 175633 - protein, 113 aa, Oryza sativa
  Clone ID: PAT_MRT4530_73459C.1.pep
MAATALTKVRRLLVVGVNDACSARARAERMRAPLADALAEEHSSWVPGLPLPPSVAVPSSSGADSSVEDLLALIYFGSRPSSTSSAAEPPREPLEPVAVSLQAAAVEDCRPFF

SEQ ID NO: 175634 - protein, 97 aa, Oryza sativa
  Clone ID: PAT_MRT4530_7345C.1.pep
DVSTLQRIKTMTPGHLARLLLETWMVVDAPRNCKQLWWPCLHADTCFGSDLTLIDMFDLKCAHPCGYPDVPLPWGLVQLLSCLGELQSVAAEALRPF

SEQ ID NO: 175635 - protein, 77 aa, Oryza sativa
  Clone ID: PAT_MRT4530_73460C.1.pep
MNCSSFMVFTASFPVGVCRALAISDEALSNRRDSWKGIEEPEGVHADKPRTEKKRVRTEKFETNAEKIETEKFSPKQ

SEQ ID NO: 175636 - protein, 105 aa, Oryza sativa
  unsure (1)..(105): unsure at all Xaa locations
  Clone ID: PAT_MRT4530_73461C.1.pep
LGLHACQSALPIHEGPAAATGEGAWSAWPGGCGGRSGVIGVVGMALRLREEXRWAGQRQRCGLWRAGGARRRARARGSXCGGAREGHGGSLRQHAQERRLGPSAD

SEQ ID NO: 175637 - protein, 64 aa, Oryza sativa
  Clone ID: PAT_MRT4530_73462C.1.pep
FLADNFEAQMFLEKKQTQFISPVGHVGKYIKTCHTVLIQSPISFLVDECLLSNLPKPQGNSYIF

SEQ ID NO: 175638 - protein, 100 aa, Oryza sativa
  Clone ID: PAT_MRT4530_73463C.1.pep
MAVRAAGGCSTAAAATLAFFRLRPLGRAVRPDSARAGWHFSLYGGCRGRQVHGLVDSVLEELRSQRRGRVVRSKLGCVHEPPVQPDRCALSGNYRLESNP

SEQ ID NO: 175639 - protein, 93 aa, Oryza sativa
  unsure (1)..(93): unsure at all Xaa locations
  Clone ID: PAT_MRT4530_73464C.1.pep
MVHTWPRHPATWNGVGRPEYIGAHGDGDAPQEAAVGKKGGREKKGKGGEVLTGSGGRRGGRXRRRRLPDGGLRGRRADGVALDLQKEKRELGR

SEQ ID NO: 175640 - protein, 279 aa, Oryza sativa
  Clone ID: PAT_MRT4530_73465C.1.pep
MAEALCSGSVASPCGEVGVGFAAGLVRGAAAAAALAESVPIGGYSSKSTFPSGRVALTERKARPLPRNLEAAHGQMNLTIGKAMRWWEKCLQPNMREIESAQDLADSLLNAGDKLVVVDFFSPGCGGCRALHPKIAQLAEKNPEVLFLQVNYEKHKSMCYSLHVHVLPFFRFYRGAQGRVSSFSCTNATIKKFKDALAKHGPDRCGLGPAKGLEESELMALAINRDLNFTYTPNQDLVPIADALLKEAAAPGGPWLPLPATATQLFIQGSENSLLSSGR

SEQ ID NO: 175641 - protein, 571 aa, Oryza sativa
  Clone ID: PAT_MRT4530_73466C.1.pep
MAACEDGGRTGSPLTFRRRRGSSGGEDRCGVTGNDGRPRQYEKDLTDDRGRRSSGGFPAKRGGDRGPPRPCGAEGGNGAGQRRPKRRRDAAGVGGGGGERAWGKRRGRGRRPRPRMRGRGNHARKAATWGARGGHGGGWGDGRLGKKMTGGASGPTCRGEREGKTGEGVVNQAQRFLRGGLLMPDMMVVEDKIKCSQILRDKELAFKLQYEDSTMIQLNVCESKKSSSEEGEVLGQVDKIQSSQEQLFGGGQINDQIDSISRKVAEGILELEMDEEDKEKVSLKDSEDYMDSQESEGKSNVHLIKELDLARINLFMKEGQNSDCHFDDVSNREINPVILELNDSKNSGEEVDDFEEIEFMLKQIQSSARKMKQKKGNLEIFKVRGDSSGCKHIQVIICKCYYGEFSYQEGIITGQAELLTYITHFYNELFGNPKQNNLFLNLEGITKVDFEKAYDKEDWVFIYRMLEAKGFPDMLCDWIMRVIKGGKVAVRVNDEIGPYFNNHNGLRQGDPLSPLLFNLAAEALTTLIQRAKNNNLTEGLTVSGNEKVAILQYANDTIFMLSDNLNYAKKI

SEQ ID NO: 175642 - protein, 204 aa, Oryza sativa
  Clone ID: PAT_MRT4530_73467C.1.pep
GVVCLGPRGGERLVLAHGLRLRSDLTLAPRAARLDLPRPFRPRRLPQPLVVAGQDKTSGSDSPPSCAPTRTSWASASSSPHRTWRPSRSSNGSGGGHEPSKEQRHRQDFATTRRHGGRGVLQYLQRWVNPWIPALRDFRKNNSWSTPSNPSMSSRRTVVQIPAPAPRLKRRQIWWQAGIRFKKKTMIALRFAGGVVAASSGSPS

SEQ ID NO: 175643 - protein, 1385 aa, Oryza sativa
  Clone ID: PAT_MRT4530_73468C.1.pep
MQARAVGWGRFPVLVRVWWVVSFVLCVGIAYDDTRHLMGDDDDDEVDYAHMVANFASAPALGFLCLVGVMGSTGVELEFTDDDSSVHEPLLLGGQRRDADEEPGCLRVTPYGDAGIVSLATLSWLSPLLSVGAQRPLELADIPLMAHKDRAKSCYKAMSSHYERQRMERPGSEPSLAWAILKSFWREAAINGAFAAVNTIVSYVGPYLISYFVDYLGGKIEFPHEGYILASVFFVAKLLETLTARQWYLGVDVMGIHVKSGLTAMVYRKGLRLSNSSRQSHTSGEIVNYMAVDVQRVGDYAWYFHDIWMLPLQIILALAILYKNVGIAMVSTLVATVLSIAASVPVAKLQEHYQDKLMASKDERMRKTSECLKNMRILKLQAWEDRYRLKLEEMRNVECKWLRWALYSQAAVTFVFWSSPIFVAVITFGTCILLGGELTAGGVLSALATFRILQEPLRNFPDLISMIAQTRVSLDRLSHFLQQEELPDDATITVPHGSTDKAININDATFSWNPSSPTPTLSGINLSVVRGMRVAVCGVIGSGKSSLLSSILGEIPKLCGQVRISGSAAYVPQTAWIQSGNIEENILFGSPMDKQRYKRVIEACSLKKDLQLLQYGDQTIIGDRGINLSGGQKQRVQLARALYQDADIYLLDDPFSAVDAHTGSELFREYILTALASKTVIYVTHQIEFLPAADLILVLKDGHITQAGKYDDLLQAGTDFNALVCAHKEAIETMEFSEDSDEDTVSSVPIKRLTPSVSNIDNLKNKVSNNEKPSSTRGIKEKKKKPEERKKKRSVQEEERERGRVSLQVYLSYMGEAYKGTLIPLIILAQTMFQVLQIASNWWMAWANPQTEGDAPKTDSVVLLVVYMSLAFGSSLFVFVRSLLVATFGLATAQKLFVKMLRCVFRAPMSFFDTTPSGRILNRVSVDQSVVDLDIAFRLGGFASTTIQLLGIVAVMSKVTWQVLILIVPMAVACMWMQRYYIASSRELTRILSVQKSPVIHLFSESIAGAATIRGFGQEKRFMKRNLYLLDCFARPLFSSLAAIEWLCLRMELLSTFVFAFCMAILVSFPPGTIEPSMAGLAVTYGLNLNARMSRWILSFCKLENRIISVERIYQYCKLPSEAPLIIENSRPSSSWPENGNIELVDLKVRYKDDLPLVLHGISCIFPGGKKIGIVGRTGSGKSTLIQALFRLIEPTGGKVIIDDVDISRIGLHDLRSRLSIIPQDPTLFEGTIRMNLDPLEECTDQEIWEALEKCQLGEVIRSKDEKLDSPVLENGDNWSVGQRQLIALGRALLKQAKILVLDEATASVDTATDNLIQKIIRSEFKDCTVCTIAHRIPTVIDSDLVLVLSDGKIAEFDTPQRLLEDKSSMFMQLVSEYSTRSSCI

SEQ ID NO: 175644 - protein, 93 aa, Oryza sativa
  unsure (1)..(93): unsure at all Xaa locations
  Clone ID: PAT_MRT4530_73469C.1.pep
PVRPSQGAAPACGHRWQHPATWNGVGRPEYIGAHGDGDAPQEAAVGKKGGREKKGKGGEVLTGSGGRRGGRXRRRRLPDGGLRGRRADGVALD

SEQ ID NO: 175645 - protein, 288 aa, Oryza sativa
  Clone ID: PAT_MRT4530_7346C.1.pep
MEGKEEDVRLGANKFSERQPIGTAAQGSDDKDYKEPPPAPLFEPGELKSWSFYRAGIAEFMATFLFLYITVLTVMGVNNSTSKCATVGIQGIAWSFGGMIFALVYCTAGISGGHINPAVTFGLFLARKLSLTRALFYMVMQCLGAICGAGVVKGFQKGLYETTGGGANVVAPGYTKGDGLGAEIVGTFILVYTVFSATDAKRNARDSHVPILAPLPIGFAVFLVHLATIPITGTGINPARSLGAAIIYNRGHAWDDHWIFWVGPFIGAALAAIYHQVVIRAIPFKSRS

SEQ ID NO: 175646 - protein, 950 aa, Oryza sativa
  Clone ID: PAT_MRT4530_73470C.1.pep
MSVKNASSISFEDIEKSISNWKIPKVNIKEIYHVDTNIHKVLTLNLQTSSYELEPGSENISVTYRVYYKAMTTLAPCAKHYTPKGLTTLLQTNPNNRCTTPKTLKWDEITLPEKWVLSQAVEPKSMDQSEVESLIETPDGDVEITFASKQKAFLQSRPSVSLDSRPRTKSQNVVYATYEDNFDEPSISDFNINVIELDDDFVIALEEEEFEIDKELLRREIRLPKNRTKTKRYLEEVDKSFRMKIREVWHNEMREQRRNIFFFDWYENSQIIYFEEFFKTQKKGKGDIRGKSCFPESTYEKSIENNFLEYLVEQQKTQDLSPEQQDSKTIPIEPIILRSHEEPSSHSQFEIYIQPNPNKTLCYHSQTKNSFERKSQNQISAEALCTNNEILVHKRDLFGSIFVISDTNQFGTFNPEEERTKRKLKINDLFQEQNYTKKELKDLKGKIRSLELQNNSCMGQDEEVVNSINSYVKQKWYAEFLGYKIQYDQVQPVARVIEFAEKFPDEIKDKTQLQRFLGCLNYVSDFYKDLAKDRKILTERLKKKPLAWTAKHTQAVKKIKGKVKTLPCLYILDQDAFKIIESDASDHGYGGILKQKKDSREQLVRAMAPKRDLSAQGRTTESSPNKHKYNELGNIIPRTPTVQEKYGNNSSYILNIEEVILPLEFGDSDLNIIKIMGKYFPQHQYFIPEYPGKDQNYYETILCETRSAQIFHTRNGDELGFTKLLIQKIISIDDWDKSSNPYVARTIYSTSCANKRYNYWDYQKAWERVLLVQNSQMKHSWFIRFKEGCEEIPLWFFSNWWLKAGAIPEILPREIIKVITQESKKDLKEYPFILMQFCAETGMPWILKWDLNIQRMEFPATLKRNYYARWWDKFTITPVIEGRKFRAKNKKSHVAQLKEDITRELLKARPELTKGELQLQVYETMFKRLEESPKSSSTCRSLDEDMVQCS

SEQ ID NO: 175647 - protein, 178 aa, Oryza sativa
  Clone ID: PAT_MRT4530_73471C.1.pep
PGTNPARPTKGPPPQRGRRKPLARHHRQRRGHGTRTAAAPTRSNGHRRRQRVPRTPGKRPTKGKKKEKEGSAHRDARRQRGGRRQRTVATGLLRKTTRRSSGDGRRSGWGGRARPRSATEEGGAPADFRRRGAAAEVLLVLAELREATARVGVDRSGGATRLESGAAAERGGSRGYGA

SEQ ID NO: 175648 - protein, 328 aa, Oryza sativa
  Clone ID: PAT_MRT4530_73472C.1.pep
EICKQEIKNLLDKSLIRKRSSPLSCAAFYVENAAEKERGVPRLVINYKPLNKVLQWIRYPIPYKHDLIQRIQGSKIYSKFDMKSGFWQVQIKEEDRYKTAFTTPFGHYEWNVMPFGLKNAPSEFQKIMNEIFLPFTSFIIVYIDDVLIFSQDVDQHWKHPNIFYKIIVQNGLVVSAKKMKLFQTNVQFLGYKIQYDRVQPVARVIEFAEKFPDEIKDKTQLQRFLGCLNYVSDFYKDLAKDRKILTERLKKKPPAWTAKHTQAVKKIKGKVKTLHCLYILDQDAFKIIESDASDHGYGGILKQKKDSREQLVRFTSYRYCIPILISGD

SEQ ID NO: 175649 - protein, 157 aa, Oryza sativa
  unsure (1)..(157): unsure at all Xaa locations
  Clone ID: PAT_MRT4530_73473C.1.pep
KGRPAPTRGPHTSASQRGRXTVDMVHTWPRVRVHHVDGPDRPEPIGRPRGAAAXGHRHDTKPARPSQGAAAACGHRRQQPATWNGGGRPEDSGAHGDGDAPQEAAVGKKGGREKKGKGGEVLTGSGGRRGGRXRRRRLPDGGLRGRRADGVALDRRT

SEQ ID NO: 175650 - protein, 1047 aa, Oryza sativa
  unsure (1)..(1047): unsure at all Xaa locations
  Clone ID: PAT_MRT4530_73474C.1.pep
RTTTCDLSLTILIQQKAFLQSRPSVSLDSRPRTKPQNVVYATYEDNSDEPSISDFDINVIELDVGFVIAIEXDEFEIDKELLMRELRLPKNRTKTKRYLEEVDKSFRMKIREVWHNEMREQRRNIFFFDXYENSQIIYFEEFFKTQKKGKGVCNEERKQEHDKSVIKVFSDYGSTSKTYITYSPFKLIQQSQDIRGKNCLPESTYEKSTENNFLEYLVEQQKTQDLSPEQQDSKTIPMEPIILRSHEDPSSHSQFEVSRPQSETYLLPYSYPITTILIPTANNEQQKGNFITTPKDKVAKSFDIPNNFPNTNDQMSNSLTKIQASSYDKLTLQKEVSTFYNKIDSSVNRDLESYITRVINTSFYNIIDDPKGITRSKFRLFHNVLFSKIYIQPNPNKTLCYHSRTKNSFERKSQNQISAEAFCTNNEILVHKQDLFGSIFVISDTNQFGTFNPEEERTKRKLKINDLFQEQNYTKKELRDLKGKFRSLELQNNSCMGQDEEVVNSINSYVKQKWYAEVRYKFNDGFQFSYKTLIDSGADVNCIREGIQFRIRDKNVKLKFSSKPEQTMLNYLKEIITQKEQFILQKDRKILTERLKKKPPAWTAKHTQAVKKIKDCKAAKDVLQKDVENLVSKQNFARWQAILSCFDFEIEHIKGELNSLPDFLSHEFYRAMAPKRDLSAQGRTTESSPNKHKYNELGNIIPRTPTVQEKYGNNSSYILNIEEVILPLEFGDSDLNIIKIMGKYFPQHQYFIPKYPGKDQNYYETILCETRSAQIFHTRNSDELGFTKLLTQKIISIDDWDKSSNPYVARTIYSTSCANKRYNYWDYQKAWERVLLVQNSQMKHSWFIRFKEGCEEIPLWFFSNWWLKVGAIPEILPQEIIKVITQESKKDLKEYPFILMQFCAETGMPWILKWDLNIQRMEFPATLKRNYYARWWDKFAITPVIEGRKFRAKNKKSHVAQLKEDITRELLKARPELTKGELQLQVYETTFKRLEESLKSSSTCKSLDEDMVQCSQIKPSSPIPPYYSIKQDNDSDEGISDFNPTHI

SEQ ID NO: 175651 - protein, 649 aa, Oryza sativa
  Clone ID: PAT_MRT4530_73475C.1.pep
MAKPGEEHAICSNYGKNHHTLMPRPAEVINRELYEAPGTRRPHCSRGPSIIENTPMPFVIQFGSQPPAARKRASAKAKKERRALMLEVRTLLKEFVVAEIKGDIQAAQKLRTKAANRCSSTASLRASTPTFAPKPPSPTVQHMEVGLLEALEAVSDNLHRHISHARHMDSPHPLRNYRRKYHKVQRLHQLVSSRIAQSSVPEEDWSLDTSILIGKVCKYPSILEPPYDLFPDEWAHEPTKIKEKVRRAIMKEYWKRRYGEHILLPGPTISFDYNTYAPCQQSTWEPCLHLSAVDKEQISSKHGTSEQIGKGCADVSKGPAPTGGPYSSAAQGASTRWTRSTAAEAAPWTRTSEVVHGTDGLDRPKADPTATGGAAGARHGSKLAGQTTARGGAATRGDGRRQLTRAKAAHAREQRRGAARGRRQPAARHHRQRRGHGVRSAAAATRSDDHRRRQHVARTPGRRPTKGRKREREGSAHRDARRRRGGRRQGTVATGLLRKTTRRSSGDGRRSGWGGRARPRSATEEGGAPADFRRRGAAAEVLLVLVELREATARVGVDRSGGATRLESAAAAERGGSRGYGATEVERGNGAVAELARAAAKLAVAAAQCGGDGSGDGSGWRVVGVRRHTGVAWGARESAREGAVSWGNG

SEQ ID NO: 175652 - protein, 108 aa, Oryza sativa
  Clone ID: PAT_MRT4530_73476C.1.pep
NPTHPNHPTQKNSSPLPKKFSKTIPTKKSPRLNIKEMIRASPPSKQSSKVLRPPPLGGWIKKKKIIASIVCVCLPSSTNDEKPFFLKKKKKKKKKKKKGGRLRSKLRR

SEQ ID NO: 175653 - protein, 323 aa, Oryza sativa
  unsure (1)..(323): unsure at all Xaa locations
  Clone ID: PAT_MRT4530_73477C.1.pep
PLSAQSLLSFPRPARPLSLPLGPATSLGPLGSLSLKSALPPSPVFPSLSPRQVGPEAPPVIFFPNLPSPQPPPXAAPCSPRRRLPLAVPSPVRAWARSPPTSAPFPPCPXKPLPSRAPLRLPTSPADPTSPGPDLHPRALYPAPSCSPLSFPTPPRAPCAFPRSPHAGPHRRRSPAFSRRVPQPPSPSPAFPRPPPXLRPPPPWLCPPVPLAGLPCAPPCACPPAVWPLPRPXPPPPPPRPPPALPPGRPPPPPPPARRPRFPPALPAPRPPPPRGAPSKSVPPAGGPLRASRPGAPPPAPSPPGPAPSAPGPPGPGLPRPPP

SEQ ID NO: 175654 - protein, 314 aa, Oryza sativa
  unsure (1)..(314): unsure at all Xaa locations
  Clone ID: PAT_MRT4530_73478C.1.pep
HQQRGGQRRHAGPTCQRVKGXRAHGGHGPHVASGARPPRGWPRSAXADRAAEGSGSQGHRRGTKPARPSQGAAAARGRRQPAARHHRQRRGHGARSAAAATRSDGHRRRQRVARTPGKRPTKGRKREREGSAHRDARRQRGGRRQGTVATGLLRKTTRRSSGDGRRSGWGGRARPRSATEEGGAPADFRRRGAAAERREVVRVATALRRWRGEMERWPSLPGRRQSWRWRRSRAAATLVTGNGGRSSPECGGARERRGEERGRECRARETRGNGRGEHGGAFYGLGKAGSRPDVAESAGEVGRRRGVVEGVLVG

SEQ ID NO: 175655 - protein, 176 aa, Oryza sativa
  Clone ID: PAT_MRT4530_73479C.1.pep
MGGGSPMMGDACIEWVTAANIGLFGGVACGGGEPQEMGKTAPQGQLAATGMRKRRGEGWLHSHRQLNWEDDDANSPVQETTTDDDERRPATRSQGGTARLNVDGGAPAVLGGCEGAAGVPLLRAHPTAATDANGDGYRGGATRLEGRRRRRRLGQRGGGATGDEGAQDLGQTEEDD

SEQ ID NO: 175656 - protein, 292 aa, Oryza sativa
  unsure (1)..(292): unsure at all Xaa locations
  Clone ID: PAT_MRT4530_7347C.1.pep
MEGKEEDVRLGANKFSERQPIGTAAQGSDDKDYKEPPPAPLFEPGELKSWSFYRAGIAEFMATFLFLYITVLTVMGVNNSTSKCATVGIQGIAWXSFGGMIFALVYCTAGISGGHINPAVTFGLFLARNLSLTRALFYMVMQCLGAICGAGVVKGFQKGLYETTGGGANVVAPGYTKGDRLGAEIVGTFILVYTVFSATDAKKNARDSHVPILAPLPIGFAVFLVHLATIPITGTGINPRRTWGCHHLQQGHAWGHAGEDHWIFWVGPLMGGALVAIYHQGVIRAIPFKSRW

SEQ ID NO: 175657 - protein, 62 aa, Oryza sativa
  Clone ID: PAT_MRT4530_73480C.1.pep
INFTSYSSNVDVTILFLIYKGIQEPRNDVAASNRAGKLLSIWYTKIYLYISNHKTILQKNSK

SEQ ID NO: 175658 - protein, 295 aa, Oryza sativa
  unsure (1)..(295): unsure at all Xaa locations
  Clone ID: PAT_MRT4530_73481C.1.pep
PRVRPRVRPRVRSCNVQEWEAYDPYRSRWMTLPKMPHNECFMCSDKESLAVGTELLVXGKEILSHIVLSYSILTNSWSPGVDMNAPRCLFGSASFGEKAIVAGGMDAQGRVLRSAELYNSETKRWITLPCMNKARRMCSGVFMNGKFYVIGGMASNTXGADCGEEYDLEKGTWRVIENMSEGLNGASGAPPLVAVVENELYAAQYARKXVRKYNIKDNXWTTLGELPERPEAVNGWGIAFRGCGERLLVIGGPRVMGGGMIELHSWIPREGPLRWNMIGSKPSGNFVYNCAVMGC

SEQ ID NO: 175659 - protein, 75 aa, Oryza sativa
  Clone ID: PAT_MRT4530_73482C.1.pep
AIIREHQENRAAGAGDGDGDDKEDLLDVLLRIQREGDLQFPLSTERIKTTVGDMFAGGSETAGTALQWIMAELIR

SEQ ID NO: 175660 - protein, 153 aa, Oryza sativa
  Clone ID: PAT_MRT4530_73483C.1.pep
SKQKQKPRKKEGKPHAEAESGVAAGWTPPTPSTSPSPPSSAPPSPPPPPTICTARPSTSSSASPAPLTATTAAATATSSTPTTTMTTTLPETTIAAPPFPSHRAFRHFTPAEKESQLSHQLPPKELDLWLDLLHQDPLFLLSVHLKLLKIQMT

SEQ ID NO: 175661 - protein, 40 aa, Oryza sativa
  Clone ID: PAT_MRT4530_73484C.1.pep
LVLSCLSAVCRRVQLLPLRPVNSAHPRMCIPPRNDGLTWG

SEQ ID NO: 175662 - protein, 68 aa, Oryza sativa
  Clone ID: PAT_MRT4530_73485C.1.pep
KKLGFPWTGKSPKEGRKKGNRINFNAAGADFGSHCHRALWLSPRRAAPTEAGGGGLPCEPSGLGRTRG

SEQ ID NO: 175663 - protein, 63 aa, Oryza sativa
  Clone ID: PAT_MRT4530_73486C.1.pep
HPPRPDARLVKASRALPLPLHESQSSLHHSCVPQGTKISLFLESSRHLLSFLCFKISKVMNHS

SEQ ID NO: 175664 - protein, 72 aa, Oryza sativa
  Clone ID: PAT_MRT4530_73487C.1.pep
SSLQPKRSAAAILLPVSFKQVTFGKVVAVGPGVRNISCNLLPFYIKKGVTLILPSYGRLVVKLHAPKLGTFC

SEQ ID NO: 175665 - protein, 80 aa, Oryza sativa
  Clone ID: PAT_MRT4530_73488C.1.pep
MTSTSHWAGAGRTRSLQTRKNVSVPLLGGTDYSINVGGMSRGPSASLPKPSKLSKHQPSPLGETIGQSLRAKTKGFAIKH

SEQ ID NO: 175666 - protein, 121 aa, Oryza sativa
  Clone ID: PAT_MRT4530_73489C.1.pep
MTERGAPHRKTAQAPLCRFGRGRYVRFFALDQRNPEVTFDKQSARLLPRSSAFPEDAHFKLHLMAGDFLAILALKPGMNLTGTDIPTPGVSTPAPARDESQEALIIPTGRGEACDRPPVAT

SEQ ID NO: 175667 - protein, 65 aa, Oryza sativa
  Clone ID: PAT_MRT4530_7348C.1.pep
RFSANKGEWKQRFPHPMVKMGPIKVQPGRCGQIRVNCKVVNPLPSSPKVKLAGKDQETGGPVPAS

SEQ ID NO: 175668 - protein, 349 aa, Oryza sativa
  unsure (1)..(349): unsure at all Xaa locations
  Clone ID: PAT_MRT4530_73490C.1.pep
MAERAVAHNLSPSASGDDGEQNPRRRARTPPSPSRRSLGREEALEGVERSATSPPTGNGEGRRDGERRLLVYGDGSTPQGALRAAGALLRHPPVVPDPETPARRWXGSVSSRRRARRAAAVTRRSSAIPSSTPPTQEDVRGGPDARLNIERRRNGRRAXHATEGASSSGAPLRSGHGGQPPMSPVGGAGCRAFVASLRNVRWPPRFRPTITEKYDGSVNPAEFLQIYTTGIEAAGGDDRVMANFFPMALKGQARGWLMNLPPASVHSWEDLCQQFTMNFQGTYPRPGEEADLHAVQRGDDESLRSYIQRFCQVRNTIPCIPAHAVIYAFRGGVRHNRMLEKIASKDVTS

SEQ ID NO: 175669 - protein, 160 aa, Oryza sativa
  unsure (1)..(160): unsure at all Xaa locations
  Clone ID: PAT_MRT4530_73491C.1.pep
ILLLPPRGTERGRREELRGSPPSCFPARRGRKRGRREGVCRSPRGPPPPRSRSEPSPRGPPPPKPXPLRGRRPRARGRRRRSTPDPRRRHCPPAPALRIRARRRGAGPWRGGTESDDGMARPESTSVAPSLSRGSVPTEVLLSHIVPCGSVATIPQTGCR

SEQ ID NO: 175670 - protein, 137 aa, Oryza sativa
  unsure (1)..(137): unsure at all Xaa locations
  Clone ID: PAT_MRT4530_73492C.1.pep
MTERGAPHRETTQAPLCRPGPPFYLVRGHHMGLXLPKKGNMXFTMRASLQPEVTSDKPSARLLLRSPXLPVDAHFNLHLMASDFLVILALKPGMNLTGTDIPTPGVGTPAPARDESXEDLIIPTGRGEACDRPPVAT

SEQ ID NO: 175671 - protein, 341 aa, Oryza sativa
  Clone ID: PAT_MRT4530_73493C.1.pep
GGEGGGGGTWPGRKRGGTAVELGRGGLEEREVEAVLRCGGEACGGPEDEEVSTNSPPAAPPTAKVGGPGSRQRYEEHPSVDILAEEPASTSCRLQRGRAKEPRRQRRRRRRRVGRGGRGGDKPEREFGPLRSVTPYSYVLVDLCVKEYRELESEPEFRPEVTSDKQSTRLLPRSPAFPVDAHFNLHLMASDFLAILALKPGMALTGTDIPTLGVSTPAPARDESQEALIIPTGRGEACAAAVAAARSGAAPATRTPAMMVGAGMGDGGGLPSPGSAGGYPPPPRSAGGGPPPPGSAGGHPTLPRFAGGALPAAGASSLDPGKEYDVNGGGSGLRMTATVGG

SEQ ID NO: 175672 - protein, 67 aa, Oryza sativa
  Clone ID: PAT_MRT4530_73494C.1.pep
VLTPLHAYKVGVVEAHGGGIHNNDAPRLYLQFARFAAKDFTVIKWSDGWPITHCHNIVLELERSASS

SEQ ID NO: 175673 - protein, 420 aa, Oryza sativa
  unsure (1)..(420): unsure at all Xaa locations
  Clone ID: PAT_MRT4530_73495C.1.pep
MGSRDGFSENKLLDDFGCGEIXPDQSMSPDEIGTIIINNSISXDRPSLKXVPKDVRTYDVERVRNKEQLSTRVSCGRVHPIIENILDKCGVIAPNLPTKTDDLSHSADHGWAIREKVVNGXILANVHAGHMRCTCNKPTLAPLXVIKRLLLLVLKPVERSDLSHLISXWSSYDYYXSSTSGVAILPLSPLXVVEFRLXLVLDQRCSDSPTISTLSGRVXTTTWSSTSGVAILPLFPLXVVEFRLLPGPRPAWLSYDYYLVLDQWCSDTPITSTPTKLISGTQYRQVFYPEIPYHDXHLALKPILLSLYAVLTRPPRNLRELRLGTPRADKALSDRDGKEKSRIRRFIEEGKQGGVDLEVGPPAGGGRKRGPTPSDDGWPRRGPRIGCGEAEPARTHAEVAQIPSWQCGVDDEAGAGWGSA

SEQ ID NO: 175674 - protein, 75 aa, Oryza sativa
  unsure (1)..(75): unsure at all Xaa locations
  Clone ID: PAT_MRT4530_73496C.1.pep
MGHTYLHSAGSRCNVGARLSADDMTGVRPPGMNLAGTDIPTPGASTPAPARDECLEVVIIXTGRGEACDRPPVAT

SEQ ID NO: 175675 - protein, 470 aa, Oryza sativa
  Clone ID: PAT_MRT4530_73497C.1.pep
MANGESHVLALPFPAQGHVIPLMELAHCLVEHGVKVTFVNTEVNHGRILGALDDASHGGELGGVDMVSISDGLGHGDDRSDLGRLTESLLLAMPSELEKLVGRINASASAAGGGGREVTWMVADVNMAWAFPVAKKLGLRVAGFCPSSAAMFVTRIRIPELVRDGVLDESGMPRWRGAFRLAPAMPPVDTAEFSWNRAGDPRGQPAIFRLILRNNAATHLAEAIACNSFEELESGAFAVDVPGRVLPVGPLASGGKPVGGFWPEDASCAAWLDAQPAGSVVYVAFGSIAALGAAQLAELAEGLALTSRPFLWVVRPGTASERCLDGLRRRAAPRGRVVGWCPQRRVLAHASTACFVSHCGWNSVVEGVSNGVPFLCWPYFADQFLNQSYICDVWRTGLRMAAPAPATAPADEASARLVARQLIRRKVEELIGDQETKARAIVLRDAASLAVGDGGSSRRNLTRFLDLIRS

SEQ ID NO: 175676 - protein, 340 aa, Oryza sativa
  Clone ID: PAT_MRT4530_73498C.1.pep
MRTGGTPTMRRSTRSPRSGRSPHQRPTQSTYKPTYAKTHRRISTSGIGMAIPLRYLRIPSGDTKALSLISPDTDSRRKATLLSTTSQTFRPPCRQQLDRLPTYCIGVIMVNKSNTGFGQQDVGWSRYDYSSVAVLLPRLQVIEGHLLTGSQPVDRSDLSYICFKWSSYGYCLVLDQRCSVPPTTSTFSGRVTWSSYGYCLVLDQRCSVSPTTSTFSGQVAATACSSTSDVPISPTTSTSIKLVAAPLGGQGDTHNETIDRINTQHNRHRSHNIEVYIRQDTPPDIDFRDRHGYSPTVSPDTVRRYESAISDLAGHGFEEEGYPVVDYESDLQTAMSTTVR

SEQ ID NO: 175677 - protein, 82 aa, Oryza sativa
  Clone ID: PAT_MRT4530_73499C.1.pep
RALPNDVLAQAYPISRDEAQRLMHNRGDEPGAFTPRQCTELSTTLDNCWHSPLRACSRTQILYLARSYAPVLLICTVHSFDS

SEQ ID NO: 175678 - protein, 244 aa, Oryza sativa
  unsure (1)..(244): unsure at all Xaa locations
  Clone ID: PAT_MRT4530_7349C.1.pep
VDLSTNQLTGDLPVCLNVNVNNRVVKFDGNCFSDDPEHQHETKYCQQPHKGRGSNKDVGLVVTVVGVVFIVLVLSLILMASNRRSCQRVLAEQQLLQKQMQDNSTSGMSTELPGLARRTSQAVKLGTQIMPMYRAFSLEELKEATKSFERSAFLGEGSIGKLYKGKLENGTLIAIRCLALHQRYSIRNLKLRLDLLAKLRHPNLVXLLGHCIDGEVDESSVKRVFLVYEYVPSGTFPSYLSGKE

SEQ ID NO: 175679 - protein, 89 aa, Oryza sativa
  Clone ID: PAT_MRT4530_734C.1.pep
SPPPRSSAVSTSVSAPTSTPSAPSSPTARPRAILADRPRPPPVLAVRASPLRPPRSLAVTAPPRLACRCRSSFARPLSPVLLLHGFMSF

SEQ ID NO: 175680 - protein, 146 aa, Oryza sativa
  unsure (1)..(146): unsure at all Xaa locations
  Clone ID: PAT_MRT4530_73500C.1.pep
LLFLSQIILTERGAPHRETAQAPLCRPGPPFYLVRRHHMGLXLPKKGNMLFTIRANLQPEMTSDKQSARLLPRSPAXFPVDAHFNLHLMASDFLAILALKPGTNLTGTDIPTPGVGTPALARDESQEALIIPTGRGEACDRPPVAT

SEQ ID NO: 175681 - protein, 137 aa, Oryza sativa
  Clone ID: PAT_MRT4530_73501C.1.pep
MGHTNLHSAGSRCNVGARLFADDVTGVRPPGMNLAGTDVLTPGVPTPALARDECLGALIIPTGRGEACERPPSHAATGHKPDKHALRRIECGVTRSGSGRPSPRGRNGSGPTPRGNRGRGGHVTVGPDPPEGVGPRE

SEQ ID NO: 175682 - protein, 209 aa, Oryza sativa
  unsure (1)..(209): unsure at all Xaa locations
  Clone ID: PAT_MRT4530_73502C.1.pep
MAAARGEGGEGGEMEGMGVGWRREGPDFIRARGRGGRPMATRRAAWLAVMATGGRRGAGLGAARHGARRDDDGDATGERHGSSAGREAATRWASGXGASDVTAGRGLRRRWLARRGSGMAMVTAWQRRRVARSDDGTXRRRRAAARGARRRARGARWRGXQRRGSGGGDGARRRDGDGDGAAAATRGSGRGRARGRRGSRARGPRRALR

SEQ ID NO: 175683 - protein, 424 aa, Oryza sativa
  Clone ID: PAT_MRT4530_73503C.1.pep
MEEILESEYSAAAAAGDAASFVLSRLPHPDTTASAAAAFVVDVAGAGGGRTTTLSFVALRRAALSLASGLRFGLGLRRGDAVLVLSPNSLLLPPIVLGVLAAGGVVVAADPGSTAEEVATVARSSGAVVVVAAPEVAEKVAGAGVPLLLTSRSMDPRALSAEELMDDGDPTALASPEASAAAARPRPSDVAFVFYSSATTKTAATMTHADLIAAVSGASLPEEGRVCLASLPICSVHGLPLLALALPAAGVTTVLLAASPSSDPTAAMEAAAAHGATDVVATPDVAAALAAPLTMLSSLRRVTVVPALATTEARQAFRRWLPWVELTEMSGSPEKMMASASEQVQVAPDAASAAVIAHIFASLRYINNVFIPSPKPMNTFYFCNTDYRKVPLLKKIQKTVLGDIISKSTANKILREHPEIISKL

SEQ ID NO: 175684 - protein, 156 aa, Oryza sativa
  unsure (1)..(156): unsure at all Xaa locations
  Clone ID: PAT_MRT4530_73504C.1.pep
RRCLTGRRSFELLKCYSSDVTELGAPHRETAQAPLCRPGPPFYVVRGHHMGLXLPKKGNMLFTMRASLQPEVTSDKHCTRLLLRSXALPVDARFNLHSMASDFLAMLALKPRMDLTGTDIPTPGVSTPAPARDESQEALIIPTGRGEACDRPPIAT

SEQ ID NO: 175685 - protein, 75 aa, Oryza sativa
  unsure (1)..(75): unsure at all Xaa locations
  Clone ID: PAT_MRT4530_73505C.1.pep
EDSEDCLGRYYLKINREQDLEGAPRNYLKTVAALHASLCLVAACLGVGGLFIIRDLCTXCHPLSNTPRFLSLSSC

SEQ ID NO: 175686 - protein, 69 aa, Oryza sativa
  Clone ID: PAT_MRT4530_73506C.1.pep
LVCTVHLITTNNFVRKQVGCLVVVITNQVKVKPAHCKRIGGRVESRGSHFWSQKPHKKKKKKKKKKTRD

SEQ ID NO: 175687 - protein, 274 aa, Oryza sativa
  Clone ID: PAT_MRT4530_73507C.1.pep
MAGIVVVFDFDKTIIDVDSDNWVVDGLGATEEFERLLPTMPWNTLMDTMMGELHASGKSLADVAGVLRSAPLDPRVVAAIKACYGLGCDLRILSDANRFFIDTILDHHGLTGYFSEINTNPSAVDAATGRLRIAPYHDFHAGPHGCGLGICPPNMCKGQVLDRIRASAGAAGKRVIYLGDGRGDYCPSLRLGRDDFMMPRRGFPVWELICEDPSLLHAEVHSWADGAEMEETLLRLVGRVLLEERNLPPLDCKLESLPAVAVQDGMPMTLRIKN

SEQ ID NO: 175688 - protein, 94 aa, Oryza sativa
  Clone ID: PAT_MRT4530_73508C.1.pep
MTGVSQPVLSKNPGNARTPFAADNVTFRAHGDSSSWNSRCYGLSLSDEQLADLAFQGLSAAIRERFFCHEFDNHAHLMQIVSAHESRLQEAKEY

SEQ ID NO: 175689 - protein, 172 aa, Oryza sativa
  Clone ID: PAT_MRT4530_73509C.1.pep
MASPRALSLLLVLLGMALASFPSAASASRDLRPRRAGFVVRGRVWCDTCLAGFETPASTYIAGAKVKVECRSKSTGAKTCSFEGQTDHTGTYNIPVNDEHEHELCESVLVSSPDAKCGKIVAGRERAPVFLTNNNGVTSNVRLANALGFQKDAPLAACAQILKMYEEVDDRV

SEQ ID NO: 175690 - protein, 63 aa, Oryza sativa
  Clone ID: PAT_MRT4530_7350C.1.pep
LEWAELVVELSNSITPQCMGVVVARHFAAGRALDQLPRRRRRSSSGRGERPTYPVLPFLFPLL

SEQ ID NO: 175691 - protein, 101 aa, Oryza sativa
  Clone ID: PAT_MRT4530_73510C.1.pep
NRLCQYLILFFFFFSPSSSFFSSSSSLFQREPREERGEGERGGGAPVAGGRRRRRPRVFPSVAYPGKAVAGGEGEGGGRNGDGRSSPPPLKGVAVVACCGG

SEQ ID NO: 175692 - protein, 403 aa, Oryza sativa
  Clone ID: PAT_MRT4530_73511C.1.pep
VAAIGCTQCLKYSPYVFEAIKDLAEMGLSSKEFSLIFSQAPNRGGKAPGDSLDAQRWWNRYVEAQCCIASHDYKGGLDIYLDLMQRFPNNVHILLEIAKVEAIIGRNDEAIMNFEKARLIDPNIMTYMDEYAILLKSKSDYTKLNKLVHDMLHIDPARPETCLALAALWERKDERKALTYAEKSLRVDDRHITGYIMKGNLHLLLNRPDLAVTDFRGAQELRADLRSYQGLVRAYLALSKCKDALFTAREAMKVMHQSAKALKLVGDVHAISSSGREKARKFYESAIRLEPGFLGAALALADLHVAEGRNKDAVLLLERYLRQWTDDSLHIKLAQVFAATNMLSDALSHYQSALRINPHNEAAKKGLERLEKQMKGVDPDAPEEDEENEADDVDGDQDDAELL

SEQ ID NO: 175693 - protein, 71 aa, Oryza sativa
  Clone ID: PAT_MRT4530_73512C.1.pep
MRLDLLDATFLSRLCGDVAGRVSVLVPDVPTTTSLVKALGSWSGPRYAEVLVAAPDAAAPDTVVWKACSRG

SEQ ID NO: 175694 - protein, 100 aa, Oryza sativa
  Clone ID: PAT_MRT4530_73513C.1.pep
LHNPNPRAIGLASTGSYLSPRAGGKLMPRRANITFTEAQLSLKTSGTPELLSLLITLRSECMRMKVHGTVDTVKHVGFRIISFEIRQHTERNEFMDDQRS

SEQ ID NO: 175695 - protein, 65 aa, Oryza sativa
  Clone ID: PAT_MRT4530_73514C.1.pep
FLCFGFYNQQRRQRVLDRLYLAGPVNVITKSMDCLERQLFAPPLNMYRQSIMRPRMGMVKLPISH

SEQ ID NO: 175696 - protein, 102 aa, Oryza sativa
  Clone ID: PAT_MRT4530_73515C.1.pep
MAALTSGEQQRKAVDSQSTSQNNGEYLLLAVVTSIGMRTRRSHTGPMAIRASSRASLAKTLVSFYLLASRLGIDGAGHIQIDYTGHVPPVWWCRAQPGNAPH

SEQ ID NO: 175697 - protein, 96 aa, Oryza sativa
  unsure (1)..(96): unsure at all Xaa locations
  Clone ID: PAT_MRT4530_73516C.1.pep
LSRIRLKDKWAKNTKFRRSNKPKXFTSLRRGANEEAICXKWDRLAQPMVRPNXWVRPNLPWRHLIHGFDGRLRXLPNDGWRVLPTFPTIATIILKL

SEQ ID NO: 175698 - protein, 129 aa, Oryza sativa
  Clone ID: PAT_MRT4530_73517C.1.pep
LAIATHPVLPRGRSRCTLNDGWRAFLAFPTVIPASPSFKNMAEKTSREFAAPSANNVPIGPHIDLGDGYFDLKTSLIRMAQASPFCGKPNEDASAHMEQMLYGVPLEVLPDGQDQCLSRKNLKLPVDKG

SEQ ID NO: 175699 - protein, 385 aa, Oryza sativa
  Clone ID: PAT_MRT4530_73518C.1.pep
MTELAAGAVSSLLVVIRNEAVLLGGVRDDVQFIKEEMESMNSFLGHLARSAPQGGEHDEQVRTWMNQVRLLAQDCNNCIDLYLYSGNPEIHRTKGRLRRHLWWVYWSLRKMVAQHRAAIQLRQLKDRARDVGKRRLRYGVEIPATTKAAAPDATGGYVAEDDEEEDEDDREGQFAVATPTLAHHSARWPVFEPPSLDDYVEAKLLEWIGGVPGNAIVTLSIAIVAPDADNKEVLAIAHETLVAPNYYYRRSIMVNVPAVHLDVLPLRPKEVLYYILRELEREEAAGSQKQPTDQDEKTKKLNEQTGVEEETAVRQGGGGEREEDEKDERGDGEEEGKEERRDMEKGGEERKEQQQEEQEKEGRKEEQNEGAQNRLKDIAIHHENL

SEQ ID NO: 175700 - protein, 51 aa, Oryza sativa
  Clone ID: PAT_MRT4530_73519C.1.pep
MVERGEVVVIVADEGVDLSGMRRNELATTVPGMVHAQRIDEEVTGAEGIED

SEQ ID NO: 175701 - protein, 50 aa, Oryza sativa
  Clone ID: PAT_MRT4530_7351C.1.pep
TRLELSPRLFFSFGGTMRQELLLIITHNHHLSLSLACSFYITRLLFFTSA

SEQ ID NO: 175702 - protein, 1187 aa, Oryza sativa
  Clone ID: PAT_MRT4530_73520C.1.pep
MTELAAGAVSSLLVVIRNEAVLLGGVRDDVQFIKEEMESMNSFVGHLARSAPQGGEHDEQVRTWMNQVRLLAQDCNNCIDLYLYSGNPEIHRAKGRLRRHLWWVYWSLRKMVAQHRAAIQLRQLKDRARDVGERRLRYGVEIPATTKAAAPDATGGYAAGDDEEEDEDDREGQFAVATPTLAHHSARWPVFEPPSLDDYVKAKLLEWIEGVPGNAIVTLSIAIVAPDADNKEVLAIAHETLVAPDYYYRRSIMVNVPAVHLDFLPLRPKEVLYYILRELEREEAAGSQKQPTDQGEWEEEDPDPWQDYYKKCGIYRSKKGVLDKIKRNIKKMNIYEKLDKIKSDIREGQHKSGKLLLLKLQEKGADQVDLHVLLQLLVLQSQQDQAKNKAVDTHKLPEWNDNLIEKLAMRLKDHMEADEKTKKLNEQTGVEEETAVRQGGGGERKEDEKDERGDGEEEGKEERRDMEKGEERKEQQQEEQEKEGRKEEQNEVRKETEGRKEQVAGEEEEKEDHDADNDEDSNDDDDDEEEEEEDDDDEEEPIHLHEDQYEQILREVFTKNASSKAQEQDKLVAEQATKTAATTLDEERIKQMINEAKQDVLRELRGRETDKNQATGEPDVPPDKNQATGQHAVVLDQNEEAYFEEVEQKIEEIKQELKEQLKIKWIVDKIKHHLQDQCPLIILKFDQMMDGSRWEEIRKALSLLELSADALIFTTGSTEQAKGYCYPPREPIDHCSLVGLYYYTVLKLTSKHKNEDNDNAQIFRGILEECEGHEFCMKIFTHAVYANPKRSNEELRKLHSTLQSPKKSFDTIAKKMFMYSYNDLPKEYKSCLLYLAIFPKGQKIRRSTLIARWVAEGLTFKEDWPSSVYQANRCFDALIRRWLVYPDDISATGKIKSCVVGDPVHGFITAIARKQHIVETRLSHHLARHFSIFNDLRLRSSDRIGTFFQGLSRSSRVSLLKVLDLEGCQCFASKNQRYLKDICNKMLLLKYLSLKGTDITQLPSEINCLRELEVLDIRETKVPANATVNVLLLKLKRLLAGASQIDPTPRNFVTNVRIPSRIDKMINIEVLSNVKAQHHDNLEDIGKLCQLRKLGVVIDGKKSHLGSLLKAISDLHASLRSLSITIPTTTLEVTPSSPELQDIASRLKHHPEFLESLSISGAKHLIRCLTDLFLSAVAKRVFMICMM

SEQ ID NO: 175703 - protein, 113 aa, Oryza sativa
  unsure (1)..(113): unsure at all Xaa locations
  Clone ID: PAT_MRT4530_73521C.1.pep
RSTASTATAPLLRLPLPDPSTPPSQSLPAXSRPSPRLRPSGPCPSRPWIHRLLPFPPPDSSHPPSPSPRAPLPPTDPPPPNLNIFDINAFIWARTQHLLHHDRPCPSLPTAGS

SEQ ID NO: 175704 - protein, 147 aa, Oryza sativa
  unsure (1)..(147): unsure at all Xaa locations
  Clone ID: PAT_MRT4530_73522C.1.pep
RKFSSRLTGSHQQVLMQTSRFQQASPHQAACCGQAIQGLHTPXHQHGSWXQVXAMGHRSCTVLSGQLRLSTFSHLSLRLGVSSAPRQPVCVQQPKSMCQHCFRALKHTXSSWGTNLHLLQPVTRSLLLHIHLAATSWAHWFVTHRGP

SEQ ID NO: 175705 - protein, 364 aa, Oryza sativa
  Clone ID: PAT_MRT4530_73523C.1.pep
MAAPCRGSRGALPLLLISLSAAYLTYTALLSSRSLLPLPTASFPGATASRRLASGRPTAAAAFHTAVTASGSLYNTWQCRVMYYWFKRAREAGGGGGAEMGGFTRILHSGKPDAFVDEIPTFVADPLPAGTDQGYVVLNRPWAFVQWLQKADIQEEYILMAEPDHLIVKPIPNLSRDGRSAAFPFFYIEPKKYENVLRKFFPEHEGPITKIDPIGNSPVIARKESLARIAPTWMNISIAMKKDPETDKAFGWVLEMYAYAVASALHGVGNILHKEFMIQPPWDLEIGDAFIIHYTYGCDYDMKGKLTYGKIGEWRFDKRSYDSKPPPRNLPLPPNGVPQSVVTLVKMVNEATANIPNWDSYAAA

SEQ ID NO: 175706 - protein, 188 aa, Oryza sativa
  Clone ID: PAT_MRT4530_73524C.1.pep
GIWEGGEGAPPPPPWLPPPARSRLDDLPAGRLSHVAAGEQLPLHTPQPPLSGSEERLHDDERPWPPPPPAVADVLRQAASSHAPRNFDLITVQELGYNDFLDNAVIDYVAAPTIAPLLRPYPGAWREEGEEAAGIGSGRGKPPPLGGRRRILRLRGRDGHRGRWGEGEGEGRPSLPSPPYPAVAAPCR

SEQ ID NO: 175707 - protein, 380 aa, Oryza sativa
  unsure (1)..(380): unsure at all Xaa locations
  Clone ID: PAT_MRT4530_73525C.1.pep
SHTVSPDTVRRNKSAISDLAGHGVDEEDYPDWSTSPDGIGTIVVIDNLVYRDHPSLXIRGIPKDVRSYDVERVRNKEQLSTRVGCGRVHPTIENILDKCGVVAPNLPTKIDDLSHSTGHGWTTREKXLTDNSSQTPSVVLEPVKRSDLSRLKWSSYDYCLVLDQRCSVSPTTSTLSGRVTTTAWSSTSDIAFLQLPLLLVVEFRLHQVLDQRCNDSPTTSTLSGRVTTTAWSSTSDVAFLPLPPTTSTXVVESRLLPGPRPAWSSYDYCLVLDQRCSDSPITPASTKLISGAQDCQVFYPEIPYHKRHLALKPILMSLYAVLTKPLRNLRELRLGTPRADKALSNPSEMKDHTLRLLDRSRTVARSRQGIQNEEMVYPPR

SEQ ID NO: 175708 - protein, 254 aa, Oryza sativa
  unsure (1)..(254): unsure at all Xaa locations
  Clone ID: PAT_MRT4530_73526C.1.pep
LGGQGDNHDETINTINTHHDETINTQHNRHRSHNIQANILQDKTPDIDFRDRHGYSPTVSPDTVRRDESAISDLAGHRFEEEGYPVVDYESDLQTDMSITVRXLPHILYWCDYVISRTFASSGRVTTTDWFSTSGIAFXPTISTSSGRVTTTAWFSTSGVAFLPLFPLXWSSYDYCLVLDQRCSVSPXYFHFRWSSYDYCLVLDQRCSVSPTISTLGGRVTTTAWFSTSDVAFLPLFPLXVVELRLLPGPRPAV

SEQ ID NO: 175709 - protein, 208 aa, Oryza sativa
  Clone ID: PAT_MRT4530_73527C.1.pep
MQVVQLTKFDYRVSNRLETNVGKLRCRVNYPALQFTDPILKMGEMLVQRMRAKSGRFIALHLRFEPDMLAFSGCYFGGGEIERRELGAIRKRWKTLHASNPDRERRHGKCPLTPEEVGLMLRALGFGKDVHIYVASGEVYGGEETLAPLKALFPNFHSKETLASKEELAPFLSFSSRMAALDYIVCDKSDVFVTNNNGNMARMLAGRR

SEQ ID NO: 175710 - protein, 170 aa, Oryza sativa
  Clone ID: PAT_MRT4530_73528C.1.pep
MGGLERKRQARHHAGHVPLIVLLHARAIIMVFPLEPHNRCRTLHALRRPHVVVSAGAVRFLLSQRHCRTGSGSSRSGTTATAATTFSPAANLHRRLRPCIGNAKSTSESVGSIAPLPIDSSRCGPATPCAAPSSRAKGELRWVTTHDVLTTAFPVGRSPLQQRAPATARR

SEQ ID NO: 175711 - protein, 140 aa, Oryza sativa
  Clone ID: PAT_MRT4530_73529C.1.pep
MSVEILDGKTVRSFVEDEGAFNSSVDGRFAALDANRDGVLSYAEMAGELMSLRVLEKHFGADEDEAAMGADELAALYRGLFARFDRDGSGGVDLEEFRAEMKEVLLAVANGLGFLPVQMVVEEGSFLKVAVDRELAGAAA

SEQ ID NO: 175712 - protein, 49 aa, Oryza sativa
  unsure (1)..(49): unsure at all Xaa locations
  Clone ID: PAT_MRT4530_7352C.1.pep
VRIMGIVRTDGGQGLLCYVSLALFSFQIXTIIMPWSHRARXRXIYFLLS

SEQ ID NO: 175713 - protein, 108 aa, Oryza sativa
  Clone ID: PAT_MRT4530_73530C.1.pep
MGHTYLHSAGSRCNVGAWLSADDVTGVRPVTNRSFLSTTRQFSMPHVCPSSYNDFLAMVAMKPGMNLAGTDIPTPGVNTPAPARDERLEALIIPTGRGEACDRPPVAT

SEQ ID NO: 175714 - protein, 56 aa, Oryza sativa
  Clone ID: PAT_MRT4530_73531C.1.pep
LVSCVRHHCHSERREEIDRSCPSMPSRAPSRPPPTTPRASGRRFRMESGQGALPGS

SEQ ID NO: 175715 - protein, 138 aa, Oryza sativa
  Clone ID: PAT_MRT4530_73532C.1.pep
MSVEILDGKTVRSFVEDEGAFNSSVDGRFAALDANRDGLLSYTEMAGELMSLRVLEKHFGVDDEAAMGADELVELYRGLFARFDRDGNGAVDLEEFRAEMKEMLLAVANGLGFLPVQMVVEEGSFLKVAVDRELAKAA

SEQ ID NO: 175716 - protein, 761 aa, Oryza sativa
  Clone ID: PAT_MRT4530_73533C.1.pep
MPIPEVDIWRLVLEYVGLYVVTCVVPYIVNSLETLEELLSSSRDRSRSIFSSYGGICLILVYLTSLTYLARSTTEYRRGVNNFIEFAFTHSAKGNKILCPCKKCVNCSWLEANIVIEHLICDGFKHGYRLWIFHGEASSSAHCTTHEQVQVEQRAVDRDEIPEMLRDMAYGLDQMGEGGAADGSSGDANNDVDDFYRLVDDASQELYPGCKTFSKLNFLVCLLHTKFLGGWSDKSFDMLLDLLREAFPEGAELPKNFYEAKKAVKSLGFGYINIHACENDCILFWKQYENYTSCPKCNTSRWKMERKSLDGKRFHKVPRKVLRYFPIKERLQRLYINPEMAKNMRWHDEGRTKDGLLRHPADSPAWKHLDTVHPTFGNESRNIRLALATDGFNPFISLNSTHSTWPVIAIPYNVPPWMCMKQPNFILSLLIPGPTAPGNDMDVYMEPLIDDLESLWREGIRTYDASKGEFFQLRAAVLTTISDYPGLGYFHGCTTSGEVACTDCHIETGYTRLSKGSKSSYMAHRRRRDQNVAENKRRIQVLNLESMLKSIRTEGASSSQQAKKTSKKRKCISSVPIEPRNLRPRLARIDTTNEHVGHSDLHPRLPRNGSTNGPEGQDEGPQPVAAEQNGDSNRAQPKKREGRKFTRKDNIWFREEDEPLIKMEFNEFDQPVGKAAKEFPHVVGTLVRTKGFPLNHDDWRHVDEDSKQFIIDALEVYTISSFHIPCRDPATVLERSRRRRVCDGALSTFVVLVLVDLGVEP

SEQ ID NO: 175717 - protein, 109 aa, Oryza sativa
  unsure (1)..(109): unsure at all Xaa locations
  Clone ID: PAT_MRT4530_73534C.1.pep
MGHTYLHFAGSRCNVGARXLSADDVTGVRPVTDRSFLSTTCQFSMPHVCPSSYNDFLAMVAMKPGMYLAGTGVLTPGVSTPAPARDKCLEALIIPTGRGEACDRPPAAT

SEQ ID NO: 175718 - protein, 1067 aa, Oryza sativa
  Clone ID: PAT_MRT4530_73535C.1.pep
MEVAVREIATHWFEDQRASRIISQTPMEVAVREIATYWFENQRASRIISRTPMEVAVREIATYWFKNQIATYWFENQRASRIISRTPMEVVVREIATYRFEDQRTSRIISRTPMEVAVRKIATYWFENQRASRIFSRTPMEVAVREIATHWFENQRASRIISRTPMEVAVREIATYWFENQRASRIISRTPMEVRAPELSGCFRIGHGWEKRAVARALKQRYTLRRFSRAFWNLEGISFSLVSQENSEHPFFRKSGNLHGSQTHIEPEKCQLPGKCATHEDEDRDNMIFLVFYVFVVLLGEFCSSCSCAQVYVVYMGKGLQGSTENRHDMLRLHHQMLTAVHDGSLTNWMLGLSMEKAEASHVYTYSNGFQGFAAKLNKQQAMKLANMPGVISVFPNTKRSLHTTHSWDFMGLSVDAAAELPELSSKNQENVIIGFIDTGIWPESPSFRDHGMPPVPTRWRGQCQRGEANSPSNFTCNRKIIGGRYYLRGYQTEESGQSRSAIKFISPRDSSGHGSHTASIAAGRFVRNMNYRGLGTGGGRGGAPMARIAAYKTCWDSGCYDADILAAFDDAIADGVDIISVSLGPDYPQGGYFTDAISIGSFHATSNGILVVSSAGNAGRKGSATNLAPWILTVAAGTTDRSFPSYIRLANGTLIMGESLSTYHMHTSVRTISASEANASSFTPYQSSFCLDSSLNRTKARGKILICHRAKGSSDSRVSKSMVVKEAGALGMILIDEMEDHVANHFALPATVVGKATGDKILSYISSTRFSAKYCSYFQKGCGSTMILPAKTILGSRDAPRVAAFSSRGPNSLTPEILKPDIAAPGLNILAAWSPAKEDKHFNILSGTSMACPHVTGIAALVKGAYPSWSPSAIKSAIMTTATVLGNKRNAIATDPNGRTATPFDFGSGFADPIKALNPGIIFDAHPEDYKSFLCSIGYDDHSLHLITQDNSSCTDRAPSSAAALNYPSITIPNLKKSYSVTRTMTNVGFRGSAYHAFVSAPLGINVTVTPKVLVFENYGAKKTFTVNFHVDVPQRDHVFGSLLWHGKDARLMMPLVVKVDTAAKA

SEQ ID NO: 175719 - protein, 108 aa, Oryza sativa
  Clone ID: PAT_MRT4530_73536C.1.pep
MGHTYLHSAGSRCNVGARLSADDVTGVRPVTDRSFLSTTRQFSMPHVCPSSYNDFLAMVAMKPGMNLAGTDVPTPGVSTPAPARDECLEALIIPTGRGEACDRPPVAT

SEQ ID NO: 175720 - protein, 320 aa, Oryza sativa
  Clone ID: PAT_MRT4530_73537C.1.pep
MAAAAGGGAAPFVWKTYRMVEDPGTDGVIGWGKGNNSFVVADPFVFSQTLLPAHFKHNNFSSFVRQLNTYVSLVTPSSISSSHHTPPLSALHIMLPWILSGTQLKGFRKVDPDRWEFAHASFLRGQTHLLRNIVRRGSAAAGGGGGGGGGKRRDASADGGGGGGDEDMTMVATEVVRLKQDQRTIDDRVAAMWRRVQETERRPKQMLAFLLRVVGDRDKLHRLVGGGGYNGSATAAAADNGFADAARAGCGEKRARLLLDGDNTGAFGPDRRRLRRVLHRRRHVPRRCRRCRRRRRRRVSRLLVRFRSGQRLLILSLLTD

SEQ ID NO: 175721 - protein, 297 aa, Oryza sativa
  Clone ID: PAT_MRT4530_73538C.1.pep
TSPHCKKHVSFLRQREAHVVTPDQIKRSLSSLWFSRAVFLHTQIHQNTGVGYYASQRPEPAKGGLRGLPVLAEVGCANAFGFDITAACSGFIIGLITATRFIKGGGIRNILVIGADALSQFVDWTDRVFQACSADEDGLLGFCVQSDGNGQKHLNCVSSHVGSILSKTNGVPSFPPKKATFSNIEMNGKEVFRFAVRCVPQSIEKALEEAGLPASSIDWLLLHQANQRIIDAAASRLDIPSDKVISNLANYGNTSAASIPLALDEAVRAGKVKAGDVIAASGFGAGLTWGSAIVKWC

SEQ ID NO: 175722 - protein, 75 aa, Oryza sativa
  Clone ID: PAT_MRT4530_73539C.1.pep
MGHTYLHSAGSRRNVGARLSADDVTGVRPPGMNLAGTDVLTPGVSTSAPARDECLEALIIPTGRGEACERPPVAT

SEQ ID NO: 175723 - protein, 83 aa, Oryza sativa
  unsure (1)..(83): unsure at all Xaa locations
  Clone ID: PAT_MRT4530_7353C.1.pep
RAHXGTLASTRTPFVLLNVVNELKVGVRENVHRMPIRPRTVMRNGDGVSAVAQSVSSSGCKKWRGARTRRRKPLQTAQHSLTS

SEQ ID NO: 175724 - protein, 36 aa, Oryza sativa
  Clone ID: PAT_MRT4530_73540C.1.pep
EGEIVGYLCYEIKGFRNKGMVIRNMIDVTLNFMLLV

SEQ ID NO: 175725 - protein, 46 aa, Oryza sativa
  unsure (1)..(46): unsure at all Xaa locations
  Clone ID: PAT_MRT4530_73541C.1.pep
QTLLDLKHTGSCTTDPXTRENTVQDSTFPPSPPEVVDPEDSLADKN

SEQ ID NO: 175726 - protein, 406 aa, Oryza sativa
  Clone ID: PAT_MRT4530_73542C.1.pep
MQIPRNFAIMGRKEATDGGRFFYDWQRGDRRMVVVTRATKRRLKEESCDPELRKMRRVEELRRLRRLEEESGDPRLGEDLISRLPDDVLRGIITLLPTKDGTSTQFPMETACMLDFPHLKALTLSNVNIMDSALHGLLSRCPVLESLVLVGNRWCRCLHISSLTLQSLGVSDGFSSVEGKLEKVTIVDAPLLERLIIPRDKWQDDFVVRVTQAPKLEALGYLSDGISRLEIGTMVVQKLVPVSLSNVVRTVKILAINTNFYPNVVIDFIKCFPCVEKLYVKVRYYAYFNNVQQNVSLECLDLHLKMVEFINYQGNVEDLNFIRFFVLNALVLECMKLVTRRNKCDVKWIEEQHQKLQLYSGASRRVTFDFQADYEGDSLVHMKHISDLTTNDPFDRSFCRCRDEER

SEQ ID NO: 175727 - protein, 220 aa, Oryza sativa
  Clone ID: PAT_MRT4530_73543C.1.pep
MGKDKHHRDWILRRCCGSIAACILTLAVLVGFIVLVIYLAIHPSKPSFYLQDVQLRNIDLSDPAISLNLQVTIASRNPNDRVGVYYKTLHVFTTYREEPITVPVELPAIYQGHKDVSVWSPVMSGESVPVGQYVADAMRQDIAAGYVLLHVKVDGRVKWKVGSWVSGGYHLFVTCPALLAASGGNVGGAFAMSATAGGGAGGNATVSLKFAQAADCTVDV

SEQ ID NO: 175728 - protein, 78 aa, Oryza sativa
  Clone ID: PAT_MRT4530_73544C.1.pep
SERRRDYSGARHLPYARSASYRKAFCSYKRLTLMMPTVVGAMALTESQRTALTGSVYDLLSFLLGVIAENKKVHHYTD

SEQ ID NO: 175729 - protein, 68 aa, Oryza sativa
  Clone ID: PAT_MRT4530_73545C.1.pep
VLLAACFIQTAWHRSWKKKNENFFPQKEKKLHIPYAKKGATHFSFRAEKFACGFTWNKMGALGRKAPP

SEQ ID NO: 175730 - protein, 96 aa, Oryza sativa
  Clone ID: PAT_MRT4530_73546C.1.pep
MNKLSGHRRSASPPSRSAIHATAAGSVVVFSVSGQPAGVRPAGGKDAWVKVFEGFAYIPCDLGALGGLLGELLLTAGEKVGNAAAAGGCVGGAGKR

SEQ ID NO: 175731 - protein, 91 aa, Oryza sativa
  Clone ID: PAT_MRT4530_73547C.1.pep
MPSNYPHPSPPPFPTCTASRTRHRLLATKGAAREEQTTRWRITSGGCAGLGGGSTRWHRRRRMGGIGLRRTAVEAQGYGSARPQHPSAPHT

SEQ ID NO: 175732 - protein, 58 aa, Oryza sativa
  Clone ID: PAT_MRT4530_73548C.1.pep
CSGVQPLYRFNQAICSRALSGFSRCYVYALACVSDRARSIPGHDQFLLWLQDYKDMDK

SEQ ID NO: 175733 - protein, 383 aa, Oryza sativa
  Clone ID: PAT_MRT4530_73549C.1.pep
MDREEVTEFLGQVPLLQCLPSSSIRRIADAVLVKRYEPGGYVAREGDPVDGLYIILDGQAEVSAPANTEEENRPDYVLNKYDYFGYGTNSSVHQVNVIAVSKLTCFVLPNQYGHLLQPKTIWSAEETPENHSLLEQILHLEPLEALAAASKTVDCLKAVHSLHAIFLIAGDKNLPIIYQVHRARDGTSFATRKVEAKQKGLVIFTLIASFQKDELGFEHQAAIMPDVPPPEELLNLEEIRERRLTDPRFPMQYRNSAAKKKFVPWPIEMRFCEDSASQHKPRCVVAYASDLLYSGVSLNPHREKGLKTYSLSLDHSIWFHKPVKADDWLLYVIDSPSAHGGRGFVTGRMFNRQGELVMSLTQEALIRRAKTPGQPSQTPRPKL

SEQ ID NO: 175734 - protein, 54 aa, Oryza sativa
  unsure (1)..(54): unsure at all Xaa locations
  Clone ID: PAT_MRT4530_7354C.1.pep
LDYKXXDFGVLFPXIYHPQLIRASYWPNCSXRASKHTKRTAAHDISXVQIDRXY

SEQ ID NO: 175735 - protein, 110 aa, Oryza sativa
  Clone ID: PAT_MRT4530_73550C.1.pep
FAFRSAPCPTISRQETLQNMYKILTLPRRRRAPRARRLLPAPPRAQLALGGAPARAGVKRAELAAGNGQPDRSPEEEQDVVAELAGEDDMELKWLSLSSLHFHLQGQERN

SEQ ID NO: 175736 - protein, 149 aa, Oryza sativa
  Clone ID: PAT_MRT4530_73551C.1.pep
PRVRPRVRPRVRNVIAVSKLTCFVLPNQYGHLLQPKTIWSAEETPENHSLLEQILHLEPLEVDIFRGFTLPGAPTFRQVFGGQLIGQALAAASKTVDCLKAVHSLHAIFLIAGDKNLPIIYQVHRARDGTSFATRKVEAKQKGLVIFTL

SEQ ID NO: 175737 - protein, 153 aa, Oryza sativa
  unsure (1)..(153): unsure at all Xaa locations
  Clone ID: PAT_MRT4530_73552C.1.pep
HQAAIMPDVPPPEELLNLEEIRERRLTDPRFPMQYRNSAAKKKFVPWPIEMRFCEDSASQHKPSLNYWFRARGKLSDDPALHRCVVAYASDLLYSGVSLNPHREKGLKTYSLSLDHSIWFHKPVKADDWLLYVIDSPSATXRGFVTGRMFNRQ

SEQ ID NO: 175738 - protein, 44 aa, Oryza sativa
  Clone ID: PAT_MRT4530_73553C.1.pep
LSRDSSELEDIDARIFFMSMIPIKHKITTKEKYYMSPDKPYFGG

SEQ ID NO: 175739 - protein, 318 aa, Oryza sativa
  Clone ID: PAT_MRT4530_73554C.1.pep
MAEAAAAASNSTPASPPPPPAAAAALGLPDLSVPYDLATRGQWKSLLSHLDDASHPRHRLLLSALSALSLAKLRRYADAAALIASLRPDPGCPPPPFLLRLLHALLPLFLPADRPLALDRLYTLLSSVRARPDASHPEWAPPRVPRHFDVALALLASVAALDPGNPAVLSRLGYAHLQIGNLAAAAAAFRHVESVAGGDPAHASLLARNRALECVVAKDYAAAVREYERCIEADAADAVAVNNKALCLMYSRDLGDAIKVLEAALEGHPTAALNETVVVNLCSMYELAFVNHADVKRSLTDWIARVAPDDFDPSCTRM

SEQ ID NO: 175740 - protein, 216 aa, Oryza sativa
  unsure (1)..(216): unsure at all Xaa locations
  Clone ID: PAT_MRT4530_73555C.1.pep
SSSSSSSDPPIPTSEIPIHPWRRPPPPRPTPPPPRLLLRPPPPPRSASPTSPCPTIWRRAGRGSRCSPTSTTRRTRGTASSSPRSPPSRSPSSAATRTPRRSSPXPPGPGLPAAALPPPPPPRPAPALPPRRPPPRPRPPLXPSSPPSAPAPTPPTRSGAAASPSSRPSSPPTTSPTASSTSPSRSSRPSRRWTRATRRSSPASATPTSRSATSPL

SEQ ID NO: 175741 - protein, 76 aa, Oryza sativa
  Clone ID: PAT_MRT4530_73556C.1.pep
DRAEAATVDVGGRRGDGARQAAEAAAVGSASSQPNLRRRRRGGRGRRRDGDHDGDLPERRRRLERRRSTAGAAATI

SEQ ID NO: 175742 - protein, 79 aa, Oryza sativa
  Clone ID: PAT_MRT4530_73557C.1.pep
PAGTISRPVRLSTLADPLAIKVATSSTKVLPHPHHLLISAISYPGDQGGGPGYHCGHPPPYLGGNPDYAPCYHRTLRES

SEQ ID NO: 175743 - protein, 141 aa, Oryza sativa
  Clone ID: PAT_MRT4530_73558C.1.pep
RRSRHQQTTVLPRCTCFRRSGGWYDPSHRRLIRTAAIANLRPLMREDRVIPVSGEGTSQVLVKIHQNTGVGYYASQRPEPVYIARVLRICSLANHSTDQGLRTSPSAPGRTGKGGPARSPGEEPHAPSMSYTETTYGYRRE

SEQ ID NO: 175744 - protein, 221 aa, Oryza sativa
  unsure (1)..(221): unsure at all Xaa locations
  Clone ID: PAT_MRT4530_73559C.1.pep
NGRNLPVGPSFEAKSCNRKLIGARWYIDDDTXLSSMSKNEILSPRDVEGHGTHTASTAGGNIVHNASILGLATGTVRGGAPRARVAMYKICWSGSGCSAAVQLKALDDAVYDGVDVLSLSLGSPLEDLGTLHVVAKGIPVVYSAGNDGPVAQTVENSSPWLLTVAAATMDRSFPVVITLGDNHKFVAQSFVLSRQTTSQFSEIQVFERDDCNADNINSTVK

SEQ ID NO: 175745 - protein, 345 aa, Oryza sativa
  Clone ID: PAT_MRT4530_7355C.1.pep
MRCERGRFSLEDTLGSIRPASWKFSMGSGMVKKKVVKAGSFDLDAKLDKSWMEDITCPICLDFPHNAVLLRCTSYEKGCRPFICDTDQSRSNCLERFKGAHGLPTNMKVPSFNGAPLDSIHIISSNTTDRPACPLCRGDVIGWVVIDEARLHLNQKKRCCEESCCSYVGNFHELQKHTQQKHPNSRPSEIDPARRVDWENFQQSSDIIDVLSTIHAQVPNGIVLGDYVIEYGDDDAGDDYEVYHRVRGNWWTSCIFCKSFCRSSGGRSRARARERRSSGRRSSNRSSQESFTIEVPSGSVDIREIRFDEIDDEYIVTGAMPGIAASRRIASHYRDPRYGRRRSYY

SEQ ID NO: 175746 - protein, 96 aa, Oryza sativa
  Clone ID: PAT_MRT4530_73560C.1.pep
GQRPTDDTLDNAMALSKAARENKYACERTHGKQQVFLQTESEPPAAIQPKQHAFAREDMQQPHCAAVAESTVRLKMTRHMITIEVVVLFPSIASCC

SEQ ID NO: 175747 - protein, 130 aa, Oryza sativa
  Clone ID: PAT_MRT4530_73561C.1.pep
MGHTYLHSAGSRCNVGARLSADDVTGVRPVTDRSFLSTARQFSMPHVCPSSYNDFLAMVAMKPGMNLAGTDVPTPGVNTPAPARDECLEALIIPTGRGEAETEGGVATSPSGPTPPRGSGHMGDRGYPGL

SEQ ID NO: 175748 - protein, 101 aa, Oryza sativa
  Clone ID: PAT_MRT4530_73563C.1.pep
HQQQEAMEGKRTTTSMVIMCLVILSLTVDSATAAQCGCCISSRAKACCFGCIAAGGSDSVCKNTCCFPCILADSVVAKMDEMGVLAKMDEMGVLAKMEGQA

SEQ ID NO: 175749 - protein, 178 aa, Oryza sativa
  Clone ID: PAT_MRT4530_73564C.1.pep
MGHTYLHSAGSRCNVGARLSADDVTGISPVTDRSFFSTTRQFSMPHICPSSYSDFLAMVAMKPGMNRAGTDVLTPGVTTPAPARDECQEALIIPTGRGEACDRPPAATGSGRPSPRGRNRSSPTPRGDRGGGGHVSLGPDPPRGSGHVGDRGCPNLVTGGAALYRRAGTQRSQIARIG

SEQ ID NO: 175750 - protein, 101 aa, Oryza sativa
  Clone ID: PAT_MRT4530_73565C.1.pep
HQQREAMEGKRTTTSMVIMCMVILSLTVDYATAAQCGCCISSRAKACCFGCIAAGGSDSVCKNTCCFPCILADSVVAKMDEMGVLAKMDEMGVLAKMEGQA

SEQ ID NO: 175751 - protein, 330 aa, Oryza sativa
  Clone ID: PAT_MRT4530_73566C.1.pep
MHAAGGEGDDGSCGGHRRRRRRRKPRRTRAKVAAAEDEGHKRGRGPATAGEGVGWAQETATAVVAGDGGRCRRGRGGRTGALEDSGARARGGCGRGQRGAADAGKTTGWTLATTAAAKDEDNGRGVADASDDGGRMRARMAATAQRMCARTTTAAEDEDGGCRVADADEDSDRGAADAGDDGGMDAGDEGRPSVGHISNLFRGGQGGVPLSEHVGEVFVDEDKERERREKSHCRHVRSTASLQPEVTSDKQSTRLLPPSPAFPVDAHFNLHSMASDFLAMLALKPGMDLTGTDIPTPRVSTPAPARDESQEALIIPTGRGEACDRPPVAT

SEQ ID NO: 175752 - protein, 77 aa, Oryza sativa
  Clone ID: PAT_MRT4530_73567C.1.pep
VGATSSNTTKTTCFCPRGYTTLAKVTCDGPKPSSLTASRMVSDQWSLVTPTSDGQVTRRPSEVLVSASLGRVRTRHR

SEQ ID NO: 175753 - protein, 538 aa, Oryza sativa
  Clone ID: PAT_MRT4530_73568C.1.pep
MGHTYLHSTGGRCIVGARLSADDATGVRPVTDRSFLSTTCQFSMLHVCPSSYNDFLAMVTMKPGMYLAGADVPTPGVPTPAPARDECLEALIIPTGRGEARKVDQASNSRARLLQQLANAKSELSRLLCALGELSISGIPDKTTGTIKEQLEAISPFLEKLCREKDKRVREFAGVQLQIQTIRGEIAGSLQVGDHMETPRVNEDDLSTKKLNEFLSELQALQKEKSNRLHKILDFVSSVHDLCSVLGMDFLSTVTEVHPSLNDSVGAEFKSISDATLSKLSKMTELEDIYAQAHITIDTSAARDRILTVIDSSIFEPSELLADMENQILKAKEEALSRKDILEKVERWMSACEEESWLEDYSQDDNRYSATRGAHLNLKRAEKARLLVSKIPVIVDTLMAKTRAWEQEHGMPFSYDGVHLLAMLDEYKVLRQQKEEEKRRMRDQKKINDQLAAEQEKLFGSKPSPARPQSSRKAPGPRANGGAVNGTPNRRLSAHQNGGGRSVSRDGRRDSGRPAAPVNYVAICKEESSNNNPAASSP

SEQ ID NO: 175754 - protein, 65 aa, Oryza sativa
  unsure (1)..(65): unsure at all Xaa locations
  Clone ID: PAT_MRT4530_73569C.1.pep
XIKPLHKTKTRLGFFKPTSYSGLFQCSFSFQVPTVERSPNILSSSLASYSLRSSSCSLSSKVKQQ

SEQ ID NO: 175755 - protein, 128 aa, Oryza sativa
  Clone ID: PAT_MRT4530_7356C.1.pep
RHARGGAGVKVFPCLWRRIYQTQPTTPRLLNIELTLTTRGVAATPFCNLTKKVNPSGEEGDAFFLTNHWGLCFNNTNCQNRSPLTPIIAGVGFWYQPHCNDTYFHLCGKQLEPDASIEPVIADRDLQP

SEQ ID NO: 175756 - protein, 155 aa, Oryza sativa
  unsure (1)..(155): unsure at all Xaa locations
  Clone ID: PAT_MRT4530_73570C.1.pep
LEAASGDRSGSGGGEEGDGARAIEGTGEFGEMGKKREGRVGMLXIGEMELXVAGRGGNRRPMWGKWERRERRDSKIXSRPSRARARAGERGNWARGTLARXATWATWSGRRRSXRGGGCGARWRRLEEGDEPDRRAPPVGDPGRGRPAAGSARLG

SEQ ID NO: 175757 - protein, 101 aa, Oryza sativa
  Clone ID: PAT_MRT4530_73571C.1.pep
GGKEDYHFDGNHLPGHLEPHCRLRHRRHSAAAAYPLGQKHVVLVVLLLVAPTQSARTLVVSHVFWPILLLLRWTKWEFLLRWMKWEFLLRWKDKPTLQESI

SEQ ID NO: 175758 - protein, 689 aa, Oryza sativa
  Clone ID: PAT_MRT4530_73572C.1.pep
TSPHCKKHVSLLRQLEALVVTPPAGDGGGRRDGARRRLIYGDGGTPQGALQAAGALLRHPPVVPDPETPARRWLDDVADLVMTAQQRLGAGRRSSATETSGAAAAGSTSSRRRARRAAAATRRSSAIPSSTPPTQEDVRGGLDAQLDIERRRDDRRAAHATEGASSSGAPLRSGHGGRPPMSPVGGAGCRAFVASLRNVRWPPRFRPTITDKYDGSVNPAEFLQIYTTGIEAAGGDDRVMANFFPMALKGQARGWLMNLPPASVHSWEDLCQQFTTNFQGTYPRPGEEADLHAVQRRDDESLRSYIQRFCQVRNTIPCIPAHAVIYAFRGGVRHNRMLEKIASKEPQTTAQLFELADRVARKEEAWTWNSSGSGVAAPAAPGSAARSGRRDSRRKKGSARSDDEGHVLAVEGASRVPRKGRPASDKKKEAGAPSRERPTGKWCTVHNTSLHDLADCRAVKSLAERTRKWEEEKRQERREGKTPAAPAGNRRGEAKQKATAEDIDDGDDDLGFQEPEATVATVDGGACVHASRRSLKAMKRELLAAAPTHEATRRARWSEVALTFDQTDHPPCVARGGQIVMVVSPTVCKVKLGRVLIDGGAALNILSPAAFDAIKAPGMVLRPSQPIIGVTPGHTWPLGHIDLPVTFGGSANFRTERVDFDVVELSLPYNAVLGRPALVKFLPSMHRAV

SEQ ID NO: 175759 - protein, 152 aa, Oryza sativa
  Clone ID: PAT_MRT4530_73573C.1.pep
MTGMGSSIGRATIFYCVALSIIAGAAATQVPPTEAESVEAAELASSAFKADTLPSASRKLMAVSDVPLAPVCPVRFDKMKGPAIELGKKCKTTGVKVCCEAFKTFACPHNKLINDVNNGCADEMFYTIHTYGQLLPGTIFKKCLEGPHGMKC

SEQ ID NO: 175760 - protein, 482 aa, Oryza sativa
  unsure (1)..(482): unsure at all Xaa locations
  Clone ID: PAT_MRT4530_73574C.1.pep
IGLRDGFSNNKLLDDFDCGEIXSVFSSLIFIIDLLIPXYIRHVSTKIRNILYTIYRTYFFNLYSIEQLSTRVGCGRVHRIIEVILDKCRVVASNLPTKTDDLSHSTGHGWTTREKHVAISHTXNFHWCLRDSTRSLVLEPVRSNLSHCNFHWCSRDSTRSLVPESWSSLAYTWFSISDVAFLPLLPLXVIELRLXLVLDQRCSISSTTYTLSGRVTTTAWSSTSDVAFLPLLPLQVVESRLLPGPRPAWSSYDYCLVLDQGCSDSPITPASTKLISGAQYRQMFYPEIPYHDXHLALKPILLSLYAVLTRPPRNLRELRLGTPRADKALSDPLETKDHVKGPRALSSEKNSPTTRLGARESGDNHDETINTINTHHDETINTQHNQHRSHNIQANILQDKTPDIDFRDRYGYSPTVSPDTVRRDENAISDLAGHGFEEEGYPVVDYESDRQPAMSTTDFDEMGSRDGFSDNKLLDDFCYGEI

SEQ ID NO: 175761 - protein, 120 aa, Oryza sativa
  Clone ID: PAT_MRT4530_73575C.1.pep
MGSSIGRATIFYCVALSIIAGAAATQVPPTEAESVEAPVCPVRFDKMKGPAIELGKKCKTTGVKVCCEAFKTFACPHNKLINDVNNGCADEMFYTIHTYGQLLPGTIFKKCLEGPHGMKC

SEQ ID NO: 175762 - protein, 85 aa, Oryza sativa
  unsure (1)..(85): unsure at all Xaa locations
  Clone ID: PAT_MRT4530_73576C.1.pep
QALGCRCVXSRAAVSPPVVHXTGCWNAERRPPQRGLTAGGVLAAASTSSCTCVAPSGHSVAPVIFIAVRTSTTSSYGYRRHRPGH

SEQ ID NO: 175763 - protein, 368 aa, Oryza sativa
  unsure (1)..(368): unsure at all Xaa locations
  Clone ID: PAT_MRT4530_73577C.1.pep
AETLKLIVAGLLLEELLISRICFIFFSNWGGDIYIEQGLLTSAEGVHFTHTSLLTRVTQPVGISHVGRPPSFHDKAFRKPMQVCHMPTRGVPDQQQFYPSCYSDFKFEGDRRXTINRGRIKCNQXGSAGWLQGDMAELAPTWRLRGGHVGWQEVDDDXAANERRATAASGRAGHGDTGEGEHAGRXYGTRGDEPTARIRRRLLGGGGLRRRQPAAGEEGNGDEATRGRSPAVRASTRPRELDARVGLDGAMPSWAGDVRLLRSSGGDGSEHMASNGIGRGGAGQLRESLELKQGWHPANSFSNGHPGQQLSNGHPGLADPISCSGEKSTGDVAMLRRAPVSTATTSGGVDHRQRNCGPRGATQRQPEA

SEQ ID NO: 175764 - protein, 152 aa, Oryza sativa; identical to SEQ ID NO: 175759
  Clone ID: PAT_MRT4530_73578C.1.pep

SEQ ID NO: 175765 - protein, 70 aa, Oryza sativa
  Clone ID: PAT_MRT4530_73579C.1.pep
LLELTEFGLSIIDHMSEETPILLVQVLVFRLLIWNGPWDQFAENEHALDSSAQEDALSCYACAVFDAKGW

SEQ ID NO: 175766 - protein, 510 aa, Oryza sativa
  Clone ID: PAT_MRT4530_7357C.1.pep
MVPRMRLIVYYVTMDGSVIADSLLLGVEEQCRQNQESAYRQFHSTETALLRIKSDILIAMDRQKITLLLLLDLSSAFDTIEHSRLLDILKICCGVDGVALGWIESYLSDRHQKVKIDGIVSDSFQVPFGVPQGSRLGPLLFMLYTSNLIKSTQDNFPEVSCHCYADDTQLFLSFRPSTSTQDASVSMLEKCVNFIHRWMLNNNLKLNDSKSEFLVIGTPQQISKISIDGVRVGSSNVIPSVTARNLGVYFDTNLTMETHVKNICKSTYYLLYNLRRIRKYFDQGSMKLVVHALITSKLDYCNGLLFGMPDSLIAKLQRVQNACARLVYRRSKFTSTAPLLRELHWLPVRQRISFKILLIVYKSLSGQAPSYIKELLQLKVQSHSRSLRSSTDKLLFQIPHGKTKIEYESEVYIMGDFNIDLVKFTGNAVSLEILPRHVGPERTVYEPNGEIRVEVTAPNNSYVGLLAVDKAVYLLRNKDRMGKRKMYDWMRSYDTGCGPGGGQNTAQIFK

SEQ ID NO: 175767 - protein, 71 aa, Oryza sativa
  unsure (1)..(71): unsure at all Xaa locations
  Clone ID: PAT_MRT4530_73580C.1.pep
XXLXXXXXKNWGXIXTKNLXXNFKEIFKGLTILPFCPXEGXAKXWGRGXXGGAFFGYKXPVGERGMXXQXD

SEQ ID NO: 175768 - protein, 1033 aa, Oryza sativa
  unsure (1)..(1033): unsure at all Xaa locations
  Clone ID: PAT_MRT4530_73581C.1.pep
MKVEMGVHRESWRAGQEACALLVRGHFRRRRRARTPPFPYRRNPGRGVALGEVERSVTSPPAGDGGGRRDGARRRLVYCDGGTPQGALQAAGALLRHPHXASGAAAAGSTSSRRRARRAAAVTRRSSAIPSSTPPTQEDVHGGPDARLDIERRRDDRRAAHATEGASSSGAPLRSGHGGRPPVSPVDGAGCRAFVASLRNVRWPPRFRPTITEKYDGSVNPAEFLQIYTTGIEAAGGDDRVMANFFPMALKGQARGGGVRHNRMLEKIASKEPQTTAQLFELADRVARKEEAWTWNSSGSGVAAPAAPGSAAQPGRRDRRRKKKSARSDDEGHVLAVEGASRAPRKGRPASDKKKEAGAPSRERPTGKWCTVHNTSLHDLADYRAVKSLAERTRKWEEEKRQERREGKAPAAPAGNRRGEAKQKATAEDIDDGNDDLGFQEPEATVATVDGGACAHASRRSLKAMKRELLAAALTHEATRRARWSEVALTFDQIDHPPCVARGGQIAMVVSPTVCNVKLGRVLIDGGAALNILSPVAFDAIKAPGMVLRPSQPIIGVTPGHTWPLGHIDLPVTFGGSANFRTERVDFDVADLSLPYNAVLGRPALVKFMAAVHYAYLQMKMPGPGGPITVHGDLKVALACMEQRADHLAVASKPAGGDERLSTXVPATPRQRMVTCDEVPVKEVALGDGPSKTTRIGGLLDDKXEDALVSFLRANADVFAWRPADMPGVPREXPVRQKVRRQAPERQAFICEEVARLLEAGFIREVIHPEWLANPVVVPKANGKLRMCIDYTDLNKACPKDPYPLPRIDQIVDSTAGCDLLCFLDAYSGYHQIRMAREDEEKTAFITPIGTYCYTTMPFGLKNAGPTFQRTTRISLGSQLGRNVEAHVDDLVVKTRNQETLLSDLAETFETLRSARIKLNPNKCVFGVPAGKLLGFLVSARGIEANPEKIRAIERMRPPSKLACLQVDSRGSPYGRLWIRVVPGTRSILNSISLLGGIPGKSSGNTSRYSRTIGISSKVIWFTLDLRGSEGNA

SEQ ID NO: 175769 - protein, 260 aa, Oryza sativa
  Clone ID: PAT_MRT4530_73582C.1.pep
MSILLHFIAILCKSIVLVIISPRGASFEFAYTIKHYVTNNQAEYEAVLKGLQLLKEVEADAIEIMGVHCCINQAKVVMGEVHEDICGIKLRRTGYFRSTMLEDCFRYYMGCQDCQKFGAIQIASTSAMNPIIKPWPFRGWGIDMIGQINPPSSKRYKFIRVATDYFSKWVESVPLKKVDSRDAIQFVKEYIVYQFDVPQTITTDQGSIFVSDEFVQFADGMGIKLLNSSPYYAQANGQAEASNKSLIKLIKTKISDFPRQ

SEQ ID NO: 175770 - protein, 123 aa, Oryza sativa
  Clone ID: PAT_MRT4530_73583C.1.pep
MEGNVEFVRVYVEYVYNVDYSLGIGVVIGQFYNILAFTVEIQPNSARSGEPQVGSGELSGVESQPSPPSEARLDEPRARSGKDEAALAFRRGRWRESGGREEGGLHQRWEENGGGGKGELCWW

SEQ ID NO: 175771 - protein, 80 aa, Oryza sativa
  Clone ID: PAT_MRT4530_73584C.1.pep
MAARHVSVPAMLDLYLHQSIAASCTMNGGKGFSHLSGLLETTQQDNVIHPNGNLISSMAEVTSSSRQQPSYNRDSDGSQA

SEQ ID NO: 175772 - protein, 547 aa, Oryza sativa
  Clone ID: PAT_MRT4530_73585C.1.pep
MAAPAGNVETPPRRRVRRRIAAAAADDGGEVDDDGLSVLPDELLLVILGRLDTRTALAAAALSRRLDRLAREIPALVFSVRDVLPPRYHACVRAHGDAAGADARKLDAAIGRCERRAIRGFADCVSAFMEPRVAVAPRRARSLRLEFFAARSTGFVEDLIAMAVGAWGVQDLDITVVKPALVEQGPCYAFCFPDHRLSAESLRSRIRSLAVSNCFLPPPSELRHYAALTKLVLQDTHPRTPLAFYRQVLDACPRLRALHLRRCGAPWYAALVVDGMPELRELVVDGCGFHTVDLRAAPALERVACVDGPVALAFGGAPRLARLSLTYALDDRLVLVRNWRLSGLLGDAPAMAELLVRFTGEPKWMTSGPLRSPLPGLRRLVVADMPSNWDVSWPRVILEAAPCLEVLHIHVQEEEDDAGTTAAAAAEIPWPPAESARHERLAELAVVGFAETRGQVGFVRHVVEACVALRRVVLVRRGRVVVGSEGRYWDWKLVAAEAAAPREGEVGGGGGDGERPTAAAEWSEVEKMVIRSQVKSASRPDVEVFIG

SEQ ID NO: 175773 - protein, 55 aa, Oryza sativa
  Clone ID: PAT_MRT4530_73586C.1.pep
VKEIKKGGLAMLSMLGFLVEAIVTGKGSLENLGDNVAETVNNKAWAYATNLVPGK

SEQ ID NO: 175774 - protein, 128 aa, Oryza sativa
  Clone ID: PAT_MRT4530_73587C.1.pep
MATIAAAAAARTAVVGRPSGVAQLRARRGERVRCGYSSRDGKEATPAAAVKGATSMLAAAVTASSSSAPAAMALVDERMSTEGTGLSLGLSNNLLGWILLGVFGLIWSLYTVYTSTLDDDDESGGLSL

SEQ ID NO: 175775 - protein, 85 aa, Oryza sativa
  Clone ID: PAT_MRT4530_73588C.1.pep
PPTTLPAPTTATATTRTTKTRRRRWRRWFFLTASALAGNKSIEGGETSMVAGHLWEKVQQEKQRVRTSSAPPSSSIEMRLSSSST

SEQ ID NO: 175776 - protein, 105 aa, Oryza sativa
  unsure (1)..(105): unsure at all Xaa locations
  Clone ID: PAT_MRT4530_73589C.1.pep
MAWRGEGAAHPAAAPRPTYTDPAAVVRVRRGCRRLDGGSRDGATAGDSRGGGGSGHRSAPXRTWRRPPRRRVRTPKDMEEQRRTPPXRSAVDVRSKCRQKFNLRL

SEQ ID NO: 175777 - protein, 610 aa, Oryza sativa
  Clone ID: PAT_MRT4530_7358C.1.pep
MRCKLNISPQSSCSQSPTSGSRSPSESLRSTMSNRSLTGQEEVNGGHCLVAWKAVCMPHENGGLGIKNINYFGKDFVSSGWQKGGTTGQAERYSAVFDLAGCGFEEEGYPVVDYKSALQTAKSTTSKDLQDLYLAGTRQVLGDGKNTKFWLADWLLGVQLQDGEEDETIWKWAPNEKYTPYSAYSMFFMANTAARRVGNSGGCPHQGGMRERGIMRTSSAADAAAAAAINMLTSLSLIGTADLVRTGVAEEEEQQAGSAAAAAALGAVGVSMLLEGVYLIREAPWIPACAVNGRCRISLSWEETCGEKRTCRGGMEKRPASQFNKSQSPRGACASTEPARTQAKRSRPTPAGGNEQAVAVVVPRRSLPSSINHNSKTGTRDWTNLGDGPAGKIAELTLANDVADYVRFRAVCRPWRLSSSLHPRPQDGGLDSRFLPRHWIMLDKAHHNKGTTAAATHRRHRFLNVSTGGCIHTDDIPELADHTMLALTPEGLLLLLHEPSLRLHLLNPLTRHRTDLPPVTALLTPEWRRRASWRLGAHGVGLRVNAAGFVVEDASTVVAVDFSDPTVRAIAKPGDESWTVIDDRLNTIDWIITYGRVHIGTCLPYLATDL

SEQ ID NO: 175778 - protein, 1568 aa, Oryza sativa
  Clone ID: PAT_MRT4530_73590C.1.pep
MAEQQLQAGKNGDQRLPEVILSTLLRRKLVGPPWRGPLPAERVSPPRTLGDCLALASRCPRRRRRDGRRCGVPRSSSSPEAGTVGSKFVIPKSLGVSNDSDQLLRQGSRPDFPPLCGAHSSVSTAIASAGGEIRRPAPSASQSDRIRLGPGKWFRPTKGLTSLFARSGLKPRSRKLQPPSRPTATISYAAVVRRGKAMAAHGGGGFGGQGGGRGWGFAQGFHPGFDGGRGRGRDQRGHNGGGFGGGYGGGYGGGGYGGNSHGGYGGNRNRRGWQGGRRFAPAAGHAASQFHAGGGVPGHQAGGQAVVGQLQQQAAAGQFQLAGFQTAGLADQQPAQAPFQAPLAGQQPTQPAAAGNQTREAGAVLFQQVSQSQKAQVAAPANGGGLGTSQAGTSALLASSQAAPAAAPAGSTRGAIIGGSAQDPAATHLEGFMATKPEPAQAGKQKSKGKPYCFCCYTKGHTIDDCTVLLCCDLCFENHVLKNCPNVKKTNAIAAPCGYAVEGMGFYYIPMNDNPKSNVEEHTVLGPMDTKTIKGKIRFEKGVENDVNRYEIDKVWVQFRGLPSELREFPIIWAIGSILGVSKAVDMRFTKTFGRSRLKVAVLDPNRIPDYVDVVIGDFVYELQFRMEIDMPVGEPSVIDMDSTTDNDGDNDGKGEDPMEEDANKNNGTPDDLPKDAAPENAPADQLPKHGAGAETGKLKEKTVAKSDPGKNKRPVAVLSQGISLEGSIQWQANMLGNHGIQWQANMLGNHGSSSKPVVHKGETVSPLRSSKRNVSSLEQDSMEKATKLKARKNLDSTAAKDDSVILATTDSLGINLGDDVSSVLDSVHSLKQIELQRFNDFCSSSKEEKRSCEENSSVCSEDNVDIDALNTICSEIAESLGDGGCDPLCLHTPLSQIKRRQPKAQSDLKGHFLSELVRVCSKETIPTVVGGVFNILRNPQEKNNDNFNDRWPFLFNAVIDTLNLRELESSGRSFTWANHLQNQTFEKLDRILVSTEFETKFPLSTVSILTREISDHTPLLYNSGGASAAYQPQFKFELGWLRRDGFSDIVKEVWQGVSIEGTPLERWQRKIRRLRQFLRGWAKNITGAYKKEKKELLDKLDTLVKKAEHTILNEFELNVKHVLNDRLAELLREEEIKWYQRAKVKHLLEGDANTKYYHLLANGRHRKTRIFQLQDGNEVITGDAQLKEHITKYFKTLFGPSQTSSIFLDESQVDDIRQVSAEENESLTADFTEEEIKCAIFQMKHNTAPGPDGFPPEFYQAFWTIIKDDLLALFSDFQQGSLPLNSLNFGTIILLPKQKDVRTIQQYRPICLLNVSFKIFTKVATNRLTSVAQKVIKPTQTAFLPGRNIMEGAIILHETLHELHTKKQDGVIFKIDFEKAYDKVRWSFLQQTLRMKGFSHKWCNWVEKFTQGGNVSIKVNDQVGNYFQSKKGLRQEDPMSPVLFNIVVDMLAILIARAKNADRVEGVIPHLIQDGLSILQYADDTASGNFTVKSMYAALISNGIRVSQDIWQIKVLFRGTHWLRQWAKLQRHEDLRSQLIAASQHLESSALQFFSSNGWLSARHIGL

SEQ ID NO: 175779 - protein, 81 aa, Oryza sativa
  Clone ID: PAT_MRT4530_73591C.1.pep
KVQQNHSSRRGKIRQHRNQFSSLYKINCLIARHEQVFQHLSPWDRLTHLQTEKTGKCISSMVLIDVKVRDRCDRGYPERAR

SEQ ID NO: 175780 - protein, 1664 aa, Oryza sativa
  Clone ID: PAT_MRT4530_73592C.1.pep
MTGRPKPVHAVTPSPASPIRSKFWATPDDDDSEDDDEAPTPPPFTGSSATSSPSTEEFVNEASAAGFSRAQLVMAEQQLQAGKNSDQRLPEVILSTLLRRKLVGPPWRGPLPAERVSPPRTLGDCLASASRCPRRRRRDGRRCGVPRSSSSPEAGTVGSKFVIPKSLGVSNDSDQLLRQGSRPDFPPLCGAHSSVSTAIASAGGEVRRPAPSASQSDRIRLGPGKWFRPTKGLISLFARSGLKPRSRKLQPPSRPTATISYAAVVRRGKAMAAHGGRGFGGQGGGRGWGFAQGFHPGFDGGRGRGRDQRGRPHGHNGGGFGGGYGGGYGGGGYGGNSHGGYGGNRNRRGWQGGRRFAPAAGHAAGQFHAGGGVPGHQAGGQAVVGQLQQQAAAGQFQPAGFQTAGLADQQPAQAPFQAPLAGQQPTQPAAAGNQTREAGAVLFQQVSQSQKAQVAAPANGGGLGTSQVGTSALLASSQAAPAAAPAGSTRGAIIGGSAQDPAATHLEGFMATKPEPAQAGKQKSKGKPYCFRCYTKGHTLDDCTVLLCCDLCFENHVLKNCPNVKKTNAIAAPCGYAVEGMGFYYIPMNDNPKSNVEEHTVLVRVLDGSFTVDQLTVELDRLLPAKITWEIGLKGSDAFIITNFPSELREYAVNWGPMDTKTIKGKIRFEKGVENDVNRYEIDKVWVQFRGLPSELREFPIIWAIGSILGVSKAVDMRFTKTFGRSRLKVAVLDPNRIPDYVDVVIGDFVYELQFRMEIDMPVGEPSVIDMDSTTDNDGDNDGKGEDPMEEDANKNNGTPDDLPKDAAPENAPADQLPKHGAGAETGKLKEKTVAKSDPGKNKRPVAVLSQGISLEGSIQWQANMLGNHGSSSKPVVHKGETVSPLRSSKRNVSSLEQDSMEKATKLKARKNLDSTAAKDDSVILATTDSLGINLGDDVSSVLDSVHSLKQIELQRFNDFCSSSKEEKRSCEENSSVCSEDNVDIDALNTICSEIAESLGDGGYDPLCLHTPLSQIKRRQPKAQSDLKGHFLSELVRVCSKETIPTVVGGDFNILRNPQEKNNDNFNDRWPFLFNAVIDTLNLRELESSGRSFTWANHLQNQTFEKLDRILVSTEFETKFPLSTVSILAREISDHTPLLYNSGGASAAYQPQFKFELGWLRRDGFSDIVKEVWQGVSIEGTPLERWQRKIRRLRQFLRGWAKNITGAYKKEKKELLDKLDTLDKKAEHTILNEFELNVKHVLNDRLAELLREEEIKWYQRAKVKHLLEGDANTKYYHLLANGRHRKTRIFQLQDGNEVITGDAQLKEHITKYFKTLFGPSQTSSIFLDESQVDDIRQVSAEENESLTADFTEEEIKCAIFQMKHNTAPGPDGFPPEFYQAFWTIIKDDLLALFSDFQQGSLPLNSLNFGTIILLPKQKDVRTIQQYRPICLLNVSFKIFTKVATNRLTSVAQKVIKPTQTAFLPGRNIMEGAIILHETLHELHTKKQDGVIFKIDFEKAYDKVRWSFLQQTLRMKGFSHKWCSWVEKFTQGGNVSIKVNDQVGNYFQSKKGLRQGDPMSPVLFNIVVDMLAILIARAKNADRVEGVIPHLIQDGLSILQYADDTVIFMSHDVAKAINMKLILTTFEQLSGLKINFHKSEIFCFGRAKENEAFYSTIGVRLDKGG

SEQ ID NO: 175781 - protein, 120 aa, Oryza sativa
  unsure (1)..(120): unsure at all Xaa locations
  Clone ID: PAT_MRT4530_73593C.1.pep
FFFFFFLLIXXXSHYXCESGTHTQTXKTHAPTIARXXLHDKHSPXHCGCKYXTXEHTTLXRCTHXGGQRALDTSXFCVXVRHGGPTSAXLRVXRWGIYPRRGHXXRPIISTPHHXNXFSX

SEQ ID NO: 175782 - protein, 69 aa, Oryza sativa
  Clone ID: PAT_MRT4530_73594C.1.pep
MAFPHRPSPPLFVFLLRPVARAHHMFDEMSRPSTESWQCCVAPSRPPMRRAPCQDRIAPKPRPAKPHIP

SEQ ID NO: 175783 - protein, 112 aa, Oryza sativa
  Clone ID: PAT_MRT4530_73595C.1.pep
KFKNPGDEKKKFFLKNPQNYITGAAFKKKKIMKKTGGPQINPLLTLPPFAHFGFLIRAPTLFPFQKFSNRWWGKNPPFPKLFTWGGVGFFPNWIFNIGAPLIPLSFNFFPFF

SEQ ID NO: 175784 - protein, 92 aa, Oryza sativa
  unsure (1)..(92): unsure at all Xaa locations
  Clone ID: PAT_MRT4530_73596C.1.pep
FFFFFFLATMXLFLFXSSEAKSNGDLLPTSHRHLIPSPVWAPPQTISGXFLRTIHPRANQIFHHXVQHPFLNIIGYNKHAPNTSHEGVSTSX

SEQ ID NO: 175785 - protein, 54 aa, Oryza sativa
  unsure (1)..(54): unsure at all Xaa locations
  Clone ID: PAT_MRT4530_73597C.1.pep
IANSRELDYYSLMLSERXESLSLVCYHSQMCLERWNARQTDLXHNFMLGRTTQR

SEQ ID NO: 175786 - protein, 50 aa, Oryza sativa
  Clone ID: PAT_MRT4530_73598C.1.pep
MNFVVALEVLMLGLRTNGVVIVGVWCVSGESFLVHPVPVEVLVVDVIAVE

SEQ ID NO: 175787 - protein, 71 aa, Oryza sativa
  Clone ID: PAT_MRT4530_73599C.1.pep
EHLRPNQYEALVPGNEVGQDNLVTRDEMAGLLKLRVRRNRPPATKEKQIQVAMVRKKRKIDNASTDHNCKM

SEQ ID NO: 175788 - protein, 151 aa, Oryza sativa
  Clone ID: PAT_MRT4530_7359C.1.pep
PRAKKRGGETPPLSPHAGGPEGEPPPPSPEVARFEAGQLMPPGGPRPCLETRPPRARGGPWAGGPLPPGRPKFFPPPPNTPFNPTGPRVYPGPGGTQANGKKKKFGKPFFSFFFLFTGSPQGALAKGRFPPREKKGKIPREPFSPIIPFFF

SEQ ID NO: 175789 - protein, 41 aa, Oryza sativa
  Clone ID: PAT_MRT4530_735C.1.pep
MAHPELEMAHRELKLAHRSTTPTEAVLPYNPAEGLSQDSLY

SEQ ID NO: 175790 - protein, 64 aa, Oryza sativa
  Clone ID: PAT_MRT4530_73600C.1.pep
MGRRWAATRKSRRAESTAACGSSRRRWGGGGGGGEEGGVNCSDGKALGGRGADSGSRPAESKEK

SEQ ID NO: 175791 - protein, 46 aa, Oryza sativa
  Clone ID: PAT_MRT4530_73601C.1.pep
LEHHSSLQYKFEPCHVRPINSYVRPNGVVFNNQLVAITHQCWVELL

SEQ ID NO: 175792 - protein, 528 aa, Oryza sativa
  Clone ID: PAT_MRT4530_73602C.1.pep
MSESGRVTAGGGRGELRPPELPRDPALEFLSRSWSASGAADVSRRALAAAAFPAAAASAAVIAEDVSGELDVDGSASGSSFSFASAATSQLIMDRIMSQSIDTENLLVSCFMEQQEVSPLTSGRLSHSSGPLNGGGSLSDSPPVSPDVDDSKAHMLQKYYTPKSHCRIISDQQEEVFDLMVFGGCLFCRAVSTPKPQPYRGVVGGGGKTVGRWLKERKEKKKEEARAHNAQVHAAVSVAAVAAAVAAVAAATAASGGGRDDRAARTDMAVASAATLVAAQCVEAAESLGAERDHLAAAIASAVNVRTPGDIVTITAAAATALRGAATLKARALKDVWNVAAVIPVEKNAIAAATTGGGHHKHNAQKQQHHHRHHGNGSNTSSSFSDEVAAVDDDDDDDNNFLTICSQELLARGTELLKRTRKGALHWKVVSVYIHRTGVVMLKMKSRHVAGTLTKKKKNVVVDVCRDVAAWPGRHLLEGGEHRRYFGLRTAEHRVIEFECGSQREHDMWTKGVARLLATIDGRRKRFA

SEQ ID NO: 175793 - protein, 88 aa, Oryza sativa
  unsure (1)..(88): unsure at all Xaa locations
  Clone ID: PAT_MRT4530_73603C.1.pep
MAASTMALSSPAGLAGKGXANAKVFGEGRVTMRKSAAKPKPAAASGSPWYXADRLXYLGPXSGEPRSYLTGEFPGXKVWXXPVFGPKF

SEQ ID NO: 175794 - protein, 170 aa, Oryza sativa
  Clone ID: PAT_MRT4530_73604C.1.pep
VSSILQRPKLPYVKMVSRPCHSNQLIILQQQHTHAMTPNRLQPRMRRKRLLRRWDRIRRETSRRPPAAAAAADPGGARASPGSARARRRPPASGPRRLPYVSSRRRSSGRVAWGSAGSRPEGGGRSSLVGTWALEWVGGGGGGGGGGFVSPTLMDSSVVLLTLAWASLST

SEQ ID NO: 175795 - protein, 59 aa, Oryza sativa
  Clone ID: PAT_MRT4530_73605C.1.pep
PKQAGLAVDRDLRARPETRERSGEGGGWRALLSYLWLPNKHKGRGGVTRQCYDGWMIRS

SEQ ID NO: 175796 - protein, 77 aa, Oryza sativa
  Clone ID: PAT_MRT4530_73606C.1.pep
DHQPGLKIKYAHCSHQPGLKMIFSGIGTIVDFGRPTKNGFSTSGSKATTLQCHLYVRFQFMCLVHVKIESLVEIRMM

SEQ ID NO: 175797 - protein, 67 aa, Oryza sativa
  Clone ID: PAT_MRT4530_73607C.1.pep
VNPPIFQHVILEGAGFAFFTTYALLALFWAEILYQARGIMTDRLRSGFYIINCVVYALQVKHDLSIY

SEQ ID NO: 175798 - protein, 1584 aa, Oryza sativa
  unsure (1)..(1584): unsure at all Xaa locations
  Clone ID: PAT_MRT4530_73608C.1.pep
MASALVLASQEVGEGSRDRDSHGTLEGDAEGFYTEGPGTFTEGEVYEEEEDAIEVNLEDEEVKLAGQWTILSRYYSMRTPIPTALFDDMRRAWRLKSGMSYKSLRDNLFIVTFTSEGDYQFVVQGGPWLHRGDALLVAQFDGIISPSQVPLEVVPIWVRIYDLPLVLMTRERGNLYGSKLGHVREVDVENDGRNKHDFFRIRVDLPVKRPLRKKLAIKIKEQGSEVVRHFDLRYERVPHFCFICGFIGHSDKDCEKKLLTGGQPFQFSADLRCSPLKPFERKISKIQPVQSSGVAHKLSFRSAGSASSTSSRQKKGEQWDEAIPPRVSAQTGPEQYGELSREVITDIVVDQLPSEEMIPAMKNLHQQASFGEGSMDETNSQHKRRTTEQGDGKHSGRVKQALLEYGKAAEESKQLQLAPSSTPRALKRFKKEKGESIKVEDREATSSGAAGEMSCLSWNCRGIGNATTVRDLCTLVKEVGSHLVFLCETRQKVERIRHLRNRLGLKGFAGVSNEGMCGGLALFWHETVYVEVLNMNERHIDAYVRMTVDGPLWHVTFVYGEPCVENRHRMWSLLEDIRQSSDLPWLVMGDFNEVLWQYEHFSKRPRNESQMRAFRDALHSCELHDLGFRGLPHTYDNKREGWNNWRDVFSNAQLSHLVSPCSDHCPIVLQLSGDSRTQGRKKCLQYEIFWEREAAISEVIGEAWSEYGTKEDLGEINKALSKSKITRLFQTKVSAKMNDKLCEDFTEEEVAIAMFQIGPIKAPGPDGFPARFYQRNWGGLKSDIVRAVKEFFRSGIMPAGVNDTAIVLIPKIDQPTELKDLRPISLCNVIYKVVSKCLVNRLRPLLDELISVNQSAFVPGRMITDNALLAFECFHYIQKNKNPNKAASAYKLDLSKAYDRVDWGFLEQAMYKLGFAHRWVRWIMECITTVRYSVKFNGTLLHSFAPSRGLCQGDPLSPFLFLFLADGLSLLLDEKVQQGVLSPIHICRSAPGISHLLFTDDTLLFLKAVPEQAEVIREVLNDYATATELVQEAIRDTLQIANNVFEDKYLGFPTPDGRLKKGKFQSIQERIWKRLIQWGENYLSSGGKEILIKAVIQAIPVYVMGIFKLPESVCDELTRITRGFWWGGEKGRAIEFGLELLKKGIIWRIGNGRSVRIWRDPWIPRDHSRRPITKKSNCRTKWVADLLTDAGEWDVDRVRQIFWPIDAEVILKIRVPSQDVSDFVAWHPDRLGRFSVRSAYSLAVSLASENACSASSAVDRSKAWNMLWKCNVPQKVKIFAWKVALDCLATMVNKKRRKLEATDVCAICGTEEEDIAHALYRCPHAKSLWMVMKESQNISCIMDDGPFVSGWIFDRLEHLLEPERAMFLMVLWRNWFVRNDITHGKPAPTTESSRRFLESYMCSLLEIKQXPQANLMKGKHVVDYVATXRHQEFPDVEQCQAQVDKGGISMVLRDSTGEVIASACKPLASCISALESELLAYREGLLLALHWSLRPIIVESDCLEAIQLLKSTEKAMSDQAFLVKEIKDLIHVSREIKLVKGHRSQNSISHLLANKASGENISEVWLGNSCSFISHLVCNDILEE

SEQ ID NO: 175799 - protein, 78 aa, Oryza sativa
  unsure (1)..(78): unsure at all Xaa locations
  Clone ID: PAT_MRT4530_73609C.1.pep
FFSKPKFFXXXPPPQLCQQALSKTFSNTXTITXTLQPFRPFHXXXXRXIPSHXAXPXXPAQNLLFPXWXAWTXALVXR

SEQ ID NO: 175800 - protein, 587 aa, Oryza sativa
  Clone ID: PAT_MRT4530_7360C.1.pep
MLGQAHIDVSRKILDLCKGLPVAIVTIAGLVACKPQAYEKQCAEICVSLPPVSVDCHTPEGMTRILNYCYSSLPADLKTCSLYLSVFPKDSRISRKRLTRRWIAEGFISEEHGQSMKERAETNFNLLIRRNILKPVDHSSDGKVKTCQVHDMILEYIMSKSSEENFITVVGGHWLMRTPSNKVRRLSIHSSDVKHAKETMDRMNLSHVRSVTVFGSLNQLPFMSLKLGIVQVLDLEGCKGFKKQHVKDIFKMLLLKYLNLRGTDINSIPSKIGKLRYLETLDIRDTNVQKLPDAIVQLERLTSILGGNTMAQVTLKLPAEATKKPLRTLHILSGIEITGEPTSVNDFHGYTALRKLGIHKLQIQEGTPGFKALLSSIQYLGGSSLKNLLINDECSGFIDALDSLTSPPRYFHSLQLYGMFIKVPRWIAHLTELKNLTLSVTVLRTDTLELLQKLPRMFCLIFSNKSDSEGQILVKHGGFDCLKLLRLDAPLLPLLVFSERAMGNLERLDMKFNTLEGVFGMDNLASLREVHMTAGEKAGEITKSIVRELEAEAGKYANTPRVVRDRAVSRTPRATSCSNARFRAFIS

SEQ ID NO: 175801 - protein, 356 aa, Oryza sativa
  Clone ID: PAT_MRT4530_73610C.1.pep
MGGGRKRRRRDGSEAPAIHPRNRYAAAAPDFASLASLYPSFAPFVSVSRGGRASIDFTDFAATRELTRVLLLHDHGVNWWIPDGQLCPTVPNRSNYIHWIEDLLSSDLIPPISSSNKTVRGFDIGTGANCIYPLLGASLLGWSFVGSDVTDVALEWAKKNVESNPQLAALVEIRNANKMSCSSESEAVDGEAARENTSKPVDGVLRSKPSILLGVVKDSESFDFCMCNPPFFESIEEAGLNPKTSCGGTAEEMVCPGGEQAFITRIIEDSVSLKNSFRWFTSMVGRKANLKILVSKVREAGVSVVKTTEFVQDEQAQAAMLHDESGSVEGNSTKLHSGVLEHPSVFRCLNKCQAHS

SEQ ID NO: 175802 - protein, 917 aa, Oryza sativa
  Clone ID: PAT_MRT4530_73611C.1.pep
MASALVLASQEVGEGSRDRDSHGTLEGDAEGFYTEGPGTFTEGEVYEEEEDAIEVNLEDEQVKLAGQWTILSRYYSMRTPIPTALFDDMRRAWRLKSGMSYKSLRDNLFIVTFTSEGDYQFVVQGGPWLHRGDALLVAQFDGIISPSQVPFEVVPIWVRIYDLPLVLMTRERGNLYGSKLGHVREVDVENDGRNKHDFFRIRVDLPVKRPLRKKLAIKIKEQGSEVVRHFDLRYERVPHFCFICGFIGHSDKDCEKKLLTGGQPFQFSADLRCSPLKPFERKISKIQPVQSSGVAHKLSFRSAGSASSTSSRQKKGEQWDEAIPPRVSAQTGPEQYGELSREVITDIVVDQLPSEEMIPAMKNLHQQASFGEGSMDETNSQHKRRTTEQGDGKHSGRVKQALLEYGKAAEESKQLQLAPSSTPRALKRFKKEKGESIKVEDREATSSGAAGEMSCLYGTVGVLGTPRQFVIFVPWLRRQKVERIRHLRNRLGLKGFAGVSNEGMCGGLALFWHETVYVEVLNMNERHIDAYVRMTVDGPLWHVTFVYGEPCVENRHRMWSLLEDIRQSSDLPWLVMGDFNEVLWQYEHFSKRPRNESQMRAFRDALHSCELHDLGFRGLPHTYDNKREGWNNWRDVFSNAQLSHLVSPCSDHCPIVLQLSGDSRTQGRKKCLQYEIFWEREAAISEVIGEAWSEYGTKEDLGEINKALSKSKITRLFQTKVSAKMNDKLCEDFTEEEVAIAMFQIGPIKAPGPDGFPARFYQRNWGGLKSDIVRAVKEFFRSGIMPAGVNDTAIVLIPKIDQPTELKDLRPISLCNVIYKVVSKCLVNRLRPLLDELISVNQSAFVPGRMITDNALLAFECFHYIQKNKNPNKAASAYKLDLSKAYDRVDWGFLEQAMYKLGFAHRWVRWIMECITT

SEQ ID NO: 175803 - protein, 97 aa, Oryza sativa
  Clone ID: PAT_MRT4530_73612C.1.pep
WFKTKAPIPKWEGAPFFPPFHLKGGAPSPPITPPWKFCFFEGLFWPGSKYLFPGLNYLRGLLVPANWPFFGAPSPKFPKFFGPGVFFFKTPGGGPLF

SEQ ID NO: 175804 - protein, 546 aa, Oryza sativa
  unsure (1)..(546): unsure at all Xaa locations
  Clone ID: PAT_MRT4530_73613C.1.pep
IFKLPESVCDELTRITRGFWWGGEKGVRKTHWKAWDTLTKPKNCGGLGFRDFRLFNQALLARQAWRLIDSPDSLCAIVLKAKYFLNGNLIDTSFGGNASPGXRAIEFGLELLKKGIIWRIGNGRSVRIWRDPWIPRDHSRRPITKKSNCRTKWVADLLTDAGEWDVDRVRQIFWPIDAEVILKIRVPSQDVSDFVAWHPDRLGRFSVRSAYSLAVSLASENACSASSAVDRSKAWNMLWKCNVPQKVKIFAWKVALDCLATMVNKKRRKLEATDVCAICGTEEEDIAHALYRCPHAKSLWMVMKESQNISCIMDDGPFVSGWIFDRLEHLLEPERAMFLMVLWRNWFVRNDITHGKPAPTTESSRRFLESYMCSLLEIKQXPQANLMKGKHVVDYVATGAIRSSQMXNNVKHRWVRPPLGWVKLNIDGSFDASQDKGGISMVLRDSTGEVIASACKPLASCISALESELLAYREGLLLALHWSLRPIIVESDCLEAIQLLKSTEKAMSDQAFLVKEIKDLIHVSREISWLRVHRSQNSISHLLANK

SEQ ID NO: 175805 - protein, 43 aa, Oryza sativa
  unsure (1)..(43): unsure at all Xaa locations
  Clone ID: PAT_MRT4530_73614C.1.pep
DFGTQCRNTFLLLAHQKKDGSXVGNMDQKNYVMSGGHSRTPYY

SEQ ID NO: 175806 - protein, 74 aa, Oryza sativa
  Clone ID: PAT_MRT4530_73615C.1.pep
SNWLGYSDTLEVRVDKTTRSSRILYDGLIPEVGHATNLARYVHMRLGQVNTIPAPVCLGVSTCRAPGSPHWASD

SEQ ID NO: 175807 - protein, 44 aa, Oryza sativa
  Clone ID: PAT_MRT4530_73616C.1.pep
RTRSSRYSQSICTMRLTSGLGLYVRYLTHYTLASQLVGFTSHTP

SEQ ID NO: 175808 - protein, 675 aa, Oryza sativa
  Clone ID: PAT_MRT4530_73617C.1.pep
MAVFIIANNPLARYAVLFAAAVFLVAAAQAQPTTPPPPPPPEMDCNGILLTYNLDRRDKIRPFVAAPEADAQPYSFRATATVLNSGTRALRSWTLRLTFHHREILVQLDGAVLTSGADLPYNTTADNATSFSGYPQTDLLTPIATAGDLTKIQATLNLVGTLFAGPPPYVPLPSALSLADPSYTCPPAINVSTSTLSTCCILTPEAAANASAGDLDAGRATSYLPRGAGDLVITYDVLQAHETTYLAQVTLENDALLGRLDGWELSWEWLRGEFISSMRGAYPRQVGATDCVYGAQGAFYKGLDFSKVLNCDRKPAVLDLPPSRRGDEDIGGIDHCCRNGTMLPKSVDAAQSKSAFQMEVYKMPPDLNRTKLYAPANFRVSGASPLNPEYACGQPVRVTPTELPDPSGLASTTLALATWQVVCNMTAAPPSKPPSCCVTFSAFYNESVIPCRTCACGCPASPAAACSTTAPSMLLPPYALLMPFERRGREAVWWAGEKRLGVPRPMPCGDSCGVSINWHVATDYAGGWSARATLFNWEGADVAEWFLAVAMEKQAYDGFEQAFTFNATAMGNGTTMILMKGREGFQYLKRESNMSGVDYPVAGKQQSVLLFTKKRSGGGIDVVGGDGFPTRVLFNGHECAMPQRIPSSAHRRCLVLLWTTLLVFMSSILLVLSLL

SEQ ID NO: 175809 - protein, 272 aa, Oryza sativa
  Clone ID: PAT_MRT4530_73618C.1.pep
MGRRACCAKEGMKRGAWTSKEDDVLASYIKSHGEGKWREVPQRAGLRRCGKSCRLRWLNYLRPNIKRGNIDDDEEELIVRLHTLLGNRWSLIAGRLPGRTDNEIKNYWNSTLSRKIGTAATAAAGSRGGSTPDTARATDAASSSSVVPPGQQQQPASRADTDTATAAAAAAATTTTVWAPKAVRCTRGFFFHDRETAPLAAAAPAPAGELGDGDDVDCDYYCSGSSSAATTTSSSSLPAVVEPCFSAGDDWMDDVRALASFLDTDDAWNLCA

SEQ ID NO: 175810 - protein, 52 aa, Oryza sativa
  Clone ID: PAT_MRT4530_73619C.1.pep
TRRIPILKFLGPCLKTKILSQFRLKIFYTVKKNCAETKRKLDGSCIVSAPSN

SEQ ID NO: 175811 - protein, 86 aa, Oryza sativa
  Clone ID: PAT_MRT4530_7361C.1.pep
RRYRGVRRRPWGKWAAEIRDPRKAARVWLGTFRTAEDAARAYDAAALRFRGRRAKLNFPEEVRHCRRRTWRWRDVGRRCAALPAPS

SEQ ID NO: 175812 - protein, 140 aa, Oryza sativa
  Clone ID: PAT_MRT4530_73620C.1.pep
MDHSTSLLRLIFLALGAALVVLVVRSAFRLPGDIDTTTTSLFDDGNGGSCTRFSPWACRQGRGDPRSKPSKPRRPSHESDVPRHPLDPLTVREVNRVRELLRAHPLFASAPSSLFVHSLELDEPEKSVVKSWRKGADPLP

SEQ ID NO: 175813 - protein, 78 aa, Oryza sativa
  unsure (1)..(78): unsure at all Xaa locations
  Clone ID: PAT_MRT4530_73621C.1.pep
QILEXQSLQLFLRIGINLPPSKFXMTLRQCLCXNNSSRKNYGLWPNARXQKGEDYCGSSTPTLAQDMTNACHYSSSYT

SEQ ID NO: 175814 - protein, 776 aa, Oryza sativa
  Clone ID: PAT_MRT4530_73622C.1.pep
MEVLNTNDHGTARTRDGEETASVPVENPDSSHEMEKKLTHNLTENGQAPTGHTVPSLPDTVSKLKPAQESDDSLKDKTDLPTSTSKTEVNNISENGSTNQSTMLSDESRTKEDKMNHHENIAATTNKKAETDARPESPYRGLIDTAAPFESVREAVTKFGGIVDWKAYRSQTLERRRVMQLELEKAQQEIPQFKQDSEACEMAKLQVVEELGRTRRLVEELKHKLERAEIDVDQAKQDSELAQLRAQEMEQGIDDEASVIAQTQLAVAKERHQKAVDELKLVKEEMRSTHEKHTVLASERDIAAKRAEQAISAAKETEKRVEELTLELIAIKESLESAHAAHHEAEEHKLGAALAKEQDCLAWEKELQQAQEELQQLNMQLVSKTDAKSKIDENTHMLQILSKELAAYTENKMSEEAGVIEEDGSDEAKEISRSIKRALASTRKELEGVRGNIEKAKDETNLIRAIAESIKSEVDKEKASLVTLQQREGMASIAVSSLEAELNRTKEEIEMVYIKEAETREKMAELPKMLQQAAQEAEDAKVAPHSAQEELRKAKEEAEQTKAAAATAEIRLRAVLKEIEASKASEKLALVAAQALQESEETSSVEDSPRTITLPISEYHSLSKRVYEAEELANERVAAALAQIELAKESETRTLERLQQETKEMHKKKDALQIALQRADRAKEGKLGAEQELRKWRAELEQRRKAAKHVANPWTAPPIRSPEQKGSYKEDDAVLTEPNSPMSNSSTDDFVVDQKLRKKKTFFPQMSSILSRKAQT

SEQ ID NO: 175815 - protein, 67 aa, Oryza sativa
  Clone ID: PAT_MRT4530_73623C.1.pep
ARGEELVRHVQVPIHAQPLVLIIAAYLQLNARISHTKAPEACILGTAKKGISNMFFLVFQNPITECV

SEQ ID NO: 175816 - protein, 1128 aa, Oryza sativa
  Clone ID: PAT_MRT4530_73624C.1.pep
MASTEQQEHAAPLLQPEVEEAYTSDGSLDIDGNPALKHRTGGWRACRSILGAEFCYCLANNGIMYNLVTYLTTQLHQSNVAAAKNVSIWKATCFLTPLAGAVVADSYWGRYRTMVVACCVGVAVSLLRSPHFNQSLHPAMNSAQGMLMASLSALLPQLIESSSTLSMPSAQEFVLFLGLYMIAFGFDAGDTSERASKASLFNWYVFTMNCAAVISATGLVWVQGHYGWALGLGIPAMVLAVGLSCLVAASRTYRFQTTRGSPLTRVCQVAVAAVRKFNVAAPGDMALLYELPDDASSMKGVERIEHTTDLEFFDKAAVVTASDEEAPRNPWRLCVVTQVEELKILVRMLPVWACIAFFYTGTAQTKSTFVEQGMPMDAHVGALRVPPASLAAFQMLTTIVLIPLYDRVFVPAARKHTGREKGISDLLRIGGGLATVGLAMAAAATVETKRASAARTTASILWQAPQFVLVGAGELLATIGQLDFFYSQAPPAMKTVCTALGLLAVAAGDYLSSVIVTAVSWATASGGRPGWIPDDLNEGHLDRFFWMMAGLGCLDLLAFTCCAKRVLGLPLGQLKDGRKIRVGHLKFGSNRRTGLIKGHGPSRPMNTARVDGLSLLLKEKVMKGAISPVHAKTEEADVIKEVLSSYESSTGQLINPSKCSIMFGEATPTDVQEAIKASLQVANNSFEDKYLGFPTPEGRVCKGKFQSLQDRIWKRLLQWGDSFPSSGGKEVLIKAVIQAIPVYVMGVFKLPDSVCDDLTWLTRNFWWGADKGVRKTNWKAWDRITRSKGYGGLGFKDYRLFNQALLARQAWRLLDNPDSLCARVLKAKYFPNGSLTDTPFSGNASPRWRGIEHGLDLLKKGIIWRIGNGCSVRIWRDPWVPRDLSRRPITLRNNCRLRWVSELMREDGSWDVNRLESIFLPIDVEKILQIRPSSRQEEDFVAWHPDKNGRFSVRSAYKLAEQLAQEEESSSSSGVSMKKAWDNIWKCNVPNKVRVFAWKAASDCLATMVNKKKRMMASSDTCTICGVDSEDTTHALLWCPHSRALFKSMEGLHCSSPGKGDGAWGSSPGDRAGPPLPVRPGTQGEILSSLTNVPSLGGNTLAPAGDERLEALVLTGWGEACVRSPVAT

SEQ ID NO: 175817 - protein, 410 aa, Oryza sativa
  unsure (1)..(410): unsure at all Xaa locations
  Clone ID: PAT_MRT4530_73625C.1.pep
MCCKCQCCTEKTDVAKRRPAQPTTTRMHGWRIAMRHFAHKFSPFYTQTHDQISIRKYIMHIENRLHQPSTSINACLAKNKGNDSESWCLVVVCYQVPTCRGEFLLASPTKLKILNDLGKITRHRSSRRIAKHRKXTHRNGRLIGPQEKRRNQMREIDSEEMFQEKLKLSPXFQTPPEWQYLLKSERKCWPDYWTNTTTAARASGRDMQQTARCEEGDMSMHPRMRFCLDRPAPPSAAMHDSEGRPMDQLDQLYRHREPSVARLASIAVATPAKKPAAPANLGLYGLIAQPGLAHHATCAIISQAFTLGPTGSTTGPEGACRHRMRQEILPPADDDEATIRTRDSQLPPHAARGPCILLFRDTNCAVAWRVVWWRRDMSSRRRDSTRIGTHQQGRPSRRLSSVYSDPIKKA

SEQ ID NO: 175818 - protein, 120 aa, Oryza sativa
  unsure (1)..(120): unsure at all Xaa locations
  Clone ID: PAT_MRT4530_73626C.1.pep
TDFRRGKGGLGGEVTGGWRRIIXRRRTAAWYSAAFVAARAGACGGGGGGSRRGTGAGLRWRALLGGRXRRLPKAGDAAAPRRVGASDGGGRRRRPRRFLRRAAQCFLQGRRREEQEAAAH

SEQ ID NO: 175819 - protein, 93 aa, Oryza sativa
  unsure (1)..(93): unsure at all Xaa locations
  Clone ID: PAT_MRT4530_73627C.1.pep
SAQTVLNCQPISSVQPIVQQLXLQQFAGVYFDQAQAQAQAMLPLNLPSNIRYLTQATNNCSPVAIPTVGGIWYVNCTSIVVQERKIKSGIIVV

SEQ ID NO: 175820 - protein, 105 aa, Oryza sativa
  Clone ID: PAT_MRT4530_73628C.1.pep
MGERRSGYRDRGGGEQGRYWRPPRSHGNGNFSVPLWEKKFCTDACAIPWGKLCETKKLMSLYKNVVDWDDSAALETFNDAKARFCAVYHGQPCDIPLPDPNMYID

SEQ ID NO: 175821 - protein, 71 aa, Oryza sativa
  unsure (1)..(71): unsure at all Xaa locations
  Clone ID: PAT_MRT4530_73629C.1.pep
VPLDTQGCCWPDLSVSCDNYNLGETLTIXLQPYETLCXALAIDTPLRGLLILPVQINPIPASKSKKQVRTR

SEQ ID NO: 175822 - protein, 129 aa, Oryza sativa
  Clone ID: PAT_MRT4530_7362C.1.pep
MGEEKKEEEEEKAAAAEGPDLLCSLLEQGRLASPARPPAAQPSDHPMIERDIWNPTGAPAGIRALVWFANTVALVLLAFFVVPLVPRCNSIEGVFAIVFCLVILLGIPVMGHCTLKEIHEEMKAREGGR

SEQ ID NO: 175823 - protein, 453 aa, Oryza sativa
  Clone ID: PAT_MRT4530_73630C.1.pep
MHNKRKPGLFFKLDIAKAFDSVSWEYLLEMLQWRGFGTRWRDWIALLLSTTTSKIMLNETTGEAITHKRGLRQGDPLSPYLFILAIDPLQKILNVATDQGILSPITNRVAKFRTSLYADDAAIFLNPSRADVDNLITLLEKFGHATDLQVNLSKSSVVPMRCENIELQEVLNNFNGKRTNFPITYLGLPLLTGRIKRVHLQPVMDKLHSRLAGWKGKLLQQAGRKTLVSSVLTSIPTYFLTALKPPKNFLHDMDKIRKRFLWAGDKEISGGKCKFSWESPNKPWAGTPPPCDEMDRRLFASATRVTIGDGRKASFWESNWIGEQPRKELAPALYNHAKRKGRTVYEGLANDQWILDIRHNLTVELVKEFFEVFYHVWNSDIALTEGVEDTITWRWMANGKYNAKSAYIAQFNGRISSAAAKLIWKHWAPSKCKHFAWLLLQNRIWTANRLQIR

SEQ ID NO: 175824 - protein, 63 aa, Oryza sativa
  Clone ID: PAT_MRT4530_73631C.1.pep
MAAARDEGAADERMAARGAGRWAGGGARRVGGRWTMDDCMQRRRRRCMATARDEGAADGRTAA

SEQ ID NO: 175825 - protein, 516 aa, Oryza sativa
  unsure (1)..(516): unsure at all Xaa locations
  Clone ID: PAT_MRT4530_73632C.1.pep
VNVLHDDCHAWIESRSIQSRRIATLFTFVLFRRVLAFGLSCIGFDLQQEVKLQYTQIISIYSATTLVHTQWHNRNGTPRPLFLKRGPSAKAFDSVSWEYLLEMLQWRGFGTRWRDWIALLLSTTTSKIMLNETTGEAITHKRGLRQGDPLSPYLFILAIDPLQKILNVATDQGILSPITNRVAKFRTSLYADDAAIFLNPSRADVDNLITLLEKFGHATDLQVNLSKSSVVPMRCENIELQEVLNNFNGKRTNFPITYLGLPLLTGRIKRVHLQPVMDKLHSRLAGWKGKLLQQAGRKTLVSSVLTSIPTYFLTALKPPKNFLHDMDKIRKRFLWAGDKEISGGKCKVNWPEKFARALRVRWLXFSWESPNKPWAGTPPPCDEMDRRLFASATRVTIGDGRKASFWESNWIGEQPRKELAPALYNHAKKKGRTVYEGLANDQWILDIRHNLTVELVKEFFEVFYHVWNSDIALTEGVEDTITWRWMANGKYNAKSAYIAQFNGRISSAAAKLIWKH

SEQ ID NO: 175826 - protein, 158 aa, Oryza sativa
  Clone ID: PAT_MRT4530_73633C.1.pep
TGHATANAEKVTCDAKLCEEMMIQAPPFHQASGRTRTPAAAAAAASKQKSTQIRYPSGLVRCCSRSRGRSCRARRRGRRPRRRRGRGRARRLGGIRPGQPSPPTSTRSRRRRRRPLAPPANSPCLLSQIPDPREQIDGWMGMALLLSWCAGPDGDFFV

SEQ ID NO: 175827 - protein, 90 aa, Oryza sativa
  Clone ID: PAT_MRT4530_73634C.1.pep
MDHAAEAQRTDLMTITRHVLNEQGRHPESRGDFTILLSHIVLGCKFVASAVNKAGLAKLIGLAGDTNVQGEEQKKLDVLSNEVFVKALVS

SEQ ID NO: 175828 - protein, 913 aa, Oryza sativa
  Clone ID: PAT_MRT4530_73635C.1.pep
LDLVATTTMFPETNTGKTQSRGAGEGPPCVRADVPCAKMASTVPALIADDLPTNVTSQITDAARPKTTSSVVCYSPMMITTNGIWQGVNPLEFSLPLFILQVAVIVVTTRLLVVLLKPFRQPRVIAEILAGVVLGPSVMGQVEVWATMVFPQRSLLTLETVAHLGLLYFLFLVGLEMDLDVIRRSGKKALFVAVAGMALPFCIGIATSFIFRHQVSRNVHQTSFLLFLGVALSVTAFPVLARILAEIKLLNTELGRIAMSAAIVNDMCAWILLALAIAISEVNSTALSSLWVLLAGVLFVLFCFYVVRPGMWWLIRRIPEGEVVSDMQVSLILTGVMLAGVCTDAIGIHSVFGAFVYGLVIPGGQLGVALIEKLEDFVTGLLLPLFFAISGLRTNISKIRDPITVGLLVLVFTMASFAKIMGTIIIAALYTMPFREGIALGFLMNTRGLVEMIVLNIGRDKEVLDDESFAVMVLVSVAMTTLVTPVVTGVYRPSRRLVGYKRRNLQRIRHDSELRMLICVHTTRNVPSVLSLLELSNPTKRSPIFIYALHLVELTGRASNMLAAAAASASKQNRSSSSSTLPPVTEHIFNAFENYERHTGGISIQTLAAVSPYQTMHDDVSVLAEDKHVSLIVVPFHKQQTVDGAMEPINPSIRGFNESLLSTSPCSVAILVDRGLSAAAARMAALHRVALFFFGGPDDREALAYAWRMVEHPGVALTVVRFVPPDYRVRSYSNTNYRSVASDADPRSIGIDTEGKTELQMDEEYLGDFRTRNIGNDAISYSDKVVANSEETVSAIRNMDDSLHELYIVGRRPGEAGSPMTASLEDWMECPELGPIGDMLVSSDFSMSVSVLVVQQYVVAAAAPAPATTAPAGNADPVRQYVSNANQRPSAAYRTSAASTANSRWSGGGTVGF

SEQ ID NO: 175829 - protein, 66 aa, Oryza sativa
  Clone ID: PAT_MRT4530_73636C.1.pep
IIQFYFKIVILYVFSSSIRDSDPCRRQWWVLWRRKCLVSKVNDKIENKLVFKMSSVKINKTPVRVC

SEQ ID NO: 175830 - protein, 434 aa, Oryza sativa
  Clone ID: PAT_MRT4530_73637C.1.pep
MAGAVAVIVAAGETQVPDDVVDEILVRLPSRSSLARAAAACSAFRALVSSPRFLRRHRARHGPCPGALLGSFAFSSEGGAFHPAEPPHASAAAARAVAAAADFSFAFLPPSPVVGDDDPRRGLGWIVRDHRDGRFLLDRVASLDDNVFPELAVCDPLSRRYVVLPPIPRELAAAVDRPLGVIGGRRRCEPFLAPCDADADADAESEPAFAVIWTARCPRKVVAFAFASRDGRWRALPSPECFVWSRHRSPFGCPVHAVWNRRFYAHGCFYWLDCLTHRWLVLDTRAMEITVKQIPSPACYWEEHVAVVEGEDGKVGVFAHDFYRAGGEACLYYYTIVDGGDGPRWRLERTVPLPWPAAHGRPYSIRAAANGSLILEVSHGTPAFMTSYRSRDVELYRIDVKSFELEMICRARCAAGDIAWAYFGFPPLLSLPTV

SEQ ID NO: 175831 - protein, 78 aa, Oryza sativa
  Clone ID: PAT_MRT4530_73638C.1.pep
MRALRPPPAPAPAVSPSPAPSPYAAMFEGGGISSPPAPNPATSPVPGPAPAPVPGSVAEREFAGGRRGAASSSLSPPL

SEQ ID NO: 175832 - protein, 72 aa, Oryza sativa
  Clone ID: PAT_MRT4530_73639C.1.pep
TYLLLFVHQLHFLQYYSFPHKHMLSAFRSSNIFLPVQLQNIFFFTFFFLTQEFYYRLQHSHSHNFNNSHNRI

SEQ ID NO: 175833 - protein, 176 aa, Oryza sativa
  Clone ID: PAT_MRT4530_7363C.1.pep
LQCVFFLGRITSDYIGGDALDDLLSKLIKSVEVAKASREGLPEKIWMKRQFAVGVNDVTRVLERMPAATAATHSGHSSTEAITDKALCRAPPVLLQVVLVAADCNPKWLTKHIPTLASTRQVPVLCLKDNKESSLRLGQVVNVRTALAIGVKARDSIINKAIDEVLKTANLVAKEP

SEQ ID NO: 175834 - protein, 799 aa, Oryza sativa
  unsure (1)..(799): unsure at all Xaa locations
  Clone ID: PAT_MRT4530_73640C.1.pep
LRRLFRRRGFRITKLWQTKIMQAADTDISALVEIXEKNSRHRFEFFMDLVGDQPVCARTAWAYMKSGGRISHALSVYSCQLRQPNQVKKIFEFLKDGFHEVSSSLDLSFDDDSVADEKIPFLAYLASFLKENKYNPCEPPAGCLNFRNLVAGFMKSYHHIPLTPDNVVVFPSRAVAIENALRLFSPALAIVDEHLTRHLPARGLTSLAIEGKAKDTVTVIEAPRQSDLLIELIRKLKPQVVVTGMAQFEAITSAAFENLLSVTKDVGSRLFIDISEHLELSSLPSSNGVLKYLAGKTLPSHAAILCGLVKNQVYSDLEVAFAISEDAAVYRALSQTIELLEGHTSQISQHYYGCLFHELLAFQIADRHPQQERLPAEVIPQKMIGFSSSAMSTLKEAEFFIPDSKESSVIHMDLDRSFLPVPSAVNASIFESFVRRNITESETDVRSSIQQLVKDSYGFPADGCSEILYGNTCLALFNKLALCCIQDQGTLLFPLGANGHYVSAAKFVNANTLTIPTKLESGFKIEPRVLADTLETVSRPWVYISGPTINPTGFLYSDSDIQELLSVCGKYGARVVIDTSFSGLEFQTDGWSRWNLERCLSAVNCPKPSFSVALLGELSFELTAAGHDFGFLILNDSSLVDTFHSFPSLSRPHSTLKYTFKKLLGLKNQKDEHFSNLIMEQKDTLKSRADHLIKTLEGCGWDVAGSHGGISMLAKPTAYIGKIIKVDGFDGKLDGCNIKEAILRSTGLCINSSSWTGIPDHCRFSFALESSEFERAMGCIVRFKELVLGSKAFHQINGN

SEQ ID NO: 175835 - protein, 348 aa, Oryza sativa
  Clone ID: PAT_MRT4530_73641C.1.pep
MGVAAANVAAFVLLAIAPVAAAPSSPPRSGGDSLSFSDVISISFFMAVFFPVFIVLLAFACLRLFRPLDDDDGEPALADTSSSEWSRRGGGGGNRAGLDAAEIAALPLVSYRDARRHRIGDARGDPLECAVCLLEFEDDDALRLLPACPHAFHPECIGLWLEKHVTCPLCRANVLDAPPPPPPPPPSLEQDTASPPPAHETVVVIGDAGASEEAEAEERIRIQCLAGVRRAAGRQALPRSNSTGHERGGGGMERFALRLPEHVRLEILMSHRLRHVTSAVASVRVREGSAHDAGAVRNAVARLLSLFVPGAGWKGDDEGKSSKAAEGSSRRRRDESARGGVGEEKRSE

SEQ ID NO: 175836 - protein, 70 aa, Oryza sativa
  unsure (1)..(70): unsure at all Xaa locations
  Clone ID: PAT_MRT4530_73642C.1.pep
QPSYDVSRQNRYLLSTXPTAYQXTPPQPPQYEVSPXNRYLSLPPPSPVKWNLPVYEYSLPPACRHHTWKP

SEQ ID NO: 175837 - protein, 297 aa, Oryza sativa
  unsure (1)..(297): unsure at all Xaa locations
  Clone ID: PAT_MRT4530_73643C.1.pep
SPARSMTADAGCGGGMDSAHGGXCRVSXTNVCRPKTCGGLGIPDLRLAGFALRVRWLWLQRSGHPCWDGLKSPVKQTVSDMFAASTFFVPGNGESMLFWSDQWIDGRSVASLAPDLLFVVPQRLPGSRTVASGLANNSYVSDIRGALTIPVISQFLLIWDAVLHVQLSPGVENRLIWRWTYDQRYSARSAYQAFFHGQHSFAXADLLWHVKGPAKCRFFLWFAFQQRCWTTDLLQKHGIDSHSACPFCTQDLETANHILLDYVFAQXVWLSGSRTGGRPSGPANLSISALASTSWCS

SEQ ID NO: 175838 - protein, 80 aa, Oryza sativa
  Clone ID: PAT_MRT4530_73644C.1.pep
MHKLGIETKIYELEVYMLTIYLLLHKNQVRHGVTARRTSRYYVVLRRELRKLEVVGKVKGGFDRDGGALTEVWGGFCPLE

SEQ ID NO: 175839 - protein, 111 aa, Oryza sativa
  unsure (1)..(111): unsure at all Xaa locations
  Clone ID: PAT_MRT4530_73645C.1.pep
IWRWTYDQRYSARSAYQAFFHGQHSFAXADLLWHVKGQRCWTTDLLQKHGIDSHSACPFCTQDLETANHILLDYVFAQXVWLCVLSPPGWDALSXPRGSWFXDWWPSFRAC

SEQ ID NO: 175840 - protein, 241 aa, Oryza sativa
  unsure (1)..(241): unsure at all Xaa locations
  Clone ID: PAT_MRT4530_73646C.1.pep
MVIGLPVWVIKAIDKKRRAFLWTGFALRVRWLWLQRSGHPCWDGLKSPVKQTVSDMFAASTFFVPGNGESMLFWSDQWIDGRSVASLAPDLLFVVPQRLPGSRTVASGLANNSYVSDIRGALTIPVISQFLLIWDAVLHVQLSPGVENRLIWRWTYDQRYSARSAYQAFFHGQHSFAXADLLXHVKGPAKCRFFLXFAFQQRCWTNDLFQKXGIDSHSACPFCTQDLETANHILLDYVFAQ

SEQ ID NO: 175841 - protein, 126 aa, Oryza sativa
  Clone ID: PAT_MRT4530_73647C.1.pep
MASALLCVCAKPPTAKRRQGYRLRGERTTARRDEEQTSAERARARHGDRRARRAMGLGRTPAIHQARCWGSLGDAGQARPVRPMPRKRPVPYRCQRNGAVCCVLGSERGPCHDAIRDSGALGKSLT

SEQ ID NO: 175842 - protein, 38 aa, Oryza sativa
  Clone ID: PAT_MRT4530_73648C.1.pep
INYKCWLGLANSIRFERGFSMFGKLIIKRNKMRKGCSS

SEQ ID NO: 175843 - protein, 117 aa, Oryza sativa
  Clone ID: PAT_MRT4530_73649C.1.pep
VDHVVHDRTAAVASGRTSAFNTAVAADRPEQLPQESAAAPRPSAKPSGPLPAWTPPRPCARSAATLADGAPVSPAGIRPCLADCASVAGYPPPYTAPPAAPHAARSAPPRQSPSKAR

SEQ ID NO: 175844 - protein, 189 aa, Oryza sativa
  Clone ID: PAT_MRT4530_7364C.1.pep
MSKKKNKSQLPIKAPLKDAEQGSVEVAKASREGLPEKIWMKRQFAVGVNDVTRVLERMPAATAATHSGHSSTEAITDKALCRAPPVLLQSRKGHESIAPFKERVLYSLPVVLVAADCNPKWLTKHIPTLASTRQVPVLCLKDNKESSLRLGQVVNVRTALAIGVKARDSIINKAIDEVLKTANLVAKEP

SEQ ID NO: 175845 - protein, 67 aa, Oryza sativa
  Clone ID: PAT_MRT4530_73650C.1.pep
MRSHPLSRICHSRCALFSACRMYLVLIAALLKLCIESAPSSGGRRNDDRVAHLGGDAAERVDNDEDG

SEQ ID NO: 175846 - protein, 291 aa, Oryza sativa
  unsure (1)..(291): unsure at all Xaa locations
  Clone ID: PAT_MRT4530_73651C.1.pep
MVVPVINFSKLDGTAAERAETMAQIDNGCEEWGFFQLPTPGGGVHGVEPVRTLEGLMAAERRGEAAAPVDDMDWEDIFYLHDDNQWPSKPPEFKETMREYRAALRGLAERVMEAMDENLGLDKGRMRRAFTGDGRHAPFFGTKVSHYPPCPRPDLITGLRAHTDAGGVILLFQDDRVGGLQVLRGGEWVDVQPLADAIVVNTGNQVEVLSNGRXRSAWHRVLPMRDGNRRSVASFYNPAFEATISPTVEGGAGAGGEYPEYVFGEYMDVYAKQKFDAKEPRFEAVKAPKSA

SEQ ID NO: 175847 - protein, 98 aa, Oryza sativa
  unsure (1)..(98): unsure at all Xaa locations
  Clone ID: PAT_MRT4530_73652C.1.pep
PRGLLLPHYTNGASLVYIMQGRGXXGNFPGCLSLPQQFXQSRQSHLTESKSQSQKFRDEHQKIHRFRQEDVIALPARVAHWCYNDXGEVPVVAIYVTD

SEQ ID NO: 175848 - protein, 309 aa, Oryza sativa
  unsure (1)..(309): unsure at all Xaa locations
  Clone ID: PAT_MRT4530_73653C.1.pep
MVVPVIDFSKLDGTAAERAETMAQIDNGCEEWGFFQLVNHGVPKELLDRVKKVCLESYRLREAAFMESEPVRTLEGLMAAERRGEAAAPVDDMDWEDIFYLHDDNQWPXSNPPEFKETMREYRAALRGLAERVMEAMDENLGLDKGRMRRAFTGDGRHAPFFGTKVSHYPPCPRPDLITGLRAHTDAGGVILLFQDDRVGGLQVLRGGEWVDVQPLADAIVVNTGDQVEVLSNGRYRSAWHRVLPMRDGNRRSVASFYNPAFEATISPAVGAGGEYPEYVFGEYMDVYAKQKFDAKEPRFEAVKAPKSA

SEQ ID NO: 175849 - protein, 78 aa, Oryza sativa
  Clone ID: PAT_MRT4530_73654C.1.pep
PLSPVEPLDAHMHILHGSSANHRSPQLSASARAFKAKCTISSTSRINPVCYSLASLRSSLFWIDLISNLSFLALLKRP

SEQ ID NO: 175850 - protein, 636 aa, Oryza sativa
  Clone ID: PAT_MRT4530_73655C.1.pep
MRLNLTSGLLPSLGVPAGLLGFFLARVWIRALDVVGVSHLPFTRQENTLIQIAVVSCSTIAFSGGFGTYILGMSGKSANEGHIGSHGRNVEEPNIGRVIAFLFLVNFSGLFIIVPLRKMMIIRHRLTFPSGTATAHLINSFHTPHGAKQARLQVVTLFKSLGATVLWPIFQWFFAGGKNCGFQIFPTFGMAAYRRGFYFDFSTTNVGIGMICPPMITASMLAGSIVSWGILWPYIETKAGRWFPENLDANDLGGIMGYRVFVGVSMILADGLFTILSALVRTACAMRKRRRGASTVTAAVPPFQCLSATERTMQSFDDRRRAQVFLRDSFPTWVAVASYAALAALSVVAVPLLYPQLGHRHVAAAYVAAPVFAFCNAYGVGVTDMNLSATYGKIAMMVFSSWVGMDGGGVVAGLAACGIIVSAVSGSSDFMQDFKTGYLTLTSPRAMLVGQVAGTALGCVVNPAIFWVFYKVYNMGGGGGDGADVAPYARAYRGIAVLSVGRHGLPDHSVLLCKLFFAMALALSAAREVAERRRWRALRYIPSTIGVAVAFFVPPRIPVGMAVGCLALHVWRRHVDAGGARLLLPAVASGLICGDGLGSLASSMLTLLRARPPICIKFVSRFENQKLDAFLATRHA

SEQ ID NO: 175851 - protein, 69 aa, Oryza sativa
  Clone ID: PAT_MRT4530_73656C.1.pep
LISSYLHDKRTYAEHLSRDTSTSRCPLVIRVLASYSACTHTAKKYAQLSVIRHSRALPIHPGLSCRGSS

SEQ ID NO: 175852 - protein, 51 aa, Oryza sativa
  Clone ID: PAT_MRT4530_73657C.1.pep
VNFIFILKKKNVPLIYPARMVLSPPSHPLFCSMHVIIHSIRPLLFQSLFYN

SEQ ID NO: 175853 - protein, 88 aa, Oryza sativa
  Clone ID: PAT_MRT4530_73658C.1.pep
AQGKFLSRGAQKKAPLPMLKKPGYLCPARETRVSQKQPKALFFTAKGHQTNNLTPLSNLGFPLTTLPPNLLKPPFPSWPRRRPGPPRG

SEQ ID NO: 175854 - protein, 72 aa, Oryza sativa
  Clone ID: PAT_MRT4530_73659C.1.pep
KDSSVTQNQSRRRRPGHRLRCTSCTYGMRTCMPHAAAFLVSLPLPFLLPVHCPPPPPCSPPRRAPNPKMPHY

SEQ ID NO: 175855 - protein, 54 aa, Oryza sativa
  Clone ID: PAT_MRT4530_7365C.1.pep
STLARLDTAHLGMWTRLGRSELHAHRDCGVSSGETFAPSAPLLLLCGFALLIGS

SEQ ID NO: 175856 - protein, 58 aa, Oryza sativa
  unsure (1)..(58): unsure at all Xaa locations
  Clone ID: PAT_MRT4530_73660C.1.pep
GKHQTPSPPTLTLVETTNFLQKYNSRLXRSASGATEAREVVIFSLPADFRRVVLCLRV

SEQ ID NO: 175857 - protein, 70 aa, Oryza sativa
  Clone ID: PAT_MRT4530_73661C.1.pep
MATCRRVGGNDVYTLLSFRFGFRARCSGGNEESQRRATRERARFEAEVEYENGRTVLKGGFADVAPTWQY

SEQ ID NO: 175858 - protein, 490 aa, Oryza sativa
  unsure (1)..(490): unsure at all Xaa locations
  Clone ID: PAT_MRT4530_73662C.1.pep
MVIFGGAERPPDLAALATHRGEDYSHTRGSDPLPSSSAVAALPHCSPATAPEGRLPVGEGHLPSLVAPSSPTPAETLPLSVIDRVAGLRHLVRSLHVFEAGGRNGGGEPARVVIREALGKALVEYHPFAGRFVEGDGGGEVAVACTGEGAWFVEATAACSLEEVKLLDHPMVIPKEELLPEPAPDVQPLDIXLMMQVTEFTCGGFVVGLISVHTIADGLGAGQFINAVADYARGLAKPRVSPVWARDAIPDPPRMPAPPPRLELLDLRYFTVDLSPDHIAKVKSAFFESTGHRCSAFDVCVAKTWQARTRALVAAAAAAGDDDQERRTVRVCFFANTRHLMLKGDGAAAAATGFYGNCFYPVAAAASGGEVAGADIVDVVRIVRDAKARLAADAWXRWAVGGFEEDPYELTFTYDSLFVSDWTRLGFLDADYGWGTPSHVVPFSYHPFMAVAVIGAPPAPKLGARVMTMCVEEAHLPEFRDQMNAFAAAN

SEQ ID NO: 175859 - protein, 125 aa, Oryza sativa
  unsure (1)..(125): unsure at all Xaa locations
  Clone ID: PAT_MRT4530_73663C.1.pep
RRPITDRKTYPRNGPFWGXVAGAVVQLDGASLFGAVPLPTWRGDAKELTRTNHIKNKPKRMKYVACGIFQSSTEKLLSSKTQSCKRNLEVLILLNFLCRCTWIYYLPDFESRNRNGGEGWGGGGR

SEQ ID NO: 175860 - protein, 68 aa, Oryza sativa
  Clone ID: PAT_MRT4530_73664C.1.pep
MSRQTLPLYSSTARPLSLLFIVIEILKIEHNYRLGSFLLSRSPAKPSPGNRLTRLLHGLPDVPPFNRH

SEQ ID NO: 175861 - protein, 148 aa, Oryza sativa
  Clone ID: PAT_MRT4530_73665C.1.pep
MVSQTWRRELAGRLQGRRGGSEEHVLEDANRARYCGNGGGGDYFNGRRWQRPCPPSSGDNILLPRKWRWMWRYSLSPLQAPSLTHQAVAAAPLLARSGGCGGGGGGRHGGGGSDGIEASAQMAWRRPAGPVTSSNFKLKFDYIMLAFD

SEQ ID NO: 175862 - protein, 74 aa, Oryza sativa
  Clone ID: PAT_MRT4530_73666C.1.pep
QPGDQNHGGRATDGAGDEEEAAAEIGSTAATVLRRSSATAKGRTRTAATWRPRWRPPRATATTGTAAKDGAFSV

SEQ ID NO: 175863 - protein, 151 aa, Oryza sativa
  unsure (1)..(151): unsure at all Xaa locations
  Clone ID: PAT_MRT4530_73667C.1.pep
IPPVAPSQGRRGWRFKPRRPLPSPALPSLAAARTAAGKAGRRQGRQRRGFPSPSLVVKAAGAPMRPDDGSEATATMSSSSAAEHGSGPPLAGSGAPTGGSRVGRWDPPPSRPAATTPRPAKERXGLARPRRCGDGSRDGVRCHHRDGQQRR

SEQ ID NO: 175864 - protein, 131 aa, Oryza sativa
  Clone ID: PAT_MRT4530_73668C.1.pep
ILPVQSPSSRREAEGGGRPEAQRGESRAPSLPSPLRRSPCRLPKPPSPALPLTVKRVGRELHSPPTASPAAASLPAPSFARRREPPRLRTSPPPDPPRASLPAASPDFCWPAHRREPPCHPRAFAPPDRHA

SEQ ID NO: 175865 - protein, 485 aa, Oryza sativa
  Clone ID: PAT_MRT4530_73669C.1.pep
MMVSSQTSSLTRTIAQDPELFTAKIILPMGPPDVISENDEFDFSDVFGTTPVQTPTGISVAGPDSPAPLAESNEGVYNDPIVIIKRSHSLVGPTSLVSQSLRLSNLTLNKTEGSSEPAEEKERNLGQLSDEEFDNATTENEGIGLDDFEILKLVGQGAFGKVFQVRKKGTSEIYAMKVMRKDKILEKNHAEYMKAERDILTKVDHPFVVQLRYSFQTKYRLYLVLDFINGGHLFFQLYKQGLFREELARIYTAEIVSAVAHLHDNGIMHRDLKPENILLDADGHAMLTDFGLAKEFNENTRSNSMCGTVEYMAPEIILGRGHDKAADWWSVGILLFEMLTGKPPFVGNRDKVQQKIVKEKLKLPSFLSSEAHSLLKGLLHKEGGKRLGSGPGGSDEIKRHKWLKPINWRKLEARQIQPSFRPNVSGLTCIANFDECWTSMPVLDSPVATPVAGGAGHSSFAGFTYVRPAPFLQDVKPPSSSRLKD

SEQ ID NO: 175866 - protein, 146 aa, Oryza sativa
  unsure (1)..(146): unsure at all Xaa locations
  Clone ID: PAT_MRT4530_7366C.1.pep
TTGXXHXXGXXHGXXHXXGHGGMRVXSHXXXYXSEGGEIXRGRRNNSMHSXXXLMRQQSGHGGYSYXGGXQQEXYKRDEREHXHRERVXXIGALASXXFALYXGHQAKXDRPTAXAXDQXGXAXVAXLAPAXPYHXHREQXXAPRQ

SEQ ID NO: 175867 - protein, 88 aa, Oryza sativa
  Clone ID: PAT_MRT4530_73670C.1.pep
QRTQTPRSKKKKHVKPAPVLEKGKGNPMEPYEGKLTNEHEPAPNGLPMKGLPYTNYGAEGENHRPVGFNFLGDDQQKGHNFDLADQYW

SEQ ID NO: 175868 - protein, 69 aa, Oryza sativa
  Clone ID: PAT_MRT4530_73671C.1.pep
RRPRHALLCARAVQQVVTLARARVGVRAPCYVSRDVYAYLCMYDALCTSSTHLTGRIDEYAFNPDRSSM

SEQ ID NO: 175869 - protein, 339 aa, Oryza sativa
  Clone ID: PAT_MRT4530_73672C.1.pep
MGNASGREEDPAAAAGEGDVEDSSVRSSERGFPPYGGGGNHVRRACSVGVVGGGGGAGSPPGSPGRSLSPRMFVPQQKNHLQFTIMLANFDWLFLCGTSFEISSLPRQLNCAAQKGGFTVTPVPPLQRAADVTPVFNRILMNEQEEEFDGPPQKEIPVLIVWTLGGKNVSVEGSWDNWKSRKPMQKSGKDHSLLLILPSGVYRYRFVVDGERKCLPDLPCETDIMGNAVNLLDVHDFVPESVESVAEFEPPPSPDSSYSIQAPEEKDFSKEPPVLPSQLHLGVLNSQNSDESCARPQHIVLNHLFIEKGWGAHPLVALGLTHRFESKYVTVVLYKPIER

SEQ ID NO: 175870 - protein, 72 aa, Oryza sativa
  Clone ID: PAT_MRT4530_73673C.1.pep
MVEDPSKAGSPVPIAAVRSGAIDSRRAPCHQPYSPTLSTLRATNLPTIDGNERTPAQCEAVPGDDGDEEEDA

SEQ ID NO: 175871 - protein, 61 aa, Oryza sativa
  Clone ID: PAT_MRT4530_73674C.1.pep
MIGGPSRARDDEVGTSKKRKRAVAKGGQVRTRRGAKGAVESDGEEEEEEDGEAGSEDDGFH

SEQ ID NO: 175872 - protein, 65 aa, Oryza sativa
  Clone ID: PAT_MRT4530_73675C.1.pep
HQGNAMVPHMSGTSLDAQKRYADGTKAILESYLSGKLDYRPQDLIVHAGGYATKAYGERAKITKA

SEQ ID NO: 175873 - protein, 490 aa, Oryza sativa
  Clone ID: PAT_MRT4530_73676C.1.pep
MSPPTNGAISLAFPPMGPLPADALIYPFDGLSYDDFVLPVAAAPQHPLPVAVADPAPLLLLPPPSSCTCNGASSGMGAVAPRTLALGATTDGSVMTPTSWGSDGGGGGSSSARAVRSPSPVLPLVQGTGQRTSCYRGVTRHRWTGRYEAHLWDNTCRREGQKRKGRQVTTPVELFLLSVLVDWHLATNFCTLLDTLAELHSAVVPFFFLRKDYQWFHDSDTMTCCFFAFSGYDIEDKAARAYDLAALKYWGANATTNFPKESYVKEIEEMQKMSKQELVASLRRKSSGFSRGASIYRGVTRHHQHGRWQARIGRVAGNKDLYLGTFATEEEAAEAYDVAALKFRGANAVTNFEPSRYNLEAISQSDLPISVSGRRHNSSSNSNNPAPEAGGQITLMSSPPISQQSSSAPPYLIHNLLQFQPCGPPYAPPPPPPPPPPPPQALPLPGSYNFAEPVGFYWPYGDGEEQKVQLNSNMVGMASGGFLHLANAAN

SEQ ID NO: 175874 - protein, 134 aa, Oryza sativa
  Clone ID: PAT_MRT4530_73677C.1.pep
KKKGLGAPLLKQKQRGLGGGNPPPGKGGGKFLGGKQFSRGGGPGNQNFPYQAEAKGALNKGKNPLRVPPPPLGEQETKNPLTPKQKVLWGTGATLKNFWGPQKAGNRPNIFGGREKPEPGDFPLRFRWSWVGGG

SEQ ID NO: 175875 - protein, 102 aa, Oryza sativa
  unsure (1)..(102): unsure at all Xaa locations
  Clone ID: PAT_MRT4530_73678C.1.pep
LRMAEDADVEEVAHGVEWLLLTEEXWEARWCRHNSKERARGGDARRVNSEKGAGRSGGHDKDDDDASSMSSSASKHHRGRCFDCGVRGHLAKELWSAAQAPH

SEQ ID NO: 175876 - protein, 80 aa, Oryza sativa
  Clone ID: PAT_MRT4530_73679C.1.pep
MVKIAKHLCRHGLGIILTVIDPPDNDATSVFGQRNARQPLEVLCSPPTIDALLIDMFCMDTLDIGTKPTIPTYLFFASVA

SEQ ID NO: 175877 - protein, 51 aa, Oryza sativa
  Clone ID: PAT_MRT4530_7367C.1.pep
MDETIPAAETSDESVLTEETSEESVLVEELVLVEETLEILEAFFHQFNFDL

SEQ ID NO: 175878 - protein, 267 aa, Oryza sativa
  Clone ID: PAT_MRT4530_73680C.1.pep
MMNEIFETSDFCNALQRREQDIVNAMDLLEFTKAELDVLREDCGWKEFLGKVTSFCVKHKVKVVDMDGKQLRCMASFSPAKSFSAFNVDNLVKLAKFYPSDFDVEEMNQLPFQLNRYISDVVGSSSAQGDKGTAGEPGDKGSGFQEVMVEDLGPDGSGLQPQFYNFQDRIDYVVQHALINQSGVLVNTLTNMVKTVVDGTIAEHEVTGPVYLPEKPMKVDVNPFPVNMERYFEEDDGGFDPHWDCEFFRFCWNEGMRLPSIEDCPGC

SEQ ID NO: 175879 - protein, 236 aa, Oryza sativa
  unsure (1)..(236): unsure at all Xaa locations
  Clone ID: PAT_MRT4530_73681C.1.pep
MAPAAAMASATEAEAEERDKPIVVRVKRKPSQTRPDAFWLEINERPVKKAMLDFSSLSVSEPSSAPNKASEEPRIKKLLVQHIETVHHSEAVQDVLHSLLHSDLDAKEIKSKTKEWNNRTNQDKKQDQLRSAARQRHEDLGRNARFAQIWRSRKGDRNEVDESLREICHLYDAVXITSFERSXPAEPRITSFEEGAILCNFLPLIREHLPSAAEEIESDIISLAQSEDSEVYDIYT

SEQ ID NO: 175880 - protein, 546 aa, Oryza sativa
  Clone ID: PAT_MRT4530_73682C.1.pep
MPARQLSPALQAYTRAVAVLAQPPACARLAVAGLVAQPPVHARLAVAGRGVAPPPENESASGESSPSTVPPDVETDDIGGGPNDESSSDEDNNGGAYDIKHDPGLRIPISQYDVNDQDSVRREYIALGPCQPKMKKEDFPQHECGEELHDECFAILADEPSDAYQQEQLALCLRFVNKTGQLVEWFLGLVHVEDTTSLTLKEAIKSLLIKCHLPLSKHKVKVVDKDGNYKPIQRSKKFFKNAINYHRFHADMFLGVIDRQLQELNNKFDEVNPELLRCMSSFSPAKSFSDFNVDNLVKLAKFYPNDFDVEEMNQLTFQLNRYISDVSKDENFTNLMSLADLSMMLVKTNKVSRYDLVYKLLKFVLVLPVATASVERVFSSMNYIKNKLRSKMGQEYLNDCLVIFIERYFFLQVKNEDIINHFQNIKKRKVLLYIRWRRYSDDDDSYPSRLPINLDDRARHGDSGDGRPSFFSSALKQEESARGWGVVVEERGASAVGEVASVVVPGWFGHDTSAVDDDGNELGTTVSGDSKLAHLCDFFLSFAPFF

SEQ ID NO: 175881 - protein, 573 aa, Oryza sativa
  unsure (1)..(573): unsure at all Xaa locations
  Clone ID: PAT_MRT4530_73683C.1.pep
RSWGRCSLFNGGFRNWNIKSRFSKXHAGAVNSAHCEAEERYNLFMQPKTSIRESFASNSAEFKDQYLARLTWSLKCIRYLLRQELAFRGHVESKDSNNKGKFRELVQWLAGNFEEVNKVVLGNAPTGCQMIDHKIQKQLIGSCAHKTTKLVIEELHDECFAILADGSSDAYQQEQLALCLRFVNTTGQPVEQPVERFLGLVHVEYTTSLTLKEAIKSLLIKYQLPLSKVHGQGYDGASNMKGHINGLKKLIVDESPSAYYVHCFAHQLQLTLVAVAKENIDCAWFFGQLAYLLNVLGMSCKKICMLRIAQAEYMIEALKLGEIESGQGLNQEMGLARPGDTRWGSHYKTIMHVMLLYPSIKKVLFKVGKECNGAEAIGAQTMLQVFQSFEFVFLLHMMNEIFGYTSDFCNALLRREQDIVNAMDLLEFTKAELDVLREDCGCKEFLGKVTSFCVKHKVKVVDMDGKYKPIQRSRKFFKDAVNYHRFHADMFLGVIDRQLQELNNRFDEVNTELLRCMASFSPAKSFSAFNVDNLVKLAKFYPSDFDVEEMNQLPFQLNRYILVMWVRMRISQI

SEQ ID NO: 175882 - protein, 52 aa, Oryza sativa
  unsure (1)..(52): unsure at all Xaa locations
  Clone ID: PAT_MRT4530_73684C.1.pep
NWLMAHVGWRGSLMAHVYYTLKGRFSSLACPLXMLTFGSHCCMCFRSFAPAD

SEQ ID NO: 175883 - protein, 139 aa, Oryza sativa
  Clone ID: PAT_MRT4530_73685C.1.pep
PARRRPAPGGRRRRHSISPCPSHLVVQRWRRYSDDDDSYPSRLPINLDDRARHGDSGDGRPSFFSSALKQEESARGWGVVVEERGASAVGEVASVVVPGWFGHDTSAVDDDGNELGTTVSGDSKLAHLCDFFLSFAPFF

SEQ ID NO: 175884 - protein, 79 aa, Oryza sativa
  unsure (1)..(79): unsure at all Xaa locations
  Clone ID: PAT_MRT4530_73686C.1.pep
PRPAQHIEKVMRALGDYLSAKVHACVGGTGDSEDQRILASIAHVFLGTPVRVSDMLRAQSLHTDYIXMLGLDEPEEMVS

SEQ ID NO: 175885 - protein, 95 aa, Oryza sativa
  Clone ID: PAT_MRT4530_73687C.1.pep
MQDRRFGGRRRGGGGSSEVGEGEGVGGKSTGGESEDNGDAPLPSSMGADPLVYAIEAIVWLAAVGHHAPLPTFHHRTHRCRRWLQIHELPVGRRW

SEQ ID NO: 175886 - protein, 373 aa, Oryza sativa
  unsure (1)..(373): unsure at all Xaa locations
  Clone ID: PAT_MRT4530_73688C.1.pep
MNDIFIFNVVISSLGLLEIPLKGRRFTWSNMQQDPLLERLYWVFTSASWTLSFANTTVLPLTRNISDHVPCXSRLTKILKSPIFRFENFWVEAEGFFDIVQQVXMLDPGFDAPAKCNSFKLKILRKKLILWSKNLSRLMLLLTNCNKVVDFLDLLEEERCLSLLEXNFGEAVKHHILKLLXRKLVFRKIYWKKRCTXYKWMMLGEENTKFFQSIATKRYKINTVSQVMDQNGQIVYLHDQKASLFYQSFENSMGISCSPRMVFDLNDLFLPRADLEYLTDMFSTQEIDSLITLIPADKXPGPDGFNGFFMTKCWHIIAHFHAEATDLQVLNNSYITLVPKKXSPETVNDFRPISLMGFSLKFLTKLMADRLQG

SEQ ID NO: 175887 - protein, 189 aa, Oryza sativa
  unsure (1)..(189): unsure at all Xaa locations
  Clone ID: PAT_MRT4530_73689C.1.pep
MAIAGLLLRPPPCVATCTPPSPSLSSQRWRRRRLTLAQPYCALGLSFVSGRHLRRRRQSKRTSRGTGVYASLFGVGAPEALVIGVVALLVFGLKGLAECLDPWVVAGSDDKPEAAPYTSEELMKVIEEQLAASAAAAWNTQEPPPSQQKGXAAATSESNDGAISRGSDGAGAAMSEPNRNISEKTETER

SEQ ID NO: 175888 - protein, 125 aa, Oryza sativa
  unsure (1)..(125): unsure at all Xaa locations
  Clone ID: PAT_MRT4530_7368C.1.pep
EGLCAAPPPTPPXTPPTMPTPLPSAGSRRGGQEGEGAREKGRGRAHGASSADGVHAPPHSPPSPXPPPTPLPSAGSRSGGKEGEGAGGRGRGRASGTSSADGARAPPPPPPAPPPFGGGRRRSHF

SEQ ID NO: 175889 - protein, 1194 aa, Oryza sativa
  Clone ID: PAT_MRT4530_73690C.1.pep
MNQHTSCTEHEAAQSIHFFLSKCKLPPARAYAKVDDDIPVMVSITVPSGISSVQRKPVDLVVVLHVRSDWKVPKNCMKLLVEAVSIVAETLGDDDRLAILPVQPSLALVSAAESREAASAVSTMILFGRGQDDKENRAGHIIVISNTSDDGVAPVESLLQPWRFPSVHAFSFHNSRNTRTMHSIVASSCDCTYAILDDEHGNTTDAFRTTIRRITSSMPIEVKLICEEKNVVLSSIQAPLVSYFISSDKKAITIWANAHPNPAANSVATTNYIVNIRNKGQATLFLDQVPNLLKVENVQNNNQLQSSLAENVVVAIHEDTMAEMVRLEAIKVVDRISANDNQDWEQRHAAADELRGWWTMTRSNKLYAKVDWKAIAISRLAAEMQEMEIRLYNDYLWKEYMLSWLSHQRWQLPLPPLFIDRQATDDVPVQLEINAKRLGGTNLADQNRQKHGVAVLACVKVPETGLAKQKTPFVDLVVILDVGCQAIEMEGKARERLQILSEATGVILDKLKHKDRLAIIPVQSSLTKHGASLLEMSDQGREQTFTKIQSFINLVARKSTKHATQTWREKLKNTVKFARNCIHISSVNSSLPTPTFPASQHANSTTARSAPAAADGISCKLSKVLLTNAIQPVQKSISDYLTCSNHENLQHAIFLRKAGMLDNRPQEEKDRMGAIIVISDNHDNSICMEALSTNYNIHTFGFNGMHNVRAMYNIASRSNGMYDLLNDDRNLITEAFISCMNKITSIIVLGTEVDMICSSSRSPGVALSTIECGQFESFMIDNARKSTIMVGALHATSVKNFLFYMDNVREDDHDNIFKLFTVHVRCLPTPNTVDEKLNNQVEVIWNGIDGENNDDVVASIARVAAVEIITRITDPNYDQKLVGRLSREMETMQDISLRVMEKINGNLQSQMSTLNILDTPLCTLMEESLTKELEEMEANLLREIFDPNYYIKLVDRLVRVLSPEGSGGSTRYAGMRHKLTLVIENMEANLSGLINGSTNNKQLVEQHVSNMCKSCSNHARAHGQVRLAMEMEKMNIRLGKEMVTMICRQIIVPVYYKNLMARSAMLTCLTDSESQRANGNALYALTIEKMEITLVMEMDKVEANPERMDKIVSNYNEKMVVLLVREMFLEVSKYAQVAGEARLSREMEDMEDSLVYKATTDTDYPDYYKKLVSNKLSYMLSWLSFQGSCEQPPH

SEQ ID NO: 175890 - protein, 106 aa, Oryza sativa
  Clone ID: PAT_MRT4530_73691C.1.pep
MTGPRGRSDRGALEKSGKIESSTRVFTSTKNIKNHCLALEKQPQPTWIPTGLSRSQKRRIQRLRAIDQKENKAEDVENKTCNNLEPQTAPKQMWRPKEVKVKRPVI

SEQ ID NO: 175891 - protein, 129 aa, Oryza sativa
  unsure (1)..(129): unsure at all Xaa locations
  Clone ID: PAT_MRT4530_73692C.1.pep
DAYSASQNSWRRAIGKCQSRSAKNFLXERSFLSSVHVTEELAIAEVGFSHPDHISRAEKMQSLIESTLQNVLGCNVEVKFKLVPRPVRKDARSKRQSFSLLSCSGRKQELSDSAVTDEDETVRHGARET

SEQ ID NO: 175892 - protein, 134 aa, Oryza sativa
  unsure (1)..(134): unsure at all Xaa locations
  Clone ID: PAT_MRT4530_73693C.1.pep
KPLSSPERHHRTFTSSQSRRVPRAHTILEHPSTVPCQRRQEXAWCLPPRPPPMRSGPLGAHCRLRAXPSGVPPSRRSRSRSTVVTARARRLRFAPRRAAAADYSAQWAAELHRAIAANVGHARLLGLWAVELTR

SEQ ID NO: 175893 - protein, 656 aa, Oryza sativa
  Clone ID: PAT_MRT4530_73694C.1.pep
MVVNNKVDSLSYDVEAPPAQAPTTPAVVSAPPTPRGEAPAMTTTAAAELHKVSVPERRSTAKALRQRLAEVFFPDDPLHQFKNQSSARRLVLALQYFFPIFHWGSDYSLRLLRSDGISYAKLANLPPIIGLYSSFVPPLIYSLLGSSRDLAVGPVSIASLVMGSMLRQAVSPDQEPILYLQLAFTSTFFAGVFQASLGFLRLGFIVDFLSKATLTGFMGGAAIIVSLQQLKGLLGIIHFTSQMGFVQVMHSVFKHHDEWAWQTILMGVAFLAVLLTTRHISARNPKLFWVSAAAPLTSVIISTIISFVSKAHGISVIGDLPKGLNPPSANMLTFSGSYVGLALNTGIMTGILSLTEGIAVGRTFASINNYQVDGNKEMMAIGVMNMAGSCASCYVTTGSFSRSAVNYSAGCKTAVSNIVMASAVLVTLLFLMPLFHYTPNVILSAIIITAVIGLIDVRGAARLWKVDKLDFLACMAAFLGVLLVSVQMGLAIAVGISLFKILLQVTRPNMVVKGVVPGTASYRSMAQYREAMRVPSFLVVGVESAIYFANSMYLGERIMRFLREEDERAAKCNQCPVRCIILDMSAVAAIDTSGLDALAELKKVLEKRNIELVLANPVGSVTERLYNSVVGKTFGSDRVFFSVAEAVAAAPHKTQP

SEQ ID NO: 175894 - protein, 99 aa, Oryza sativa
  unsure (1)..(99): unsure at all Xaa locations
  Clone ID: PAT_MRT4530_73695C.1.pep
LPSHPHSHLKXVYITGFYGQKDQLELALYILRNSVRLKSMKINPKPIIAEYLGEVRESEGFFFLXGYQVAFKFLXQEDRYNVVDVKEVGLSVIESAPDL

SEQ ID NO: 175895 - protein, 43 aa, Oryza sativa
  Clone ID: PAT_MRT4530_73696C.1.pep
PPGGQPSRGVAQKHLHADLATFSRCHSFLFVFWFDNFSKMNIP

SEQ ID NO: 175896 - protein, 52 aa, Oryza sativa
  Clone ID: PAT_MRT4530_73697C.1.pep
PSFTACLVKCQLSSASVFSSLRRRCRLRMRRSVPDQICKKPPLCSNYFTYDH

SEQ ID NO: 175897 - protein, 314 aa, Oryza sativa
  Clone ID: PAT_MRT4530_73698C.1.pep
MSGGEDVRKVSRQDIQLVQNLIERCLQLYMNQKEVVETLSFQAKIEPSFTELVWQKLEEENREFFKAYYVRLMLKNQIMVFNKLLEDQYRLMCKEQPSGVPSMPPTTNGSNMGTYTTPSTAMPDSLLPNGSSSGIVNGTPSSDQFIYAGKVIHGLPSSMDASSSLLAAHNSTAGRFNGDNGTTIKTEASYSGNSDFGFCNESAFLEPCQSIGDASGGSFSSSELNGQPLGDPIMDMDSSSFGFLSQIPRNFSFSDLTEDFSQSAEILENYGRSPFIPSEPNNFSESTPGDHAEIGNRRLDTISEGVSYEDFGSD

SEQ ID NO: 175898 - protein, 115 aa, Oryza sativa
  Clone ID: PAT_MRT4530_73699C.1.pep
ERRQACPGEEDVRKVSRQDIQLVQNLIERCLQLYMNQKEVVETLSFQAKIEPSFTELVWQKLEEENREFFKAYYVRLMVKNQIMGFDKIFAVQYWLLCNQVAPGVPSLFRHESLQ

SEQ ID NO: 175899 - protein, 158 aa, Oryza sativa
  Clone ID: PAT_MRT4530_7369C.1.pep
MDSVGFTATVRSGLRAAKERRGMDQRSPKDASYARNCAEANPRARNGRRWPAAGLEEEREDLLFGGSSARFPWQAFSWNIGDAHGAAARSEMHRIIGNGEATDGGALDTEDADELDARCYLDGRWGMGKNVDSMVCLTRWFAEDWMINGSKLMYPRCM

SEQ ID NO: 175900 - protein, 84 aa, Oryza sativa
  unsure (1)..(84): unsure at all Xaa locations
  Clone ID: PAT_MRT4530_736C.1.pep
FFFFFFFFFFXXXRSTSIRTGKXXTSNPGFVXHHHGSRWDNRXXGXHLIIHXKTVRKQXXNQXXSTXAAYLCSGYSQEADAAPS

SEQ ID NO: 175901 - protein, 63 aa, Oryza sativa
  unsure (1)..(63): unsure at all Xaa locations
  Clone ID: PAT_MRT4530_73700C.1.pep
LLQVQVRRITCIPENALVDDEALVLPPLMLTFSVPPPPVPXFPPFPVVPSFPPVPVSPVLVED

SEQ ID NO: 175902 - protein, 575 aa, Oryza sativa
  Clone ID: PAT_MRT4530_73701C.1.pep
MGGGGGEAGGGDGGESSPAAAAAAAVAGAAALHIRCANGSKFTVRADLDATVGAFKEVVAGSCDVPAAQQRLIYKGRILKDEQTLESYGVETDHTIHMVRGAGPPAGSAAPAAASPQASAAPSSGPTDGLGSLFPGLGGTGTAGTRPSGLFGSGFPELDQMQQQLSQNPNLMREIMNMPMMQNLMNNPDLIRNMIMNNPQMRDIIDRNPDLAHVLNDPSVLRQTLEAARNPEIMREMMRNTDRAMSNIESSPEGFNMLRRMYETVQEPFLNATTMGGEGNTAPNPFSALLGNQGSNQPRDPATNAPNTGSESTTGTPAPNTNPLPNPWSSNAGGAQGATRAGSTGNARTGATGGLGGLGSADLSSLFGGLAGNTGTGATGGLGGLGSADLGSLLGGSPDSSSLSQILQNPVMMQMMQNIMSDPQSMNQLLNFNPNTRNLMESNTQLREMFQNPEFIRQLTSPETMQQLLSFQQTLLSQLGQNQPRQDGSQGGNATGMRGNVSLDTLMGMLSGLGAGGGIGVPNTSNVPPEELYATQLTQLREMGFIDTAENIQALVATAGNVNAAVERLLGNLGQ

SEQ ID NO: 175903 - protein, 1570 aa, Oryza sativa
  Clone ID: PAT_MRT4530_73702C.1.pep
MEGHPDPTSAATAMIPEASIRRINLSITSNEEILKAQPVNELEKPIPITHQSQLLNNPYLGLPLQVGSCQSCGSNAIEECEGHFRFIELPMPIFHPSHVTELSQILNLICLRCLKIKNRKKSTLKGSKFTSCSHCQELPPLCVAEVKKSNGARGLELRAPIKKELEEGFWSFLDQFGSCTRGTSHCRPLLPEEVQNIIKKIPEETRRWLSVRGYIPQDGFILSYLCVPPNCLRVSNVLDGNTFSCSGTSTNLLRKALRKIQQIRGSRIGSSNIQVDQVADDLQVDVANYINLGGTTKGHGDDTFTSQPTAMQWKQKMKTLFISKSSSFSSRGVITGDPYIGLNVVGVPEEVAKRMSVEEKVTDHNIAQLQDMMNKGLCLTYTDANSITYSLDAGKDNPNKKHTILKVGEIVNRRVFDGDIVFLNRPPSTDKHSVEAFYVQVHNDHTIKINPLICDPLGADFDGDCVQIFYPRSLSARAEAKELYTVDKQLVSSHNGKLNFQFKNDFSLALKIMCGREYSEREANQITNAMFSSGMYPQKPLIGGPYWTFPQILETTKSNAITLADHLDRESVGALATGTTISSILSTKGPREATEFLNLLQPLLMESLLIDCFSINLGDFTVPSPILEAIQNNPLELNKYREPIMDFITHSSAIGLLVDPKSDSNMNKVVEQLGFLGPQLQHNGRLYSSRLVEDCLSKSLHRCCGSTNCCNPLEEYGTVRSSIYHGLNPYEALLHSICEREKIMRASKGLVEPGSLFKNMMSRLRDVTACYDGSIRTSSGNLVLQFGSRDASNCVTPGDPVGILAATAVANAAYKAVLAPNQNNIISWDSMKEVLLTRASTKADANHRKVILYLNQCSCENECMERALTIRACLRRIKLEDCTTEISIKYQQQATQAAHHLVGHIHLDKKQLNQIETIMDSVLHKCQETFRNNIKKKGSMREILKTVTFISSTSLCDQHTDDDKKFQVSCLQFFLPGSITKNISESTERVIDFMTNAIFPIILDTVIKGDPRVEEANLVRIEPESTFWVQSSGAEQKGEAALEITVEEAAAAESGNAWGVAMNACIPVMDLIDTTRSMPYDIQQVRQVFGISSAFEKVTQVQLFPFLLLAEIQYLSKSVGMITKSVLQEHLTTVASSMTCTGDLHGFNNSGYKATCQSLKVQAPFMEATLSRSIQCFEKAAAKAYSDQLGNVVSACSWGNNAEIGTGSAFEILWNDENMSSSKSILGGYGLYDFLEAVETTGATKDKAIVPHNYCLYDVDCIPEDKVCLEENNQITWTDKPKAEFLMESEGRRAGMHSTGQKHPRKPNWHEGNTKSSPNSTAVEFTGQVFQRRQLKTKSNWNSDATQQDDKPSWYSSNSAGTQNFTIAGSSRPGEWNRKNNNRGQGGGREVWKSEGPHRGGSSSNRNQGGGRAVWKSEASHRGSGNNRNRGGGRAVWKSEASRRGGSMRQVASCAFTPVEQQIFEQIEPITKNVKRIIRESRDGIKLPPDDEKFIVTNVLMYHPERKKKIAGNGNYITVDRHQVFHGSRCLYVMSSDGSRKDFSYKKCLENYIRAQYPDAADSFCRKYFK

SEQ ID NO: 175904 - protein, 203 aa, Oryza sativa
  unsure (1)..(203): unsure at all Xaa locations
  Clone ID: PAT_MRT4530_73703C.1.pep
HRQATVAPPPHRPPPPAAFPPTITSPPAFHMATPSPXAAAPRAPPVLVPQPTAAATPRRRRCRSPPPPASARSSSSHRAACHRLSSSRRHRCRCPLPPAPAVAGACSGLGGEERERDEERRIVGVVXVAFSCKYSKKLEGSGSFGVEWSCGAAKAQLHPRSSFSRSSSANSTPKKRRIXPFGTTPAPDKLELGARAVPNGALA

SEQ ID NO: 175905 - protein, 678 aa, Oryza sativa
  Clone ID: PAT_MRT4530_73704C.1.pep
MGSREPFLSAIFFFFFLLLFCLGCKCIASELHLHTTQTAVLKVDASLQHARQIPDTLFGIFFEEINHAGAGGIWAELVSNRGFEAGGPHTPSNIDPWSIIGDDSSIFVATDRTSCFSRNTVALRMEVLCDNCPAGGVGIYNPGFWGMNIEDGKTYNLVMYVKSPETVELTVSLTSSDGSQNLASSTIPVSDTYKGHGFRTELISMMLDLKPRFLRFPGGCFVEGEWLRNAFRWRESIGPWEERPGHFGDVWHYWTDDGLGYYEFLQDVLDSLEFARGSADSTWGSVRAAMGHPEPFPVKYVAIGNEDCGKKFYRGNYLKFYNAIREAYPDIQMISNCDASSRPLDHPADLYDFHVYTDSKTLFSMKSAFDRSSRNGPKAFVSEYAVWRSDAGRGSLLASLAEAAFLTGLEKNSDVVQMASYAPLFVNNNDQTWNPDAIVFNSWQQYGTPSYWMQTYFRESSGAMIHPIMISSSYSDLLAASAITWQDAENTFLRVKIVNFGPNAVNLTISSSGLQAGVDTAKSTVTVLTSSNLLDENSFSEPNKGGGMHALLLLDRGAGNGGARTAPSAHGRMEAKSLTKLEYMYIWNLEPLCLFLVAKWTAPSYLHTHSETNIDSFRQHYTGAEERAAMPIRSQKRARRRRAMPLRRHGREPPVARVEIEALSKSTSTTLSSSFPVR

SEQ ID NO: 175906 - protein, 86 aa, Oryza sativa
  unsure (1)..(86): unsure at all Xaa locations
  Clone ID: PAT_MRT4530_73705C.1.pep
VQREDDLHETGXLDAKHALTDCAKITLQTANLLREDDFGQNASSTYDKVCALYTTACMRHNIIHVNTLTHHARGPASNADGQKDTY

SEQ ID NO: 175907 - protein, 120 aa, Oryza sativa
  unsure (1)..(120): unsure at all Xaa locations
  Clone ID: PAT_MRT4530_73706C.1.pep
NXVYXRKKNTKTPYNMYNGGSKTFIILIYYKIDQYSSSRRLELNYNPISRRAPNPPINPRTHAHXMRWHDDAGSITQWQCTHSTHSGXAINRNRNSEETTESRDVRSLEGPGNARSASRV

SEQ ID NO: 175908 - protein, 676 aa, Oryza sativa
  unsure (1)..(676): unsure at all Xaa locations
  Clone ID: PAT_MRT4530_73707C.1.pep
MASRESFMSTIFFFLLLFSLGCKCIASELHLHATQTAVLKVDASPQLARQIPDTLFGIFFEEINHAGAGGIWAELVSNRGFEAGGPHTPSNIDPWSIIGDDSSIFVATDRTSCFSRNTVALRMEVLCDNCPAGGVGIYNPGFWGMNIEDGKIYNLVMYVKSPETVELTVSLTSSDGSQNLASTTIPLVPFLSILGQENKDVCPFPLVLKGLYCCRVSGASNWTKLEQKLVAQGTNRTSRLQITTNKKGVVWFDQVSLMPADTYKGHGFRTELISMMLDLKPRFLRFPGGCFVEGEWLRNAFRWRESIGPWEERPGHFGDVWHYWTDDGLGYYEFLQLSEDLGAAPIWVFNNGISHNDEVDTAAIAPFVKDVLDSLEFARGNADSTWGSVRAAMGHPEPFPVKYVAIGNEDCGKKFYRGNYLKFYNAIREAYPDIQMISNCDASSSPLDHPADLYDFHVYTDSKTLFSMKNTFDRSSRNGPKAFVSEYAVWRSDAGRGSLLASLAEAAFLTGLEKNSDVVQMASYAPLFVNNNDQTWNPDAIVFNSWQQYGTPSYWMQTLFGESSGAMFHPVTITSSYSGSLAASAITWQDSENSFLRVKIINFGSDPVSLTISATGLQARVNALGSTATVLTSSNVMDENSFSNPNXAEQMQVTLAPHSFSSFDLALAQSKLVAEM

SEQ ID NO: 175909 - protein, 162 aa, Oryza sativa
  unsure (1)..(162): unsure at all Xaa locations
  Clone ID: PAT_MRT4530_73708C.1.pep
HRRPPDTSGSSQTLASPIAEDAAAAAMVAVSLSDDLEPAIARKRILSIPSLPHGPPPSAPASGEHVVLGAWVKTEREREQGKGSFAFLELKKGGAVFVQGAGAAEVKKGGAAGGSTAAATAMAXRPAVCSASALAPLRHRSPSSARLAGIPAVATTSPCSSR

SEQ ID NO: 175910 - protein, 339 aa, Oryza sativa
  Clone ID: PAT_MRT4530_73709C.1.pep
MDGQWEEPQHAGRRRRQPEPGKNLIKIPSYQEVFGSGASSSAAPPSYNPPPTTAASSSSSSSSFSQAFSFLKSTEFYSPPPPPPQTTTPSLRYHLLHPDYLYYRIRELQKNFKLRVILCHIDVEDVVKPLHEVTRTSLLHDCTLLCGWSLEECGRYLETIKVYENKSADSIREHMDNDYLSRLTHALTSIRHVNKTDVVTLGSSFGSLSQVMNASMEELARCPGIGERKVKRLHDTFHEPFKRVSSRPNIVVPDTPDREKASGQPSSTNDGAQDAVEKPDASVNKKSSNVRSALTEAFAKYSEKIRNQNRDSTNVAGEDQTRRAISLLESDMIEGAALA

SEQ ID NO: 175911 - protein, 339 aa, Oryza sativa
  Clone ID: PAT_MRT4530_7370C.1.pep
MTDYLKGCKFLPKLNNEIPSERNATYKQRFSSLENLVLIMFEDDAVLIPRETAWFGYYPDGAFSPVQPPQKTKLYTEDWIGLKALEEAGRVKFVSVPGGLWNGSLPHTNSFDPASSDCGMDIHPPGGFLSMLQSGQQPLVPPHVLFPATWPPMPPMAPTTNSGTIINLDDGDDVRTAKRLTWASDEDLRLFYVDDYPNEGPFTVLHCWKVLRDEPKWHAVLEELEKPHKRSLDDGSDTLSQKDIGEKERPMGRNEAKKQRNGKGKGKGKDDDDSLHEDMKKYMDVQAAASKRHEEFLGTQHRISDAKVEVARLRREAVLTESYQKLMSMDTSQMTDEIS

SEQ ID NO: 175912 - protein, 601 aa, Oryza sativa
  Clone ID: PAT_MRT4530_73710C.1.pep
MKALRRSSTSSSPSSSSSSPTAASSPPSSSWIHLRSLLVAAASSSSSASSSAAAGSSVAMVSASAPAASSSPSPSPAPAPAPSSPHSDRKVAGPAIQTEDTGFLRANRLCVQSVDMIVGEIRGGIKSPWSRRKRKRVLSRQQWEGLFSANGKLRDRGKKFLKKVRSGGIEPGIRAEVWPFLLGVYDLNSTEDERNTIKIKKRKEYEKLRRQCQQILNCYKGNGLKVINENNEECSGIEFSAEGSESPCFEDVNIARASVSHEELKPESEPEQPDNSMCAVTECMEEDTGELICLDPCIAESESSDSESSDEDDPGRISMSGEENCDPDPKFTRTTSFKADFFKSSKTSEDFATWQRIIRLDAIRANTEWILFSRNQAEISRERALQCAESVGLRDYDHLDPSMIYHAARLVGLLEAYAVYDPEIGYCQVMEEDDEAFWCFVGFMRKARHNFRLDEVGIRRQLKIVSQIIKRKDSHLYKHLQKLQAEDCFFVYRMVVVLFRRELTFEQTVCLWEVMWADQAAIRAGIGRSTWAKIRLRAPPTDDLLLYAIAACVLQRRKLIIEKYSSMDEILRECNSMAGQLDVWRLLDDAHDLVVNFHDKI

SEQ ID NO: 175913 - protein, 80 aa, Oryza sativa
  Clone ID: PAT_MRT4530_73711C.1.pep
MPIRDESSMRGKKALPVWRVWASPLPTKGSCPRIGSSGLNPPPPSGSGYLVIPLGPEGLNRPRGPCSAATWRPCGSLERA

SEQ ID NO: 175914 - protein, 305 aa, Oryza sativa
  Clone ID: PAT_MRT4530_73712C.1.pep
KFSDSLLSKQVENISNISREGDESSVRKSMSLDDLQEKAVFSAIIVDPQMKDTKESPEQSGSNSAVQKMISAFQSSSPQDLTRIKSESSLKGLSASSENFTQSSSDKSSSSLATQDVSGHTEAGLVAGTSGKMQLPPGDKSFSNKRSNATEQQAVLSTTSEGRIRRLFREKDLDNSEMVITVQNRSKKRSMPKRRRAAIGPYSLEHMHPHVCITTASRQLRELVELEPPLDSFVFVGQVDIKRPNVRGGASMQDQGTSDSKTKNEMVSARGDDHGFPILDGRLINQGVRVVIVIIACGAIFLNNR

SEQ ID NO: 175915 - protein, 486 aa, Oryza sativa
  Clone ID: PAT_MRT4530_73713C.1.pep
DPRAAGIRHEERGKDAVMANNVFPYATYEGMVDIDQITNPVQRRSMQDQICNFGQTPSQLLTIPHTKRRPLADILKLQTIFWNPTEVRSYVLPNPENCNVPASAMLVSDDSIVVVGANVPAAHLALHHWQPNTSNGPGTPFLFHHGRNAINLSGGAIMRIFKGSAGSVDDYQFPRAIAFAASAIQNSSVVVVTCEREVITGGHADNSVKLISPDGARTIETAFGHLAPVTCVALSPDSNYLVTGSRDTTVILWRIRQIGSLRKKSTPEPPPSTPTTPNDSASGDSSTSNSSKVLETSRRRRIEGPMHVLRGHLGEVTCCSVSSALGLVASSSSTSGVLLHNLRTGRLIRKLDKQEAHLMCLSSEGIILIWNESEKRLSTFTVNGIPIGTSVLTPFSGRVSCIEISVDGKFALIGTCLSNSCNRDGFSAIDDYELDKPNGDDDLPELNETKPSVHVPSVCFIDLYKLELSSKIGDRMLQEGNGVLES

SEQ ID NO: 175916 - protein, 244 aa, Oryza sativa
  Clone ID: PAT_MRT4530_73714C.1.pep
MANFQAALLLLLLRFLLNLAGHRGEVLSVSAAQQQDPPGDDLVFLKLRSGDGDGTVLAMHRHDISFAGFTNGSHHWHVFRGDEDAIPNARRLPFRNTYRDLIGGLHHVPGLPLGKAAAARAAGVLASYDPDAEEGTAAVKRAVAALSVMFTQALRLEPIRETVSSGWESGEARVAAEHLPYIEHWDTMSFEVLRWRRTGEWDGPFTEVLRRRAGIRSAGEALAIAKLLANRSFVQLLQDHSHSA

SEQ ID NO: 175917 - protein, 109 aa, Oryza sativa
  unsure (1)..(109): unsure at all Xaa locations
  Clone ID: PAT_MRT4530_73715C.1.pep
RXXXXXXXRXXXXXPPLXIRXXARXXXXTAXXXXXXSXLKXIDXXRTXPXCXXKXXXXVTXXHTPAXSIPVXXEXPLXXLXGXPLXLXKVXXXXENXLXAXGPQLVVFK

SEQ ID NO: 175918 - protein, 246 aa, Oryza sativa
  Clone ID: PAT_MRT4530_73716C.1.pep
MSASTPPLSFSPFFLLFPSFPLSFLPVDHADYSGGRRMEAGARWCSDSLARRWAKAAGGVRAPPTPTLAKAERRQAPLGLSDLEAAAGLANLALLRPFCSTTALRQRGDSGGQGGRWQVTSTTALGMELWAGMAQRLVTAAAAHDDDDLDRGTNLRFVRVTAMLGGGGGGWWPRRCQPRQVVVQTSVALSWPVCPPVRPRPMRSSCWWVVGRERKDGTRSSGGIHLWLVEEAGYIWPTGGSIWTAG

SEQ ID NO: 175919 - protein, 72 aa, Oryza sativa
  unsure (1)..(72): unsure at all Xaa locations
  Clone ID: PAT_MRT4530_73717C.1.pep
RXXLXXAXSLXXLLYYXSXTXLRRXWRSXXWCPXXLFXXXXSPCXXXXSXELAQVLAXTQXPGEXXXXFRDT

SEQ ID NO: 175920 - protein, 69 aa, Oryza sativa
  Clone ID: PAT_MRT4530_73718C.1.pep
ALIRERKGLAIDRLQSQPCQTKDSSLCLRIIQLYPCLLRLTFALGLSVGKSNKFIEKFVLSSPSFQTQC

SEQ ID NO: 175921 - protein, 156 aa, Oryza sativa
  Clone ID: PAT_MRT4530_73719C.1.pep
PPHGSGGRPPSPLGIRLPSLLFLPSPNSAEGRGVSSGAAGGERRGLWERGSDGRPPSPRRIRLPSPPLPSLPRPGGGEGRRRRCSWREGESGHRRRGWERCPRPMTSTAIHRLSIVRARPPTATAARSERGAAASAGSRGRGEGRSPLPVACRRWS

SEQ ID NO: 175922 - protein, 348 aa, Oryza sativa
  Clone ID: PAT_MRT4530_7371C.1.pep
MAGEGGGGAGALALPPQRRPTTGGGTDLCHTPTPLALYPQIATWPPMPPMAPTTNSGTTHARSRSKAKPVINLDDGDDVRTAKRLTWASDEDLRLVSAWLYHSNDPINGNGKKNESYWGDVVELYNSTTPINRKREVKHLKDRWQRIKRWVGFFCASWKKAALVYTSGYSDDQLRDFANQFYVDDYPNEGPFTVLHCWKVLRDEPKWHAVLEELEKPHKRSLDDGSDTLSQKDIGEKERPIGRNEAKKQRNGKGKGKGKDDDDSLREDMKKYMDVQAAASKRHEEFLGTQHRISDAKVEVARLRREAVLTESYQKMMSMDTSQMTDEMKAEHVMGLKMLREKLLGDII

SEQ ID NO: 175923 - protein, 393 aa, Oryza sativa
  Clone ID: PAT_MRT4530_73720C.1.pep
MSFNKSRGGAAVLGGGDELVLRGTISKKWTLLLCLASFCIGLIFTNRMWTMPEPKEIIRRSALEVNKMNLLSGDCAPKSVMEQKDIIGEVPRTQDAIQALDKTISNLEMELASAKASQEESELNGAPLSESTGKRRYFMVIGINTAFSSRKRRDSLRATWMPQGEKRRKLEEEKGIIIRFVIGHRLVQENMYFGRSDHVEGYLELAAKTKSFFVTALSMWDAEYYIKVDDDVHVNIATLGNILAKHRSKPRAYIGCMKSGPVLAQKGVRYHEPEYWKFGEWGNKYFRHATGQLYAISKDLASYISINQHVLHKYANEDVSLGAWFIGLDVEHVDDRRLCCGTQPDCEWKAQAGNVCAASFDWSCSGICKSADRMKEVHQRCGENDSAIWSAKF

SEQ ID NO: 175924 - protein, 84 aa, Oryza sativa
  Clone ID: PAT_MRT4530_73721C.1.pep
PNVLMIEQPSPNCLQSPRASSACHEAERRLCPLVTNRLWSFSTHVLMIERAHQALIRSRSLGARNPPYTAQIGGSRHSSCICKR

SEQ ID NO: 175925 - protein, 100 aa, Oryza sativa
  unsure (1)..(100): unsure at all Xaa locations
  Clone ID: PAT_MRT4530_73722C.1.pep
MPSPLGFPPVAPSMQRGAVALRPPGGSLPRPGPPARPRFPPPFPSLPPSGPPXSHAPPLPAPPFPPPLVXPLRCPPVVAPLLAPPTGPSPGLRLAGPAPP

SEQ ID NO: 175926 - protein, 88 aa, Oryza sativa
  Clone ID: PAT_MRT4530_73723C.1.pep
RCTLGGRRSDPGLPPDLTQQGGIQTATLSVQAHDRGERTAACFRCLPPVSRISYDDEVHGQYTAHSDCDWIIWDVNLGHSKDHDQNSV

SEQ ID NO: 175927 - protein, 279 aa, Oryza sativa
  Clone ID: PAT_MRT4530_73724C.1.pep
MAATALLRRARWALVDHPAVASFRWEPGRTPASTPSFAAAVICAYLATVFLLHRRVVPLPSPHPRALRAVSALHSAVLLALSAAMAAGCVLSVAATAPSAWWAFCFPPGGATAASGPVFFWAHVFYLSKVYELGDTLLILLGRRPLTLLHVYHHAAVIAMCYLWLATRQSLMPIALATNAAVHVAMYGYYLCCSLGLRWPPRWKRAVTELQIAQFLFSFAASAVMLWRHFAAGGCEGMAGWAFNAVFNASLLALFLDFHGAAYAAAKGKKSRSEVVKEE

SEQ ID NO: 175928 - protein, 38 aa, Oryza sativa
  Clone ID: PAT_MRT4530_73725C.1.pep
SNCGSFLIESCNHHMVPTLESRVSQLITLQLQLTTTVG

SEQ ID NO: 175929 - protein, 62 aa, Oryza sativa
  Clone ID: PAT_MRT4530_73726C.1.pep
IGDNLLNHAKQVHRQQWIFGRMDKYPLLICSSHHQTEVHQTILLPDQPTISIFPVRAWCTCS

SEQ ID NO: 175930 - protein, 587 aa, Oryza sativa
  Clone ID: PAT_MRT4530_73727C.1.pep
MEVFGDLDKVDDAECVEVDPTRRYIRYNEVLGRGAMKTVYKAFDEVEGIEVAWSQVEIDEVMQSPDNLERLYSEVHLLKSLKHENVMKFYNYWVDDQKKTINVITELFTSGSLRQYRQKHPRVDLKAIKNWARQVLRGLDYLHTHQPPIIHRDLKCDNIFVNGNHGEVKIGDLGLATVMLTPRAKSVIGTPEFMAPELYDENYDELVDIYSFGMCMLEMFTLEYPYSECTNAAQIFKKVSKGVKPAALAKITNIQAKQFIDKCLVPASERLSAKELLQDPFLCSDNSSVLVGTKFPSSLPKSVDVSLEALHMDVDTNESMCTSTCKRNDLGGPHRSVLEFTRTNKNTELKLTGEKLDDNSVSLVLRIADLCGHARNIHFLFYLDSDTAMSVAAEMVEQLELADCDVTFIADFIDLLIVNLVPGQQLMNDAVMSTSSESKMGESEHVITSQQHPSELTHDYVLVEGGPNSSEGSDISVQLDGSSKSLSEYGVDEYRTLECGAYKGTDKLGCRHPLSNGSSNFAIFQMDQASHHSELVIGASVSITENRDVLNGELGLIEAQYEQWFRELTRMREEALEGARKKWLPDK

SEQ ID NO: 175931 - protein, 126 aa, Oryza sativa
  Clone ID: PAT_MRT4530_73728C.1.pep
MELVSSSRSVLPRCGGGGVAGVAAAPFRTASASSRRKGTSGFVCALGCDGEGKKSVAEGTVRRRAALALLLASPAMSVAFSAHGKTKSRNPYDERRLLQQNKKIQEANRAPDDFPNFIREGEQSCP

SEQ ID NO: 175932 - protein, 67 aa, Oryza sativa
  unsure (1)..(67): unsure at all Xaa locations
  Clone ID: PAT_MRT4530_73729C.1.pep
PRVRPRVRVMARAVPSTSSALLGEARITMRKTDVKPKPVVSLGMPWYXAKPVXYLCPLFGGHRLYLT

SEQ ID NO: 175933 - protein, 180 aa, Oryza sativa
  Clone ID: PAT_MRT4530_7372C.1.pep
MAGCRRCLVLSLSFSSLWLAMQRERTTTTTGLLSAADEVNVAERKRTACLVDTGGGSTTRATGRLDNVATAREEGRCRQPPLCVVVCKGEPVCTIVCGGEPRKKPYELQQIETARNRQRVSHRRSGRWRWMQNHDNNTTFSLEAEKPKREPHHPRRSKENHDELWMKTTTTIPEWSSKGG

SEQ ID NO: 175934 - protein, 1219 aa, Oryza sativa
  Clone ID: PAT_MRT4530_73730C.1.pep
MEEHITQAIAVLVTKVERVDNLCKQLKQIDLKLETQGKRLDSVQSKVDLSMSSLGQVQHEQAQVARALKAVTSASSSPTPPPTPPLPSQPPPLLPPPPKPPTKDGASSSSSAPPSPTHVHSAPSHQFNQLVYHIRLYNPAITQGSVLVSQFIRGLKEELRYNVHAQQPVIVTQAYMAALAFEGAQQLNKSFVKKDTGVGKFGDKGKSTLRELWKAQQLKDYRRANGLCFKCGEKYSPTHVCGKVEGVQLKAMELTDTTEILDDSVLDALTNLDTPPDDGMLLSVQALAGTSSANSLQLRALVGNQVVLILVDSGSSHSFINADLCHRLQLPLVSCDPATVKIADGTLLTCSAQVPAFTWWIQGYTFVSSMKVLDLGGYDAVLGMDWLSQYSPMQCNWAEKCLSFAYQAQTVKLQGIVSHSLQQLTAVTSDKPCKWQAGNDIWALAVVETVPAPSSVSPLPPAVTKLLHQYDQIFQTPSSLPPQRQFDHSIPLLSGVSPVNIRPYRYSPAQKDEIERQVTEMLASGLIVHSCSPFASPVLLVKKKDNTWRFCVDYRRLNSLTVKNKFPLPIVDELLDELAGTKFFSKLDLRSGYHQIRMKEGDEEKTAFKTHHGHFHFKKLSIYEKEFLAIMMVIDKWRSYLIRGPFTIKIDHQSLCHLDDQVLGSELQKKAMTKLIGLQYKFQYKKGVDNKLADALSRVGHFFAVQSVSVTQPQWVQEVINSYVVDPAAQQLLTELAVVNPNAKGFSLSNGLIKKEGRIWVGANSGLQTKLITTFHSSPVGGHSGIQATYQRLKKLFLWPGMKTAVAEFVQQCATCQAAKHEHCKYPGLLQPLPILAGAWQDISMDFIEGLPLSKGKNTILVVVDHFTKYAHFLPLKHPFSALQVAEVFLDQVAKLYGMSKSIVSDRDRVFTSNFWKTLFGRFHIPLNLSTTYHPQSDGQTERVNQCLEMYLRCAVSNTPSKWAVWLPLAQFWYNTCFHTSLQCSPHKALYGADPSYGLLPSLSEGDSEGQSADAAEILKTRTFYSSILQHHLARAQNHMKQIADSKRTFRTFAVGDSVYLKLQPYAQHSVVNRPCHKLAMKYFGPFVILERIGSVAYRLELPEASQVHPVFHVSQLKQFVPSSVPVFSELPDIVALDEVELLPTAILDRQMVKKGNAAVVQVKVLWGTLQDHFATWEDYEVLCTRFPLAPAWGQACAPAGGNVISQAMTTDEEQEKEA

SEQ ID NO: 175935 - protein, 29 aa, Oryza sativa
  Clone ID: PAT_MRT4530_73731C.1.pep
VYLACLMRSRIRPLTVLHCIQIVILTTSL

SEQ ID NO: 175936 - protein, 194 aa, Oryza sativa
  Clone ID: PAT_MRT4530_73732C.1.pep
MAARRGRGRGREWEDDDLGVGGGQPPHLAAPVVCLARSAGDLAAGAFVGSLVGYGQGLLTNKGMKGSLSSAGSSAKTFAALSGVQSFILCLLRRLRGKDDMINAGVAGCCTGLALSFPGAPQAMFHSCVTFAAFSCIMDGLNKQQAAMAATLASKPSTIKHQEGDVLPPFTLPPLLNASDALASCCQAFLKPKD

SEQ ID NO: 175937 - protein, 178 aa, Oryza sativa
  Clone ID: PAT_MRT4530_73733C.1.pep
ETIAWLVLDVSLNFLASISTNLPITYSIPWFSLLQQVNSSYIPSSCLHKLISSPSFLAVRPQSDQILTFSAAAAAENPHLLEQQPQHFLKQQAAAAPSQAAPSHGSKQQHLLLSTRRRQLALRARGLRWRSLLAKPSSLHVGILQAQPQQPPLPPPSTRSLPRRELQHHTPIHRRCAL

SEQ ID NO: 175938 - protein, 427 aa, Oryza sativa
  Clone ID: PAT_MRT4530_73734C.1.pep
MAHALPMEASAVHGYQSSTVVGVAAAGDGGRRGDREGKPSAARRSRGREDDVAPSLKGGERARERAPPQRRTNADHHRTRAHRRTSAAAVTPLPPDHRTPMHPSSAGAPPGTAPDGAAVVPPTAGAAAALNQRRRTTIAPELPHPRDGPALPLLRLHRRTIAHHRIPLPPERSHARDYPRQRRGCSPYCRSRCGARLATPDQRTAGLAPTDHCSAKPPPRSHVPLIPISGVFVFASPCPGSLRGGGGVAVPDRILPMRPWLSRSKCMRALAACRPALRQSGWPDAIGSEIRPAVAGSGGVAADGGGGDGDGRGEGVWATVVGMATMEAAAGMATTVGLATAMDWRQGGGSGSAGVRRQLAGGVGRWPTTSVAGVAAGSGGDRARWPWREEARYWWGAGAVMPTCRQRFSWRWSIGVSTVDRQAVDGG

SEQ ID NO: 175939 - protein, 445 aa, Oryza sativa
  unsure (1)..(445): unsure at all Xaa locations
  Clone ID: PAT_MRT4530_73735C.1.pep
MIDRSTLHLIIRQVLLIGVIGAFLASGYSKILTSSALRDMNKASSHXAHHCSMQINLVVFTVFTPSLMFASLAKTVTLSDVISWWFMPVNIGITFIVGGTLGWIACKILKPPQHFRGMIIAFCSAGNLGNLLLIIVPAVCDEDGNPFGKDRSLCRSRGLSYSSLSMALGGLFIWTHTYSLMQKAGKMYHKMQSKSIQCPADSDEEHHPAQGHDQVKLDGETAYADEEAALLVSAKLAPEHNEENQMEAPLLTCEREIANKGGFWTNLKETVHQVVEELMAPPTVSAILGFVVGLVPWLKSLVIGNGAPLRVIQESLQLMGIFQVFPQPLLTVRLSFSNGTIPCITLILGGNLTQGLRKSVLKRTVIITIVCIRYVIQPLIGMAVVHAAYGVGFLPHDPLYRYVLMMLFALPPAMNIGSPWLSLWTYLIAAIALTTWSTIFMSILS

SEQ ID NO: 175940 - protein, 75 aa, Oryza sativa
  unsure (1)..(75): unsure at all Xaa locations
  Clone ID: PAT_MRT4530_73736C.1.pep
MDTIRSHPSITLIDHGTTAREVAPSQPLWRSSQXHGILRNQHWSLALMAHALPMEASAVHGYQSSTVVGVAAAGQ

SEQ ID NO: 175941 - protein, 77 aa, Oryza sativa
  unsure (1)..(77): unsure at all Xaa locations
  Clone ID: PAT_MRT4530_73737C.1.pep
SNSCTKFLCQLICYYVGNYVAIPALYLQTCICHGIQRKLXANWQFSHFQRLIKLTCQRTTLKHYFISTNSMLSFLLE

SEQ ID NO: 175942 - protein, 199 aa, Oryza sativa
  Clone ID: PAT_MRT4530_73738C.1.pep
MATIVAWESRNLQLQGGGGGHGGGGGGGGGERREYMFEKVVTPSDVGKLNRLVVPKHYAEKYFPLGPAARTSPAGTVLCFEDARGGDSTWRFRYSYWSSSQSYVITKGWSRYVRDKRLAAGDTVSFCRAGARLFIDCRKRAASVSSSSLVPPALIKVQLPPSRPVVDEEEAACGRRCLRLFGVDLQLRADASPALDLQL

SEQ ID NO: 175943 - protein, 347 aa, Oryza sativa
  Clone ID: PAT_MRT4530_73739C.1.pep
MTPPRVSSLACRDRWTSAPPQRRTNADHHRTRAHRRTSAAAVTPLPPDHRTPMHPSSAGAPPGTAPDGAAVVPPTAGAAAALNQRRRTTIAPELPHPRDGPALPLLRLHRRTIAHHRIPLPPERSHARDYPRQRRGCSPYCRSRCGARLATPDQRTAGLAPTDHCSAKPPPRSHVPLIPISGVFVFASPCPGSLRGGGGVAVPDRILPMRPWLSRSKCMRALAACRPALRQSGWPDAIGSEIRPAVAGSGGVAADGGGGDGDGRGEGVWATVVGMATMEAAAGMATTVGLATAMDWRQGGGSGSAGVRRQLAGGVGRWPTTSVAGVAAGSGGDRARWPWREEARYWW

SEQ ID NO: 175944 - protein, 376 aa, Oryza sativa
  unsure (1)..(376): unsure at all Xaa locations
  Clone ID: PAT_MRT4530_7373C.1.pep
MIDKAENFRQRPCVKSFSSASTYPFPRAQRRIHSSCQRRRAVEQDELPVQTTSSSAAAAVVVAAAAAVATWPPMPPMAPATNSGTTHARSRSKAKPVINLDDGDNVRTAKRLTWASDEDLRLVSAWLYHSNDPINGNGKKNESYRGDVVELYNNTTPINXRKREVKHLKDQWQRIKRWVGFFCASWKKAALVYTSGYSDDQLRDFANQFYVNDYPNEGPFTVLHYWKVLHDEPKWHAVLEELEKPHKRSLDDGSDTLSQKDIGEKERPMGRNEAKKQRNGKGKGKGKDDDDSLHEDMKKYMDVQAAASKRHEEFLGTQHRISDAKVEVARLRREAVLTESYQKLMSMDTSQMTNEMKAEHVMGLKMLREKLLGDII

SEQ ID NO: 175945 - protein, 105 aa, Oryza sativa
  unsure (1)..(105): unsure at all Xaa locations
  Clone ID: PAT_MRT4530_73740C.1.pep
GNKTFELFFFSLVSFSFHSGGWHQAVQTPYPMRTRGGGTSRAVNPYPWVGGWGASRLGGAAGPGNGSTRWLGGSGPGGLGXLAPVGPAFRFLQFPPGSPPLPPPR

SEQ ID NO: 175946 - protein, 276 aa, Oryza sativa
  Clone ID: PAT_MRT4530_73741C.1.pep
MDTIRSHPSITLIDHGTTAREVAPSQPLWRSSQASSHCRQNMHDSVGIQGKRRSSSLGSRTDGLHGILRNQHWSLALMAHALPMEASAVHGYQSSTVVGVAAAGDGGRRGDREGKPSAARRSRGREDDVAPSLKGGERARERWGTVAARDESGAPPGTAPDGAAVVPPTAGAAAALNQRRRTTIAPELPHPRDGPALPLLRLHRRTIAHHRIPLPPERSHARDYPRQRRGCSPYCRSRCGARLATPDQRTAGLAPTDHCSAKPPPRSHVPLIPISG

SEQ ID NO: 175947 - protein, 52 aa, Oryza sativa
  Clone ID: PAT_MRT4530_73742C.1.pep
RIREKTEYIDVGQYLNFKNLKTTVKSFELFREAKFKSIVYITGTTISILGKN

SEQ ID NO: 175948 - protein, 110 aa, Oryza sativa
  Clone ID: PAT_MRT4530_73743C.1.pep
RLQTPLPVRRRCAGSKMFPDVESHSHHQDLRPPAPSNKRALEEWRCQLETAAHCMLTATESIVVVARLAMRIYRMDAATVDQSFDRALNLLAISTQLICRQPIPFALTPK

SEQ ID NO: 175949 - protein, 35 aa, Oryza sativa
  Clone ID: PAT_MRT4530_73744C.1.pep
FMSKKMDRKRVGIISAGASFISKCKHSLYKLFNPN

SEQ ID NO: 175950 - protein, 67 aa, Oryza sativa
  Clone ID: PAT_MRT4530_73745C.1.pep
LVPFTVLSCCLIEPIYINLLWHQYRRNEKKSKAHSIICTESCRICKNFGIRNIPTNLNVGFPKKKKL

SEQ ID NO: 175951 - protein, 74 aa, Oryza sativa
  Clone ID: PAT_MRT4530_73746C.1.pep
LINININTHGCRCKMFPDVEATATTKTFVLAAPSNKACAAALVLAVGSGVPGGGRRYSCLCGSSASPCPCCACN

SEQ ID NO: 175952 - protein, 218 aa, Oryza sativa
  Clone ID: PAT_MRT4530_73747C.1.pep
MSCCGGNCGCGSGCQCGGGCGGCKMFPDVEATATTKTFVLAAPSNKASSGGMEMAADSARRTVLADAWADAWAPLDVIAINDTGGVKQASHLLKYDSTLDIFDADVKPVGDNAISVDGKVIKVVSDRNPSNLPWGELGIDLVIEGTGVFVDRDGAGKHIQAGAKKVLITAPGKGDIPTYVVGVNADQYSPDEPIISNAFCTTNWLAPFVKILDQKFGI

SEQ ID NO: 175953 - protein, 86 aa, Oryza sativa
  unsure (1)..(86): unsure at all Xaa locations
  Clone ID: PAT_MRT4530_73748C.1.pep
MSCCGGQXAGCGSGCQCGGGCGGCKMFPDVEATATTKTFVLAAPSNKASSGGMEMAVESGENGGCGCNTCKCGTSCSXGCSCCSCN

SEQ ID NO: 175954 - protein, 146 aa, Oryza sativa
  unsure (1)..(146): unsure at all Xaa locations
  Clone ID: PAT_MRT4530_73749C.1.pep
DLTLMALAGIGLRHDKKLGFASCERRPGATEGVNVLIEKENQDGQWAYGITCIEYTEFEKYGIPEPTVTNGSLQANYPANTNILYVDLQAAEEVGSRKNASCLPGMVLNLKKAVSYLDHLGFEXAAGGRLECTMQNIADNFMNTYN

SEQ ID NO: 175955 - protein, 70 aa, Oryza sativa
  Clone ID: PAT_MRT4530_7374C.1.pep
GAQINVTLSFNKTSCEKPAKTNGSIQVMKLYWSSLEQVRLIFSGTLLHLLRKSDHVLLGGVHVTDQVNYA

SEQ ID NO: 175956 - protein, 58 aa, Oryza sativa
  Clone ID: PAT_MRT4530_73750C.1.pep
SRCGCKHGFIYFFIGFILSSIRTFIIRTHIGYTLYHYMSIHALSRSIAYVHACMNAWP

SEQ ID NO: 175957 - protein, 739 aa, Oryza sativa
  unsure (1)..(739): unsure at all Xaa locations
  Clone ID: PAT_MRT4530_73751C.1.pep
CLRDGPNFLVLRALEQRDVCILKCHIAACQEHVLGAKQDGNGRHHKHLHDDNDWSDVRFALRQALYNKAAFVAKWSSEGVVEGVAESGESELLRRLLKFLGDIDVFYDCIGGIIGYQIMALELLSASKDHKHRPSKHKSLDFHVPSGLNLMDDSEYASQAALWGIVGLPDLGEIYPIGGAGDRLGLVDSDTGESLPAALLPYCGRSLLEGLIRDLQAREFLHFKIFGKQCITPVAIMTSSVKDNHEHITAICERLEWFGRGRENFRLFEQPLVPVVNAKDGKWLTSGALFPVGKPGGHGAIWKLACDRGIFQWLYQNGRKGATVRQVSNVVAATDLTLMALAGIGLRHDKTSATEGVNVLIEKENQDGQWAYGITCIEYTEFEKYGIPEPTVTNGSLQANYPANTNILYVDLQAAEEVGSRKNASCLPGMVLNLKKAVSYLDHLGFELLITPFLVAAGGRLECTMQNIXDNFMNTYNYRCSKGIESELDTFIVYNERKKVTSSAKRKLKSEDKSLHQTPEGSLLDIMRNAYDLLSSCNVKVPKVKDNCEYLRSGPPFLIFLHPALGPFWDITRQKFVGGSVSQGSELQIEVAEFLWQDVELDGSLIVLADNIMGSTNKNNTGEQIMHYGARDQLDSANNVYWKHDVERSESVKIILHENAEFEAKDVVLKGNHIFEVPTGHRMRIVQDGPEFVAKLDPISKEMMDSGTWYWKYAVDGAHVKLEMDLFILKQHVNDLEHW

SEQ ID NO: 175958 - protein, 73 aa, Oryza sativa
  Clone ID: PAT_MRT4530_73752C.1.pep
ILHENAEFEAKDVVLKGNHIFEVPTGHRMRIVQDGPEFVAKLDPISKEMMDSGTWYWKYAVDGAHVKLEMVEL

SEQ ID NO: 175959 - protein, 60 aa, Oryza sativa
  Clone ID: PAT_MRT4530_73753C.1.pep
IQEEAWISKWSSIESMNCITNDAFKGRTHYEQETLPDLFPLDLNRFALHLQLASPIFGVN

SEQ ID NO: 175960 - protein, 532 aa, Oryza sativa
  unsure (1)..(532): unsure at all Xaa locations
  Clone ID: PAT_MRT4530_73754C.1.pep
AAAHLAERAAGGGAGLERDEAEPLARPRGAPRDDVALGEGAEAGERRGERGGVGVRWQAVDEQPAVGGGRVGGGADAGQQRGVVVGSRSGAMAGQGAAQAGGARGRREGDGSGWTGSIMPGPGTGPRVSDSAHRXVLRTRLTARHAGGPRGGGPMRSLRALRGPRAQKKGRWGRLTRCLTRSRPMWRRRGAFVAATRAGERRKKEAGRDGWRTAAASPGARPDDSRGREYTGTTRXEERGXSTGSDSPEGGRRRRIAVVLAGGGKRGKRRRCDESSIPRYLSIYATSRVHXLEXIGWSYTEEGRRRAAXLPSLGSDGGEPTTSSGGGRGGAREERERGGRTGDALPSRDGRCDERPXRGSELSGLGPGKGKETAPGVPRQLLARTPASPARAMEGGGEDSGSKAARARWWRGNEREGDGAARERGRGLCLHPLDACTQSGLGDARSRAASGLTRRRPSGWPRASTRAGTSGIAENRMAAAGNRRWRQRWRGRERSNERERNSEREEEDERARELSLGSAHAHASHVREEGGG

SEQ ID NO: 175961 - protein, 287 aa, Oryza sativa
  unsure (1)..(287): unsure at all Xaa locations
  Clone ID: PAT_MRT4530_73755C.1.pep
MEKKKEKPNRKRRKPRQDPSPDSGPGPDSDCSPPSSPTSLRRLLDPYSKPRLLALLSDAAATAGAGADDDPTLLARIRAAADASPSHRRLFVHGLPPHADAPALAAAFSRFGPLAECDVVARRATGACKGFGFVTFQSRAAARRALREVGRGGVAVAGRAVSAQYATAGAAAAASAAGRRVYVTNVAPGASAERLRAFFAGFGELEGGPFGFDADTGSSRGCALXVYRTADHPRRALXDQYSVLEGRTLHCQLASDPARKSQPRAPPPPPPAPYSVASPLPALQPLR

SEQ ID NO: 175962 - protein, 540 aa, Oryza sativa
  unsure (1)..(540): unsure at all Xaa locations
  Clone ID: PAT_MRT4530_73756C.1.pep
TSFGGSGTAQGISAAWSSQWAGRGREKAANGRARRGRGWVRVDRIHRAGSRDGPTSQRLGARXEGFMRRGAXGFADAAHGAARGWTKRWRAHAQPKGSPWTARTEERAVGAADXVLDPVAADVAPTWRLRGSHAGRGERGGGGGGAXRWTADGGRVHRSSSRRFEREGVHLNDRXTRGSEPPDRIRRREAGDDESRRRLPAAAKEGNDDDATRARFLGTXASTRPPEFISRVGLGGATPRKADDERLLPSLGGDGGEPTASSGGGRGGASLRRGEGARRENGXRHYRAETDAVTSGRRRGSEFSGLGPGKGKEXGAWSPASAPRAHAGFTSTRNXRREARTAVARRQGHEPTLAVKESXAGGHRRVQQRRRQVMTPAVVGEREKEGGKREARSKPIRERSMRERESSASGFWQDARGAARACARGRAAAWCSAAGQRGRAAQARQARQGRRGGDRAVGHARARARGREGAAGFXTATXGKSTPGRGKKEREREREPREKEKQRELGSAWHVQRTCEAEGGETVEGGRWAEGEYGPQHPRE

SEQ ID NO: 175963 - protein, 57 aa, Oryza sativa
  Clone ID: PAT_MRT4530_73757C.1.pep
ARRAQALTSSAAVSGKADAAEGGGRWPEKGEHQEWEKRRHVALISSEEADPETAEVL

SEQ ID NO: 175964 - protein, 200 aa, Oryza sativa
  Clone ID: PAT_MRT4530_73758C.1.pep
MAAGKGKGKEGECDMAAAAAEAEKKGEGSTVSRGAAGERVVEDSGGGRRTIHLKSKDGKQHDVTEASARLSKTIAGMILAGGGGGGADQCIPTPDIDHDTLRVVMQYCDKHAADDADEEDLKEWDEDFVDELDQDALFDVIAAANYLDIDGLLDLTCKRVADTIKGKTPEEIRKEFNIVNDLSKEEEEEIRRENPWAFEQ

SEQ ID NO: 175965 - protein, 85 aa, Oryza sativa
  Clone ID: PAT_MRT4530_73759C.1.pep
WITSFIQGGQVGIKVNDQVGNNFQTYKGLRQGDPLSPILFNIVAGMLALLIKRAKDVGYISGVIPHLVDDALSILQYADDTIIFL

SEQ ID NO: 175966 - protein, 115 aa, Oryza sativa
  unsure (1)..(115): unsure at all Xaa locations
  Clone ID: PAT_MRT4530_7375C.1.pep
IATSSSNTITKANSNSMVNIHGRXATPLTTVHGMASAGLLALEAAATGTTHNRTRTRMHYSMHSAPRALAHRHTLGPRWAPPISILQLPAGVAXRSRRTRCHRSTAAAAATGTPP

SEQ ID NO: 175967 - protein, 79 aa, Oryza sativa
  Clone ID: PAT_MRT4530_73760C.1.pep
MAHLELLLERCHGNANMPKWPASKRSYVTFTTLPCAVAYNGDSTRREETAAFLFIVVNPPGVPHCTPLHLPSILKIFYK

SEQ ID NO: 175968 - protein, 1186 aa, Oryza sativa
  Clone ID: PAT_MRT4530_73761C.1.pep
MCKRYQGQEVVFSMVHGELLLVLCSLLVVAVLFVSSSAAAAAEDGAEGSDGDLGGCLGFRDGCADRSALCFSPSAVESMLASEDDGVKEMDLVVSRDWGPPPPPSLGFRLPGHRGVVTCSSAADALITSRNGVGREDGGERWYNVASCQAPLVPDNWMRAMAGATPELDAADASTDGIFGSSSLDVEISPPVLDWGKSSLYVASMATLTVVNLNNDSALRVYEPFSTDPQFYVYGYDDLVLQPRENASVTFIFLPKLLGFSSAHLVLQTNFGGFIIQAKGMAVRSPYQLEPLAGMDVITGGRLERNLSIFNPFDDSLYVEEVAVWMSSFQGTKQSSHIVCQLGPFDESLEFTSLSSNWYTASSTEFGLPMIHIRPSEQWEVLPTQSSTVVELKLQPLSEGMVFGAICMKLRNCTSDRVDTVVIPMELEVRARTYHEPTNLVSVTFERVSSCAGVGSIISLSLRNEGTKLLRIVRVTEDNRDGSNNFEVKYLNGLILFPDTVTDIALIKYTSVPTDNSFDNCNIVVETNSSVGSSILIPCRDVISATLSYTASAVTESDGPFSEDELSANSRTGSLGSIVEVKGLQHMKPTITRAYKADDTVLRRWRSHGTRTGISVLTDQKMLFPIVQVGSQFSKWITVHNPSLEHASMQLVLNSEEIIGQCKTINDACEHTFSSRSPEVDSTETRFGFSLSDAAITEAIVGPLESALLGPIIFRPSNQCMWSSMVLIRSNISGMEWLPLQAHGGRQSIVLLEESEPVWKLEFNLISDIQNKSALSKSEFTSPLCGQHLSKEIHVKNSGDLPLQVTKVKISGADCAVDGFSVDNCKGFSLAPSESIRMLVSFKADFSSAMVQRDLELAMTTGIFIIPMTANIPVCMLDQCRKSYLRSIHWKTLIFLFGTVSVFVLVFARGPSFLQCSSKTSRSTREHKRDKETHKYPADIHNSPKRTEDKNNADEQLNTTSTMSLPPSNTVEDKVSIEAPETSGNLTIRVARDKGKRRKRKVGGAGLAAKFEVSSSHSGNSTPSSPLSPKQPAPPPSVTSGNPSPSPSPSPTAPTNAWRSPLLSSPSPIAPRSRAPGSNLMKDKAVKRTEGAATTTTTRKKDFTYDIWGDHFSGHLLGKAREVAPPCYKMFAASEGASNSFFAREPQALVTKPPSPSPSSSSSSSPPVTRGRGSLPSDVASGYGIN

SEQ ID NO: 175969 - protein, 125 aa, Oryza sativa
  Clone ID: PAT_MRT4530_73762C.1.pep
MKPLSLLSALALAFHAVNTGVAVYRSRADAAAVALVLASSLALALLFLCLRLYEGAPPAEAARRRWLRRAVWLLSAALTAAFTRRVAGAMPPAGAVLVWAMSAATAGGGFYALVVVDDGRDLGAK

SEQ ID NO: 175970 - protein, 142 aa, Oryza sativa
  unsure (1)..(142): unsure at all Xaa locations
  Clone ID: PAT_MRT4530_73763C.1.pep
EYPDRMMLTLSXDDRPRSTXTVVEPYYATLYVHELVXNSDXCMMLYNEGLYNIXLRTLKLTTPSFCDLKHLIYSTMSGVTCCLRYLGQLNCNLRKLGVNLIRFPRLHFFMVGLTPLTSRXSQQIRALTVPELTQQMWDATNM

SEQ ID NO: 175971 - protein, 79 aa, Oryza sativa
  Clone ID: PAT_MRT4530_73764C.1.pep
MPRPLVPSDAADAASTCRLRRRLREETGARGSSVEQGGACREGGRGHWSDNDGSNVREEANDSGRSRGRQLDMVTCVTK

SEQ ID NO: 175972 - protein, 77 aa, Oryza sativa
  Clone ID: PAT_MRT4530_73765C.1.pep
FSHNALPFLFMVATSIKKKISLPNTKFSKSNCTKGIIVIWVLIQNEALSHFLPFKNQMLELSSIKLSVSRIQPYNLF

SEQ ID NO: 175973 - protein, 151 aa, Oryza sativa
  Clone ID: PAT_MRT4530_73766C.1.pep
MPLNLALCCARGRGAAAGAYCCRPPGDQAVPPLRVDAAAADDGGDWCCYEELPVSTPPHVPRGLARGDEDDDHDHDDDDGLELTTRGAPGVRDDADDQQLVSPAAAAGGVGFVAKPWIASVYERLSRTFSVLPVTSSPPCRGASGPTHEFI

SEQ ID NO: 175974 - protein, 81 aa, Oryza sativa
  Clone ID: PAT_MRT4530_73767C.1.pep
QQTVWPTAQAGSATSHYQPLVASALHNTSQSFYFDQTQAQAQLSALNFPSICGIILLSCSEDIPTLVVSGTECIVNVKCLK

SEQ ID NO: 175975 - protein, 139 aa, Oryza sativa
  Clone ID: PAT_MRT4530_73768C.1.pep
HPLPPSLVTIINSFAPNGSPAFPLGVGDSLLLLVGQFFPLLSGQCFSPFSCGLFAFLGAPPFPFYASGSFFLSTCERLTLSSRGELCPPSCPVLGFPPGRPPGPPAGTSHKLKGKKKKKKKEKKKKKKKKKKKKKKKNT

SEQ ID NO: 175976 - protein, 100 aa, Oryza sativa
  Clone ID: PAT_MRT4530_73769C.1.pep
LIHRLRNPRHPMPRTNTATVRPPPRMTPPTAAHACSAHHYCCIGHHHPRHAYHPHRQWPSFPPSVVGLQVPSISIPQQSEISEGFQVTATVLTPGASAAG

SEQ ID NO: 175977 - protein, 656 aa, Oryza sativa
  Clone ID: PAT_MRT4530_7376C.1.pep
MHGDTTPRHPHVARAPPIACLYIIFRRGLSASPRIAAHTAGRSIGQKKRAERWGRMAVAAATVRWLVLLLAVSAAATASREKWWHGAGGEASGGGHLVQKEWRRVVAASDAGLVTAVDVADAAGTAYRLHFITMSPGTLFLPVQLHADMVFYVHSGRGKVTYIEEGDSESSSLQVERGDVYNFDQGTILYIQSNACGTRERLQIYAIFTSDSINADDPRHPTSEVYSFVSDLLKGFEVEVLRPGFGVPREVVESIKSTKTPPAIIPYNPEEEDEDDSSNWTEEITDALWGVRDPHFLNKKKKDKQKDKHKGKDKKSKSKAFNFYSGKPDVENCYGWSRSMTNRDLETLRGSNIGMFMVNLTTGAMMGPHWNPRATEIAVVTQGAGMVQIVCPSIPSGESKKHHHDEEGGRGDHGHGGGGVRCKNSLFRVKEGDVLVVPRFHPMAQISFNNDSFVFVGFSTDMGHNHPQFLAGRHSVLQVIGKEILARSLGQDNSTNVGRLLSSQRESTIMACTSCAEELERKAEEEEEGGGGKGEKEREEEERRQREKEEEERRRQEEERKRREEEEKERREREEEERRQREKEEKKRREEEEQRREEEEEERRREEEEEEQEDGRGDEPKPRREEEEGDWGERQIRLPRSLKKRFIGIKGRLSSG

SEQ ID NO: 175978 - protein, 36 aa, Oryza sativa
  Clone ID: PAT_MRT4530_73770C.1.pep
NLYTTHPFTYMSMFMFDTIRVATSSLNPVIASMYQT

SEQ ID NO: 175979 - protein, 176 aa, Oryza sativa
  Clone ID: PAT_MRT4530_73771C.1.pep
MVGASSSYASPLCTWFVAACMSVSHGGGDSRQAVALQSGGRSRRRRQLSKCSVASGSASIQALVTSCLDFGPCTHYNNNNALSSLFGSNSVSLNRNQRRLNRAASSGGAMAVMEMEKEAAVNKKPPTEQRRVVVTGMGVETSLGHDPHTFYEKLLQGHSGISQIEKFDWSEIPTRI

SEQ ID NO: 175980 - protein, 174 aa, Oryza sativa
  Clone ID: PAT_MRT4530_73772C.1.pep
MAGAPVAVDMELGRQRTTGGSTVVLAEVAADRTRAEWRLKQRRLGSQIRSPPRPSTFHGSTSSSSNGGSSSGGRAARSGSSSVSRADMNSRRRRAWPRLLSRVPAASSASSSRAAAAASSTWRRLVGARRKDGRGHGFVTAGVVVAALPSSPAPTSPSPFSLCPAFAMGVDVIL

SEQ ID NO: 175981 - protein, 646 aa, Oryza sativa
  unsure (1)..(646): unsure at all Xaa locations
  Clone ID: PAT_MRT4530_73773C.1.pep
MAGAVKDLQTSDMDDQECGGPSGGVGKQEDGEMNGTENEVDDADDMVEQEESSGSAPSPLLLGTRPKRLRSKVWDDFTPIFVDGKVARAECMHCHRVFNSGTSNLLKHQAKCSPRAQKRPMQQELPVSLSQDIPTDKNTKNLEVEQAETNKLVRTLAMYGDIPLRVSNHGEFSRFVASLNPMVEIPPADNLYLYFTGLFEEEKAKLKKRLASLNSRVSLSVYVWHYDTLLPFLCLSVHYIDDQWQKDKKIIAFQAVDSSCHAKELSMVILTAIRDWGLFGKVFSIALDDAFIDDSVASDVKDILQKWNSLHADENLSGNQSLFVVRYATHLLDQIIQLFDKIWDVKKDLHREPVYYSDEESSYVREKMQRKFKEQWKFNCLHICMPMIMDPXTVWKSSSHVLLMCSKFMEGLTSSAVKYSNNNYAASGKDWTCARRICDTLEDFHRCIDIMPNFPCPVDLFYMVWKVKRDLQREVDNNRDDSFSTVVKKMQEKFKNCWKLCCLHFYLAMVVDPSHRLEHIKFRVRLHTDTDYIHYMHDIFLNLFDEYSGKVEDTNCTSETRTEVGVDGGDDRLKYYRRYENPICERPMTELDQYLQEPRLSGGERDVLRWWKGHNLTYPTVARMARDILAIPCRTYLSIYYILKVH

SEQ ID NO: 175982 - protein, 191 aa, Oryza sativa
  unsure (1)..(191): unsure at all Xaa locations
  Clone ID: PAT_MRT4530_73774C.1.pep
WRRRSSSAEISAAIPRRRGSPIGGGALERQRPSPLGLAPLPPFAARRPPPPSLLRTPTPPPPSPPFRTVAAAAAAPTPSLPPTAATSAVAPPRGNSPTATPSLXLRARQPPPLPHFALSAAAAPSSRVRPPPVPPHAAATGPLRLANADAADAAAAPSLLARPPLLLPRRAANIAVAPSPPPPPQISAAAR

SEQ ID NO: 175983 - protein, 103 aa, Oryza sativa
  unsure (1)..(103): unsure at all Xaa locations
  Clone ID: PAT_MRT4530_73775C.1.pep
TSIKDPTARRWAADRAGGKAPTAVPGPRGXRKAVGRRRWQGHLAADGSRRKEGVGGGGGGWXGGLAGAVDILRPTGKAGGGAVGRWRRGIGRRNSDGRRGLRV

SEQ ID NO: 175984 - protein, 118 aa, Oryza sativa
  Clone ID: PAT_MRT4530_73776C.1.pep
PRWRPLPRRRQYAYFRCTTLTGKTIMLEVESSDTIDSVKAKIQDREGILADQDWLMFAVMKIEDGLTLWDYNIEKEFTVHMMLSLRGIADNRKWKTYTYLETIMYRCRTVTVAELEVY

SEQ ID NO: 175985 - protein, 59 aa, Oryza sativa
  unsure (1)..(59): unsure at all Xaa locations
  Clone ID: PAT_MRT4530_73777C.1.pep
LMTLPSYHEQMEYHRNIQTSCNNLAFQAMIEQGIMLYCIIILLPPSPNXXKQXXTITTX

SEQ ID NO: 175986 - protein, 1713 aa, Oryza sativa
  Clone ID: PAT_MRT4530_73778C.1.pep
MGWGVACHTPPDTRAASGHVAVVLSITWPVTDRFFVIIDDIWDRKSWELIRCAVQDSKLGSRVVVTTRIFEIATHRGEKEKKEMSSVVGKEVVDASSLITKGDMKDLLEDLLKMGMIGQRNVAGGSKLKLEVMPSELRLEGSKNYLSWCRRAQLMLRAKGVDHFLQEGCEEPSDKESQAWRTWNTTNLTVMLLKHEEDIVIGNKWMQRRRVIHFLKGLNKEFEDRRAAMFHQATLPTMEEVIFAMVQEMRLKLMRGTNLTRSAYTVADNRECYNCGQVGHVSYNCPTPRNIGGRGLIRGGHGGFGGTRGGFGGDRGGFGGNRGGRGGDWRGRGGGRGRTEVLLRPMQPLRREKGLGGGLGLESGVMGCGTSIMRNCKFRHWLHLSPPLSAWDGVRGVAASATGGTTVPVINPGRFRGGSSISGGRETEGGRSCSEPSVGGIGNGRGRGAFSIAIMELVMGAMENLIPKLGELLKEEYVMQSGVREKIQSVSRELESIHAALRKIGKVPWEHLDDELRLWAHDLREASYDMEDIIDSFLVRVDGHEASEVHWFKWFLEKMTNQFNKIKASHEIGVAMKEIDEKLQEVATRHARYTIDNIAINPAGPSTVDPRLLSMYKTLAELVGIEGPMDELMKMLDIDLPTKKRKIEIDVSVRKPKMVSIFGFGGLGKTTLAKAVYDKLKPSFDSGAFIPVGQNPNIRKVFRDILMDLDKQSYNDLNLKLLDERQLINKLQEFLQKKRCFVVIDDIWDKDSWRLIRCALQDSNHESRVVTTTRIYEVATQVGEVYKMHPLSHDESKKLLYTRIISGEGESLRSTSVEACDKILKKCGGVPLAIIIIASLLANKPREYWSEVYNSIGLEHGYNDDVDNTRRILSLSYYDLPLHLKPCLLYLSIFPEDYYIEKNLLIWKWIAEGFVHEKQAAKLGLFETGEGYFNELINRSMIQPVEHEYSGYMCGCRVHDMVLDLILLLSGEENFVTVVDGSKEHELSWKNARRLALQHWSFEENRNQLANMGVKQTRSLIMTECFDKNMQLPSFQVLRVLEIQKQGRWWNIDGKINLQHVRNLLHLRFLHLDCIDSIPLIEQFRNLRFLQVLHLKESNIQELPESVGLLTKLLSLRVDIDVRVSPGVIEKLTSLQELYLWPYSDDTFQFVKVLGKLRELRVLHAKNLKLDGQGETSALLESLCNLHKIQTLDIDLNLNPNEGVTWDAGFTSPQCLRYLCLVSLRFHRMPEWINWSLLPNLSYLELRVNFLEELDLETLGRLPKLRYLHLFIHCDRIVSIGKIAGAGDACFQELRFLNTPYLYVRFDQHGIMCSKDEKAVMPNVKTLSFCVYVRILKDTDILGFDKLFSFAHLGRSSLQQVQVNIQCRGARAMEVEEAEAALAHAAAIHPNRPTLQIHKFSEGEMLPPHEEPSSFFPKVVVENLNAHERKDDDLRFVLGQMLQRNPCVKKFSVSINCENACLEEVEKAEAAARYAVDFHANRPTLELVKYGEDKMVLSGQHQQVLKRTKTGFHPAATLEGVRRHGNALRRLERHHCRPGQGRAWFSPVVHRLLIKSCSPLLQLPTLHRQYVNIAAPTPLVGQPPLPPCRPPTRRHRIAGKPLPPPVVPPCAVLASAVTDHTSSCRANFHDHCGTAGSLRCHLHALPCRPPPLPACAGCALPSSAAPARVGRPSSASIAAYMPTSASAATWTLALAASRLSMTKFGNISIGDED

SEQ ID NO: 175987 - protein, 82 aa, Oryza sativa
  Clone ID: PAT_MRT4530_73779C.1.pep
FFQQLRMFAQQFPCQAINSFQAFVHQLRLQQFVSIYFDQSQAQAQVFLALNIPSIWGISPSSTPAPCSIPPVGGIWFLIGPV

SEQ ID NO: 175988 - protein, 601 aa, Oryza sativa
  Clone ID: PAT_MRT4530_7377C.1.pep
MFPLRRRPGFLAVVLLLLLFLSFQGMDDADKTIAYTDQDGRIKLFKVTMTEFLSSSIWKNPLQPKDTQPLAQTVFRRKRKEDRTQELLQVDREAELNMRNVATDRSRNFSNKVRASYNIWRPGFHHTNTDSTLRLMKDQIIMAKVYATIAHSQKQPDLYVLLMTCIKQSQEGIGDAHMDYKLDLSALERAKAMGHALSSARDVLYNSGEVSRRLRVMLQSTELNIDSVKKQNSFLVQHAAKTVPMPLHCLHMQLTTDYHFRDGVVKEYFRDAALKEEEDKAKREDRSLYHYAIFSDNVLAASVVVRSTVTHAKEPEKHVFHIVTDRLNFAAMTMWFISNPPLPATVHVENIDNFKWLNSSYCSVLRQLESARLKEYYFKAHDPSSLSDGNENLKYRNPKYLSMLNHLRFYMPEIHPKLDKILFLDDDVVVQKDLTPLWDVDLKGIVNGAVETCKESFHRFNTYLNFSHPKISENFDPHACGWAFGMNMFDLKEWKKQNITGIYHYWQDLNEDRKLWKLDTLPPGLITFYNLTYPLNRTWHVLGLGYDPSVDLAEIENAAVVHYNGNYKPWLDLAISKYKPYWSKYVDLDNSHIQHCYMSEQ

SEQ ID NO: 175989 - protein, 102 aa, Oryza sativa
  Clone ID: PAT_MRT4530_73780C.1.pep
MLILPNFVIDKRLAARASVQVAAEADVGMQRWRTTRQRVQVAAEAAGCATVVVKVGTARGGVVGDGGSQYGARRHDRWWQWLASYPVAASGRPTWRQWRLAN

SEQ ID NO: 175990 - protein, 1496 aa, Oryza sativa
  Clone ID: PAT_MRT4530_73781C.1.pep
MSSVVGKEVVDASSLITKGDMKDLLEDLLKMGMIGQRNVAGGSKLKLEVMPSELRLEGSKNYLSWCRRAQLMLRAKGVDHFLQEGCEEPSDKESQAWRTWNTTNLTVMLLKHEEDIVIGNKWMQRRRVIHFLKGLNKEFEDRRAAMFHQATLPTMEEVIFAMVQEMRLKLMRGTNLTRSAYTVADNRECYNCGQVGHVSYNCPTPRNIGGRGLIRGGHGGFGGTRGGFGGDRGGFGGNRGGRGGDWRGRGGGRGRTEVLLRPMQPLRREKGLGGGLGLESGVMGCGTSIMRNWIGWHFWDGVVVMVNLSSFLLLPPNNYLNYPHWLHLSPPLSAWDGVRGVAASATGGTTVPVINPAVSAADPASVVGEKLKAAVLAANPVLAASAMGGGSIGHVGGRRGGRSCVRSGVDSGWGGLFNAIDTILIIGRGAFSIAIMELVMGAMENLIPKLGELLKEEYVMQSGVREKIQSVSRELESIHAALRKIGKVPWEHLDDELRLWAHDLREASYDMEDIIDSFLVRVDGHEASEVHWFKWFLEKMTNQFNKIKASHEIGVAMKEIDEKLQEVATRHARYTIDNIAINPAGPATVDPRLLSMYKTLAELVGIEGPMDELMKMLDIDLPTKKRKIEIDVSVRKPKMVSIFGFGGLGKTTLAKAVYDKLKPSFDSGAFIPVGQNPNIRKVFRDILMDLDKQSYNDLNLKLLDERQLINKLQEFLQKKRCFVVIDDIWDKDSWRLIRCALQDSNHESRVVTTTRIYEVATQVGEVYKMHPLSHDESKKLLYTRIISGEGESLRSTSVEACDKILKKCGGVPLAIIIIASLLANKPREYWSEVYNSIGLEHGYNDDVDNTRRILSLSYYDLPLHLKPCLLYLSIFPEDYYIEKNLLIWKWIAEGFVHEKQAAKLGLFETGEGYFNELINRSMIQPVEHEYSGYMCGCRVHDMVLDLILLLSGEENFVTVVDGSKEHELSWKNARRLALQHWSFEENRNQLANMGVKQTRSLIMTECFDKNMQLPSFQVLRVLEIQKQGRWWNIDGKINLQHVRNLLHLRFLHLDCIDSIPLIEQFRNLRFLQVLHLKESNIQELPESVGLLTKLLSLRVDIDVRVSPGVIEKLTSLQELYLWPYSDDTFQFVKVLGKLRELRVLHAKNLKLDGQGETSALLESLCNLHKIQTLDIDLNLNPNEGVTWDAGFTSPQCLRYLCLVSLRFHRMPEWINWSLLPNLSYLELRVNFLEELDLETLGRLPKLRYLHLFIHCDRIVSIGKIAGAGDACFQELRFLNTPYLYVRFDQHGIMCSKDEKAVMPNVKTLSFCVYVRILKDTDILGFDKLFSFAHLGRSSLQQVQVNIQCRGARAMEVEEAEAALAHAAAIHPNRPTLQIHKFSEGEMLPPHEEPSSFFPKVVVENLNAHERKDDDLRFVLGQMLQRNPCVKKFSVSINCENACLEEVEKAEAAARYAVDFHANRPTLELVKYGEDKMVLSGQHQQVCTPGCLSDSNP

SEQ ID NO: 175991 - protein, 108 aa, Oryza sativa
  Clone ID: PAT_MRT4530_73782C.1.pep
MASMTAVAAVLLLVFLLLTSSAPFLQARMMPGDGGEIVQEAVTMMMGSSAGAAAAAVAGRRSTASSSPPEEEMLLPRRPPLPLSPPAATTGARSSRMLGSVPSPGVGH

SEQ ID NO: 175992 - protein, 602 aa, Oryza sativa
  Clone ID: PAT_MRT4530_73783C.1.pep
VFPFGSVPLKTYLPDGDIDLTAFGHSSDEILAKQVQAVLESEEARKDAEFEVKDVQYIHAEVKLVKCIVQNIIVDISFNQFGGLCTLCFLEKIYLGLIYHKLGPLYFLVVQQLVDDFFKVDQKFEKNHLFKRSIMLIKAWCYYESRILGAHHGLISTYALEILVLYIFHLFHGTLDGPLAVLYRFLDYYSKFDWDNKGISLYGPISLSSLPELVTDSPDTVNDDFTMREDFLKECAQWFTVLPRNSEKNTQVFPRKFFNIVDPLKQSNNLGRSVSKGNFLRIRSAFDFGARKLGKILQVPDNFTVDEVNQFFRNTLKRHCSRVRPDVQEIALDFNGERADNDSSPLYSNNSFGDLSDEFNNISISDSSNHGSLRQNGWNYVAENKERKSVSGGWLASKATNPAATNSTGMTNGSDSCEPASPSITGAHSLPSEEGHDALDLFNESESGTKAGIKYDTNPSHHGMSTVSYAGRSHQSFEEVDNDDRGTIDSNWSDLTGDYTTNFNNLLYAQGFHQDYPMNQYYPFGPVYYQMPSPPPARYQNRRSSNGHSRNNVYGYAGTNGIGPAPCPPGYLIMRTYSQIDDSHRARGTGTYFPNPNLSKDR

SEQ ID NO: 175993 - protein, 82 aa, Oryza sativa
  Clone ID: PAT_MRT4530_73784C.1.pep
MGRGKVQVRRIENEVSRQVTFSKRRPGLLKKAHEIAVLCDVDVAAIVFSAKGNLFHYASSHTTNLTGALDGARDENGADTDG

SEQ ID NO: 175994 - protein, 110 aa, Oryza sativa
  Clone ID: PAT_MRT4530_73785C.1.pep
MEGKGAAAAVALCCILILLSGDQLHQVAAMSKFCRCYLQCYPDCRKSLPRFICVLKCIDDCSPNKKRMAVGDCNKFCLLAICGMALNGQADVASCVDDCTKNPDLHTKFL

SEQ ID NO: 175995 - protein, 88 aa, Oryza sativa
  Clone ID: PAT_MRT4530_73786C.1.pep
MGALGVATGLAASGEGTGRPPREAPELASPASGHCREPARRLVAAMTGEAPGCWAPREWGGDQVTTPKVEAGALSCHHGRRRVEAAGR

SEQ ID NO: 175996 - protein, 133 aa, Oryza sativa
  unsure (1)..(133): unsure at all Xaa locations
  Clone ID: PAT_MRT4530_73787C.1.pep
PRERYIALMYWWIDTSLIAGHTGSRELPASIYWLAQIWITVLLKEIAQESHRGGDLVQSSRLSKPSTNAEPDLNQRLDYALDDYQXDMHVPSDPTSTVKSNTCLVYKNAPLITYQTLTPAKHAQPIILEINSS

SEQ ID NO: 175997 - protein, 63 aa, Oryza sativa
  Clone ID: PAT_MRT4530_73788C.1.pep
DGINGAAIPSITEIAEIQQTVVKGNGVSGVGLSENRVFLIGENRWEDPSRLTQKNKPISSATG

SEQ ID NO: 175998 - protein, 523 aa, Oryza sativa
  Clone ID: PAT_MRT4530_73789C.1.pep
MCAMSSVLATHHHAARCGAVRRENAWIAPARVGFSQARRGGGRDELSAAGLGRFLGYATADHKNKNHEVDDLEPARLFVGLPIDTVTDGATVNSARGVTSGMRAVKLLGADGVELPVFWSVAQPESPDRFSWAGYRAVADMARDEGLSLRVTLHFHGSPGGAVPLLPVWVSTAAADDPDILFTDRSGGRHDDCLSFAVDELPVIHGRSPLDCYDAFFRSFADAFQDLFDSTITDVTVGLGPNGELRYPSYPPGSDGQGFTGVGEFQCYDRYMLEQLRRHAAEAGEPLWGLSGPHDAPRYGDSPDACGFFNDHGGSWQSAYGDFFLSWYAGQLVGHGDRVLAVANGALGDTPVEASAKVPFMHWWHGARSRPAEAVAGFYKSGGKNGYSPVAKMFARRGCTVIVPGMDVCMNKQHRITGSSPDQLLVQIKNACRRHGARIAGENASLVVTHTSSFSRIRSNVLTAERMRPGHFTYQRMGEAFFSPEHWPAFVEFVRGVVCGEWPDEDEDRDVADNPNAMEAQPV

SEQ ID NO: 175999 - protein, 523 aa, Oryza sativa
  Clone ID: PAT_MRT4530_7378C.1.pep
MLLSWGLEMAFPSTSSVAYPRSLSPLRRCPGFLALLVAVLLFLSFQIGSVRMALLRSPDWAQGSRELSWMPQCTVYLISSNDIYEGMDNADKTIAYTNQDGRIRLFKVTTREFLSSSIWKNPLLPKDTEPVAEIQEIAEEQLLATGSEVSNLSSTETLETRTDPIKLKREVFRRKRKEHRIQELLQVDKEAELHMRNVATNRSRNFSNKVRASYNIWRLQFHHTNTDSTLRLMKDQIIMAKVYATIAHSQKQPDMYALLMKCIKLCQEAIGDAHMDYELDSSALERAKAMGHALSSARDVLYNSDEVSRRLLVMLQSTELNIDSVKKQNSFLVQHAAKTVPMPLHCLHMQLTTDYYFRDGMIKEYFHDAALKEEEDKAKREDRSLYHYAIFSDNVLAASVVVRSTVTHAKEPEKHVFHIVTDRLNFAAMTMWFIRHPPLPATVHVENIDNFKWLNSSYCSVLRQLESARLKEYYFKAHDPSSLSDGNENLKYRNPKYLSMLNHLRFYMPEIHPKLEYSIVSPK

SEQ ID NO: 176000 - protein, 154 aa, Oryza sativa
  Clone ID: PAT_MRT4530_73790C.1.pep
MDKLTPEQKVEIKKMKEDLQNRFLHSFAPTRSGAMIQKYKIVLSNNYDTEMSAGNSDKAKGDNQDKIEALKLLPQLQHAGHYIPRVSPNQVASMFRPRQPIVEPIPQITMGQHSPIPQPQPNISTQLIPEQNMVHQSPQHIGGNLNFQYQPYSP

SEQ ID NO: 176001 - protein, 194 aa, Oryza sativa
  unsure (1)..(194): unsure at all Xaa locations
  Clone ID: PAT_MRT4530_73791C.1.pep
YSNPTLLEKXGYXSGEEDMEFSSFSXGTERAVKTWQATVRVSESGIMTSDLLDMLFTGQVGQDVKTKDGINGAAIPSITEIAEIQQTVVKGNGVSGVGLSENRVFLIGENRWEDPSRLTQKNKPISSATNASTKKCISCRGEGRLMCVECDGTGEPNIEPQFLEWVGEDTKCPYCEGLGSIVCDVCEGKTVATN

SEQ ID NO: 176002 - protein, 670 aa, Oryza sativa
  Clone ID: PAT_MRT4530_73792C.1.pep
MVVVHGQRAEDSFGGFFSFDEDAASEDMSLDGLDEELEEHKDYDVLISILANGEKQRDMATLVEGNLGHAEQDLIQDYVEDSDNLVLLHDQIHDCDIILSQIGSLLTGFQVHIGSINSELRSLQERSLDISVRLKNRKLVETKLAKFVEEIVAPPSLVTVIIDGEINDGYAKSLEILSKKLRFSQVDPMINASNSLKDIKPELERLLQKALCKVSDYLTELFFSMRKPGTNIQILQQNMVQKYRYLILFLREHGSKVYTDVRATYADTMNKVLSAHFQVYIEALEKLKLDIGVSSDLTGYDTNIIDLISRGREHLRNHRFMFSLGERASILKEIDRPGLVPHISEVNPVKYPYEVIFRSIFLSRHSLVKNHCFIRFFKMMWKNYLLSGPFKVINGHLDHTLRNYHDAVCLMLMICITRKHQVLIYLWPRFKTVFDMYLQSLYRCDTKLLWVDGSHPHHIVRCYVEFTASLIQLNAECGDGQLDMNLERLRLAVDNLLGRLAENFANPKTQHLFLLNNYDMTISVLKEAGDEANKLQSYFEEKLESNMISFADELLMEHFKDLIKFVRSRVSEDLILYTECPSIADVEPIVKNFAVTWKTALELMHNEVVTSCSNLLAGMEILKAAMVQLLNDYNRLSECVKIIPGGSTLNRNLVSITSISYEMRKYSITL

SEQ ID NO: 176003 - protein, 81 aa, Oryza sativa
  unsure (1)..(81): unsure at all Xaa locations
  Clone ID: PAT_MRT4530_73793C.1.pep
RGLAAPSASSTQDIFIGQLGGLISTTIEHVIAPDVRFETVDMAMRLLVPIIXLQNHNRYNILQAGHNYSIDVQAIEREVKR

SEQ ID NO: 176004 - protein, 210 aa, Oryza sativa
  Clone ID: PAT_MRT4530_73794C.1.pep
MRRLLAASGRCAPATRTHHGLFARAIQILAPPDPVSLHKLSAPDCEIVELRLERPEVKNAINWEAMRLLRGVVEKVEADDTVKVVLVTSSVPGVFCAGADLKALSIPTIAVIEGAALGGGLELALSCDLRICGENATLGLPETGLAIIPGAGGTQRLPRIVGRSRAKEMIFTGRRCNATEAVMMGLANYCVPAGEAHEKALELAREIAQK

SEQ ID NO: 176005 - protein, 113 aa, Oryza sativa
  Clone ID: PAT_MRT4530_73795C.1.pep
GFIIPPTSMPSGERRPQEKDGLSPGHCKHPMPELLWVTPLARKECATAVPGCCPNGWCADANSMMPHVSTEKRLQRLKHVTEEMSSGRIALPSHTRATQTFIMRQNPLRSACG

SEQ ID NO: 176006 - protein, 142 aa, Oryza sativa
  unsure (1)..(142): unsure at all Xaa locations
  Clone ID: PAT_MRT4530_73796C.1.pep
HKRIRGGGCVSGVDWRSAGVRRGMAQLSGAAAQCGSDGSGGKRRLEARRXVAERGLERGACERARGARGGGGNGRGEHGEAFYSAREQWGGRGVANLGRQRPATWSSAWAEWGLDLAPKVGEKWGXSGGGGEPILCGLGARA

SEQ ID NO: 176007 - protein, 143 aa, Oryza sativa
  Clone ID: PAT_MRT4530_73797C.1.pep
MDHGGGERRSAGAYEAALRAVQRPAAKPWRGGGGGGGAGGSAGAAGAAPPKVYRVAPRDFRERVQRLTGAGPAAPAVAMGASQAVPAPPPPYAGVPAHGQSDAAAAADMFDYASWFSVPLLSPASMPAAGYDGQLHHGHGALL

SEQ ID NO: 176008 - protein, 66 aa, Oryza sativa
  Clone ID: PAT_MRT4530_73798C.1.pep
PPWRKRVHFPGFSKIWFKKRKLDFKKKGLKGSGKKRKLGWGISSHSNQRVPKRFKMGKILLGRAGG

SEQ ID NO: 176009 - protein, 260 aa, Oryza sativa
  Clone ID: PAT_MRT4530_73799C.1.pep
MATARLRSASSLRGVLLRHCSMCYSNSTGRMVEVQFTTAPGCIAWKHFSTFKPNPLPKLDGLGSVTCLYSQARWASQAAAVKETENSGSKISIGPKSKQIKEDDKDDRLVYQGPISSTIRKVKLLSLSTCCLSVSLGPVITFMTSPDMNVILKGAVASTVIFLSATTTAALHWFVSPYIHKLRWRPGSDSFEAEIMSWLATPLTRTIKFADVRPPETNRPFVTFRAEGNFYFVDAEHFPNKALLARLTPKHPNESAFKNL

SEQ ID NO: 176010 - protein, 133 aa, Oryza sativa
  unsure (1)..(133): unsure at all Xaa locations
  Clone ID: PAT_MRT4530_7379C.1.pep
SDGRYLISAGLDSNVYIWNFDIPSVADHKGEAKSVRSCEKFFSKDVTTAVPWPGPFCTATXERRSPAARCFADGMKGTPTWREEKLPPAKAADAPRLSDCLSTISPAWNTVIVTASRDGVIRSFHNYGLPVRL

SEQ ID NO: 176011 - protein, 172 aa, Oryza sativa
  Clone ID: PAT_MRT4530_737C.1.pep
MVSGGGARLPATATGSRRRRQTAWKAVASVEGDGGARAENGGTHGRKGKREERGTSPAGVGRKPMAATVAGRRREGRRNSTAHGERGVPAAGLDREVAAGVALAAVAAWCGGGSSGGGARPEVVASGGASRERHGGGRERAGARRHGSARWSGGCGVTWGGGAPATGGGGKG

SEQ ID NO: 176012 - protein, 180 aa, Oryza sativa
  Clone ID: PAT_MRT4530_73800C.1.pep
MATARLRSASSLRGVLLRHCSVGTTSPPQVFSRVSDLQAPGCIAWKHFSTFKPNPLPKLDGLGSVTCLYSQARWASQAAAVKETENSGSKISIGPKSKQIKEDDKDDRLVYQGPISSTIRKVKLLSLSTCCLSVSLGPVITFMTSPDMNVILKGAFASTVFFLSATTTAALHWVCEPRTF

SEQ ID NO: 176013 - protein, 293 aa, Oryza sativa
  Clone ID: PAT_MRT4530_73801C.1.pep
MDRHEEEAGESPCVPPGFRFHPTEEELVGYYLARKVASQKIDLDIIQELDLYRIEPWDLQERCKYGGHGGDEQTEWYFFSYKDRKYPSGTRTNRATAAGFWKATGRDKPVLSSPSTRVIGMRKTLEEGWVVCRAFQKPMPNQQQHRLSYGCIPGSYGAGAYAAVPDNYSLLLHHDNPSFAGRPLMSAAASALFANNNNNSVVDHSNILSSESKLHFSDMMPPLESPTIVDGEGYVSQASSCVDVDQQAGIVDWNLLTSLLPPPAHQLFHHLPSASSSKNSNNISSSGFIDDRD

SEQ ID NO: 176014 - protein, 108 aa, Oryza sativa
  Clone ID: PAT_MRT4530_73802C.1.pep
TTSLPANMQFTKLTLLAVTALFSMGEACKCYGTKGNLNNGATHKCCNDYKGVYSGNDCKAGSISEHLSGFDRCCKGQGSDCDFPRLASTEAKMVKAVKHVEIKTAYSG

SEQ ID NO: 176015 - protein, 100 aa, Oryza sativa
  Clone ID: PAT_MRT4530_73803C.1.pep
MASGSGGGGGAGGWAAGSDRDPTEEKLERSMGPLRRHGARGRRRGLFLLLEFNPDSDFGVHIRGLMIWERTLKHRDAADKPLLVEQITMGEIRKTAYMEH

SEQ ID NO: 176016 - protein, 139 aa, Oryza sativa
  unsure (1)..(139): unsure at all Xaa locations
  Clone ID: PAT_MRT4530_73804C.1.pep
GGSGGAVLGKAGSAALGRSLALGGGRRARRQPAPADLATRPREGRIRRPRGSRRQAAGTATACGGGSGGAVAEAEDSGASXGGGPIGQAGSETVAELRRRAGVDGVGGGGGDLRQGARRGGEGCREHLHQGISTLLASL

SEQ ID NO: 176017 - protein, 87 aa, Oryza sativa
  Clone ID: PAT_MRT4530_73805C.1.pep
MPRRTPAAAAVHTTRRLSRLPLFSPSSTWERAEAAAADRAGVAAGAPILVVYSSAVACASARLLLGRHARPCTAAPAGAMPNWPWKF

SEQ ID NO: 176018 - protein, 283 aa, Oryza sativa
  Clone ID: PAT_MRT4530_73806C.1.pep
MADRCCVYMHEMDDVHRWLPSEVLRDIGIADADERRRLAIVEDRPRQAQRPLFSCHHRPQVTGGDGGEMLRDHHALAGAGRPRVAATPPLQLRLVGNSRLPLPAPAAPWHVMTGGPRNTMVLRPAPPPAMNHPHPLLRGGAVTGAAPPVTTRRSSGTGFFLPRTTAADPRHANHHMTAAAARPPYYQCSTEAVSGTKAPARQRGSGCGDDHGEEAARAHASNGGKHAAARRCSSGNHQPVPRARSTTGMDSLGHGHDALMHQPAVITHYNYMHGHLCAPYHWC

SEQ ID NO: 176019 - protein, 163 aa, Oryza sativa
  unsure (1)..(163): unsure at all Xaa locations
  Clone ID: PAT_MRT4530_73808C.1.pep
GCRIRHEVXMVDIPAIDLRXAXAAXXLMKRXXCXTRXRXWAXSGCLGTVXRRGSTRHECRGARALXPPRRHXXPXRLHXPGXRLPPSRLXQSALLXLRXLLLPXPPXXSTPSAXXXXXHPHXXGTPLKXYPXXMSPLIVDVPGEVARVAWGXXGSSLPRLAXX

SEQ ID NO: 176020 - protein, 239 aa, Oryza sativa
  Clone ID: PAT_MRT4530_73809C.1.pep
MGQKINPLGFRLGTTQNHHSFWFAQPKNYSEGLQEDKKIRNCIKNYIQKNRKKGSNRKIEADSSFEVITHNKKMDSGSSSEVITHIEIQKEIDTIHVIIHIGFPNLLKKKGAIEELEKDLQKEVNSVNQRLNIGIEKVKEPYRQPNILAEYIAFQLKNRVSFRKAMKKAIELTKKTDIKGVKVKIAGRLAGKEIARAECIKKGRLPLQTIRAKIDYCCYPIRTIYGVLGVKIWIFVDEE

SEQ ID NO: 176021 - protein, 621 aa, Oryza sativa
  Clone ID: PAT_MRT4530_7380C.1.pep
MELEFDRNKERFGFLKWASTAFHKMQVFPPGSGIVHQVNLEYLARVVFNADGIMYPDSVVGTDSHTTMINSLGVAGWGVGGIEAIVAMLGQPMDMVLPGVVGFKLSGMLRDGVTATDLVLTITQMLRKHGVVGKFVEFYGVGVGELSLPARATIANMSPEYGASMGFFPVDHYNYLRKISSFHTRLIKQHNLAITCTYDITRCMHNKKVSMIEAYLRANNMFVEHHEPHTERVYSSYLELNLIDVEPCISGPKRPHDRVPLKEMKSDWHACLDSRVGFKGFAVPRECQDKVVKFDFQGQPAEIKHGSVVLAAICSSTNTSNPSVIVGAGLVAKKACELGLEGLPFRFRSKNRSSPVYRKQVKPWVKTSFTHGSAVTREYLKHSHLQDYLNQQGFHLAAFGCATCVGNSGDLDESVSAAITENDIVSVAVLSANRNFEGRVHPLTRANYLASPPLVVAYALAGTVDIDFEKEPIGHGKDGNEVYLRDIWPTNEEIEQVVKSSVLPHMFTQTYESIKRCNRRWNELRVPGEAAALYPWDPSSTYIRKPPYLEGMAMSPPSRPRSVRDAYCLLNLGDSVTTDHISYSGSITPGSAAAEYLRAAGVADRERLGSYGGRRGNDEVV

SEQ ID NO: 176022 - protein, 1363 aa, Oryza sativa
  Clone ID: PAT_MRT4530_73810C.1.pep
MEEEIKGRVVVLGADAAADPELEAFHLPSADQPPHSHLLHHHHSPQSHPQPDAPAAAAPPPPAPLTPPPPKSPPPPPHIQTTDLPPPKPLPPAPLRQLFSFADGLDYVLMTLGTLGALVHGCSLPVFLRFFADLVDSFGSHAAHPDTMLRLVVKYAFYFLVVGAAIWASSWAEISCWMWTGERQSTRMRIRYLHAALHQDVSFFDTDVRTSDVIHAINADAVVVQDAISEKLGNLIHYLATFVSGFVVGFTAAWQLALVTLAVVPLIAVIGGLSAAALAKLSSRSQDALSDASGIAEQALAQIRIVQSFVGEERVMRAYSAALAVAQRIGYRSGFAKGIGLGGTYFTVFCCYALLLWYGGHLVRRAHTNGGLAIATMFSVMIGGLALGQSAPSMAAFAKARVAAAKIFRMMEHKPSMEREGGVELEAVTGRVELRDVEFSYPSRPDVGILRGLSLSVPAGKTIALVGSSGSGKSTVVSLIERFYEPNAGTILLDGHDLRDLNLRWLRRQIGLVSQEPALFATTIRENLLLGRDGATQEELEEAARVANAHSFIVKLPDAYNTQARPGGNQWVAFERCSELVQVGERGLQLSGGQKQRIAIARAMLRNPAILLLDEATSALDSESEKLVQEALDRFMIGRTTLVIAHRLSTIRKADLVAVLQGGAISEVGTHDELMARGDGTYARLIRMQEQAHEAALVAARRSSARPSSARNSVSSPIITRNSSYGRSPYSRRLSDADFITGLGLGVDSKQQQQQHYFRVQASSFWRLAKMNSPEWGYALVASLGSMVCGSFSAIFAYVLSAVLSVYYAPDAAYMDRQIAKYCYLLIGMSSAALLFNTVQHLFWDTVGENLTKRVRERMLAAVLRNEIAWFDMEDNSSARIAARLALDAQNVRSAIGDRISIIVQNSALMLVACTAGFVLQWRLALVLLAVFPLVVAATVLQKMFLKGFSGDLERAHARATQIAGEAVANVRTVAAFGSEAKIVGLFEANLAGPLRRCFWKGQIAGSGYGVAQFLLYASYALGLWYAAWLVKHGVSDFSKTIRVFMVLMVSANGAAETLTLAPDFVKGGRAMQAVFEAMDRRTEIEPDDVDAAAVPERPRGEVELKHVDFAYPSRPEVQVFRDLSLRARAGRTLALVGASGCGKSSVLALVQRFYEPNSGRVLLDGRDLRKFNLRSLRRAMALVPQEPFLFAATIHDNIAYGREGATEAEVVEAATAANAHKFISALPEGYGTLVGERGVQLSGGQRQRIAIARALVKQAPILLLDEATSALDAESERSVQEALASSSGSGRTTIVVAHRLATVRNAHTIAVIDDGKVAEQGSHSHLLNHHPDGCYARMLQLQRLSHSHVAPGPSSSTTTHGT

SEQ ID NO: 176023 - protein, 230 aa, Oryza sativa
  unsure (1)..(230): unsure at all Xaa locations
  Clone ID: PAT_MRT4530_73811C.1.pep
HRFRPFFCPIVFFRPSFNTSLFVHHCAXDKCPSWFNVEDFALTASFDKLLQWPFSSMWFSFSLXALGASLPLVGFFVPRRASGLLLPRRXYGLFFLQRAGFAVCVPCSAPVAPWAXLSSPVGAPVAAPPVFCAFAGALRFLPFPRPGVSFSAPRVCLSLPVPRVSPLAALLGFLRWFRGPEEVGLRFWRSRAAVLVFSPVLLRLCGFLVFRARRCLPLACWGRSCCVVPS

SEQ ID NO: 176024 - protein, 457 aa, Oryza sativa
  Clone ID: PAT_MRT4530_73812C.1.pep
MRTPALLPRGVEAVVVTSGHLRRLDPHVHAPLLLANTLISAFSRASLPRLALPLLRHLLLSSPLLPLRPDAFTFPPLLRAAQGPGTAAQLHACALRLGLLRGDAFASGALVHAYLRFGRVRDAYRAFDEMRHRDVPAWNAMLSGLCRNARAAEAVGLFGRMVMEGVAGDAVTVSSVLPMCVLLGDRALALAMHLYAVKHGLDDELFVCNAMIDVYGKLGMLEEVRKVFDGMSSRDLVTWNSIISGHEQGGQVASAVEMFCGMRDSGVSPDVLTLLSLASAIAQCGDICGGRSVHCYMVRRGWDVGDIIAGNAIVDMYAKLSKIEAAQRMFDSMPVRDAVSWNTLITGYMQNGLASEAIHVYDHMQKHEGLKPIQGTFVSVLPAYSHLGALQQGTRMHALSIKTGLNLDAPGTPSYLALEFMDMVQRHSVSSRKCSRKESVLIMSHLFHYWLLVVMLA

SEQ ID NO: 176025 - protein, 565 aa, Oryza sativa
  unsure (1)..(565): unsure at all Xaa locations
  Clone ID: PAT_MRT4530_73813C.1.pep
MPSLQLQEAAAVDEAVSSMMSLLGAAMSSEKKGSAAAAAEQRVEWLRSQLIGKDAEFDTPFGRRLLTYADHTASGRSLRYIEDYLLNEVLPFYGNTHTEDSHVGSKSTRLVHKAARYVKRCMGGGAGDALLFCGAGTTAAIRRLQESLAEVVEVGVDGDGLVDVAAXRRALASPRYADRPMLGSFSACSNVTGIAVDTRELARVLHQHGAFACFDFAASGPYVKIDMKSGEVDGYDAVFLSPHKFVGGPGTPGILLMNKSLYRLNSQPPSMCGGGTVAYVNGFNEEDTLYYDDIEEREDAGTPPIVQKIRASLAFWVKEYIGYETMELHERVYSEMAMKRLLDNLNIKVLGNTTVDRLPIFSFLIYPPVEDSLFLRRLPLHGRFVTKLLNDLFGIQARGGCACAGPYGHILLDVNNELSVRIRSAILEGYSGLKPGWTRLSFAYYLSKEEFKFILSAIEFIAAYGHRFLPLYKFDWITGNWTFREQAIKYHVLREELSLATSVQYAENIKSRIAKNLDKKPEPNHMRFETYLENARKIARSLPNINQQIVSIPKGVDPDMVLFHI

SEQ ID NO: 176026 - protein, 62 aa, Oryza sativa
  unsure (1)..(62): unsure at all Xaa locations
  Clone ID: PAT_MRT4530_73814C.1.pep
QVQLCKLVPDEQSSSEPKVDYVKPVIEKVHHDQLKKKSFFFFFFFFFFFFFFFFFFFFFFFX

SEQ ID NO: 176027 - protein, 85 aa, Oryza sativa
  Clone ID: PAT_MRT4530_73815C.1.pep
TPAWLLHGGKPMDVKAANLNLAPYLIAFRRVRAFDPHRQHTRSKPWGKLTFLRMAHCCGLRYLAVHFAHAKHADVYANHGDSGGM

SEQ ID NO: 176028 - protein, 277 aa, Oryza sativa
  Clone ID: PAT_MRT4530_73816C.1.pep
MAASAPQPHVPFTDEDLESEESMWSLYQRWRGAVHTSSLDMDVAETESRFEAFKANARYVSEFNKKEGMTYKLGLNKFADMTLEEFVAKYTGTKVDAAAMARAPQAEEELELAGDVAASWDWRQHGAVTPAREQGTCESCWAFSAVGAVEGANAIATGKLVTLSEQQVLDCSGAGDCIGGGSYFPVLHGYAVKQGISPAGSYPPYEAKDRACRRNTPAVPVVKMDGAVDVTASEAALKRSVYRAPVAVSIEATQSLQLYKEMNVLCCFVRKNGWKMP

SEQ ID NO: 176029 - protein, 91 aa, Oryza sativa
  Clone ID: PAT_MRT4530_73818C.1.pep
QQGGGSSQGPTELVNQGLVLWKEIRKDWPAKTRQIPGRKQIREPILGWNAAYKSLLGSNKGVHQPIPQHERGDFLGDIGEQEGGDDKPKGF

SEQ ID NO: 176030 - protein, 83 aa, Oryza sativa
  unsure (1)..(83): unsure at all Xaa locations
  Clone ID: PAT_MRT4530_73819C.1.pep
ATLPIRRRGYRVPEGVRXRRRGSXRVRVWDILGLGLRARRHGECSWRHQVVPAGLELIDPGTKQIYFAYVRTYVYASYTGSDR

SEQ ID NO: 176031 - protein, 759 aa, Oryza sativa
  Clone ID: PAT_MRT4530_7381C.1.pep
MPSSESDRDDIFFDAFDDVTSTREPSLSDDCSTSDEGLASRRFEYDIWGNEPMSVEERRQRFLKGMGFDEFLATRVDFSQPQGEITTVGPFADLGLEESTTSDISSVNSSVPENESVSDASCCIGDIDSGERYTVQNDGYGELTSMLKDVASHKVVSLLEFDGVPGLSQSVQKLLRKVYSSSMEEKKNVFNKKKGVKSLWKSFMKNRSFGGICKHDVNVKNCTIGIPSRTKVQHRKKKTMEFSAVHLGQEIQAHKGLIKVMKFSPSGWYLATGGEDCIVRIWQIMEVEASSKLHGGDNPQNYDDKITIIKTELGRGKNHALAVVPKKGFRISETPLHEFQGHTDDILDMAWSESDVYLLTSSKDKMVRLWKVGCDGCLGLFKHKDYVTCVQFNPIDERYFISGSIDGKVRVWDALDKRVVDWTDTRKIITALSYQPDGKGFIVGTTSGECRFYDQSGENIQLDKELFMQGKKSAVHRVNSLQSRSSDSSRITITSTGSKIRVADGVDIIQKFEGPWNLKALSSPSLTSDGRYLISAGLDSNVYIWNFDIPSVADHKGEAKSVRSCEKFFSKDVTTAVPWPGLHQERQQVKNSSSLTEESVSSPILHRHGERRSPAARCFADGMDGPPTMSEAKLPLAKAADAPRLSDFFSTISPSLNTVIVTASRDEKARNGTFVVVIAETPKWMIKGSYFWELDKYQPSAAICEYGCVRLPFFQLRLRLQHFKITAAYNDFELPQPQRLQQPYLPNRAYVICSCANRT

SEQ ID NO: 176032 - protein, 278 aa, Oryza sativa
  Clone ID: PAT_MRT4530_73820C.1.pep
MALPVPDDALADILRRLPPRSLAAARCVCKPWRDLVDGRALLLPRLLPHSVHGVLINYIDHDRPHLFSRRRSRSRSRSSSSPAASSGGGDIDGNLSSVPPKGDMDWWHVMDHCDGLLLCAVEWGNRLCVCNPATRRWATLPRCPESPKPIRYGTGGAYLAFDPAAASPPHYEEVEPPPPPSPPASSMGDADLYRLMEWPPSPYKVYVFSSRSGRWEERAFVREGGETAAATTTVDDMEPWEPSPRVHRYSVSWQGALYVHSRGTSVTRFSLSNDKYQV

SEQ ID NO: 176033 - protein, 218 aa, Oryza sativa
  Clone ID: PAT_MRT4530_73821C.1.pep
MGSDASSAVDTRGVLRAAVPLQPDTDLVLATGGGERGYIESYTNWSHHGEIPSKQVPNQVTVRDEVVSRDEDFMVVAEEEEEEEEEEEEEEEEEEEEEEEEEEEEEEPADDDVVSDDGQHSTVDDVDDGNISVHDGNFDLEEMLCHAELELVAGSAHGLENFEALRKTMKDLLYDEAKGCDKYFTLLRMMLELMRLKARNGWSRRYVGVDCHVGSTSQ

SEQ ID NO: 176034 - protein, 161 aa, Oryza sativa
  Clone ID: PAT_MRT4530_73822C.1.pep
MRLHRVLYGSTRIRWHHRAHTSLSQASKPMHLATSRYRSLLVAIAAPPRRHAPAHPPRTYTQSSRARILSRRVASRKRFGDLGRQRRVAWCYYLVNLHHVVTWRRPRENGRFARWISSWSLPRSTNYQPGRPGRWSEVDAAAPLPPRVAVAANSRDRACGF

SEQ ID NO: 176035 - protein, 123 aa, Oryza sativa
  Clone ID: PAT_MRT4530_73823C.1.pep
GETAVVRWPSGGALPSARSGGGDPAAEGDTVAVAHNHGEIPSKQVPNQVTVRDEVVSRDEDFMVVAEEEEEEEEEEEEEEEEEEEEEEEEEEEEEEPADDDVVSDDGQHSTVDDVDDGNISVH

SEQ ID NO: 176036 - protein, 72 aa, Oryza sativa
  Clone ID: PAT_MRT4530_73824C.1.pep
MSKLREKPLLFPVPQQLGRNGVLPGNHGRVFDLGYWSSHWIRISGDLSSPLTRNRLSLCIRLLPNGIIVLSY

SEQ ID NO: 176037 - protein, 295 aa, Oryza sativa
  unsure (1)..(295): unsure at all Xaa locations
  Clone ID: PAT_MRT4530_73825C.1.pep
MAITKCCVLLLVPLVAVLVAADQLRVDYYSETCPNVEAIGCDASVLLSSAGGNTAERDAKPNKSLRGFGSVERVKARLETACPGTVSCADVLALMARDAVVLADQQLAAASADRAAKHSLLNLVVDFVCRGHGDRXGVVSRCCCSSCLSPRALRPRRLTSSASTTTARRARTSRPSSATRWRRSSAPPPXRRPAPPPPFRRLLRPGMPSEMDPGSYKTFDTSYYRHVAKRRGLFSSDASLLTDATTRGYVQRIATGKFDAEFFRDFGESMTKMGNVQVLTGEEGEIRKKCYVINS

SEQ ID NO: 176038 - protein, 310 aa, Oryza sativa
  Clone ID: PAT_MRT4530_73826C.1.pep
MESGGVIAEAGWSSLDMSSQAEESEMMAQLLGTCFPSNGEDDHHQELPWSVDTPSAYYLHCNGGSSSAYSSTTSSNSASGSFTLIAPRSEYEGYYVSDSNEAALGISIQEQGAAQFMDAILNRNGDPGFDDLADSSVNLLDSIGASNKRKIQEQGRLDDQTKSRKSAKKAGSKRGKKAAQCEGEDGSIAVTNRQSLSCCTSENDSIGSQESPVAAKSNGKAQSGHRSATDPQSLYARKRRERINERLKILQNLVPNGTKVDISTMLEEAMHYVKFLQLQIKLLSSDEMWMYAPIAYNGMNIGIDLNLSQH

SEQ ID NO: 176039 - protein, 220 aa, Oryza sativa
  Clone ID: PAT_MRT4530_73827C.1.pep
GKLVAVGVVDILPKCLSSKYLFWDPDFAFLSLGKYTALKEIDWVKTTQEHCPNLQYYYLGYYIHSCNKMRYKAAYRPSELLCPVRFEWVCYDSAKRLLDKSLYSVLSDFAQIQDEMPQPQNSHLDTELSKNDNCESPIDEDDEDLSYDDSDMMVDEEMVRSESDFENVMMDLNGSRVKYKDLLGVVGRIERRHLEQLERQLSKYVKVVGKELSDRMVYSL

SEQ ID NO: 176040 - protein, 81 aa, Oryza sativa
  unsure (1)..(81): unsure at all Xaa locations
  Clone ID: PAT_MRT4530_73828C.1.pep
QPVRTTCWSVRAITHILGGIYRELGAPQMSGNPMXHEVFRAARRGDLERAARRALPAVHAYQWTITTPRRMGGCLLLPARS

SEQ ID NO: 176041 - protein, 658 aa, Oryza sativa
  Clone ID: PAT_MRT4530_73829C.1.pep
MASHLRSPLVLLLLLALHRLCAPWLVVADDGASVARSAFSMDGDVAWVVQVSDLHISAYHPDRADDLASILGPALRAIRPHLLLVTGDITDAKNRRKTTSRQDEREWITYKKAIDAIVGIGGIDKSRIFDIRANLFGHPTDKRIDAVNSELQYWSNHSNVPITKVVFGHYPMSFTTSSQKGQRYESIFAKQSISAYLCGHLHAKISKQLWRFHEMSATTQEQKSSYWEWELGDWKESRLMRILAIDGGAISFIDHTLKQAFQTSILITYPTDSRSMNTLESMNWSTRNDINVLVFSNQVIRNVSARVFDSHNEFKIVEEIPLQLVATPSVHKPLFHAEWNAENYKSPSPTRYWLQVFAQDSQGGKTSSERRPFSVEGKVQIQSRPCLNYLIFEVQWEDMYQVLLWSNFAFIIVLLFAPKLLYHFMKKSLTYQRWTVSVMLSPIQPRKAYFWLVWFLMEGARSRPIWFSLLIYVIWLIEMPWFWGHATSEKGEIAQMYLSGWSIPSLGEDLTWNKSSNPDVLVITLPFLYLVVVPVVVVIYSLFAEKAVACLRHSRRTENTVNPTNSNPESGYLLPSASVSLANLSDKKILSMVMKFCGGWTRRVLLLLCCIIAVIHLKLSSRLMSAYGAKPVAFSPPVTWMPLLLLSATAYCTMPNTY

SEQ ID NO: 176042 - protein, 74 aa, Oryza sativa
  unsure (1)..(74): unsure at all Xaa locations
  Clone ID: PAT_MRT4530_7382C.1.pep
NTPVLGYGXGDPMTLGSSRMNQRESIMRALHDAVSFSKLSSFCNLMVPIGPPSLSRSGGLCLNSTILVYFFILF

SEQ ID NO: 176043 - protein, 132 aa, Oryza sativa
  Clone ID: PAT_MRT4530_73830C.1.pep
LLPTMAMRYLAGKLRAPAPAAAALRRPRSLSANASQGGRSNATTENVARNMDGDLGWVREEIAKLEKLRLEIEETTRYNRLHKRCLIGSVFAGFGLGGLACAWYTRSYRKALKEHFDNPIVWMPPYSTSSPE

SEQ ID NO: 176044 - protein, 262 aa, Oryza sativa
  unsure (1)..(262): unsure at all Xaa locations
  Clone ID: PAT_MRT4530_73831C.1.pep
HGSSSAIKPRALVVVMHGLNEHSGRYDHLARRLNDIGVKVYGMDGSSHGAGDGLHGYVQSLDHAVSDLXAMLDPEVDSCVEGIFLTSPAVRVQPAHPIIKVMAPVFALIAPRYQFTASHRNGPPVSRDPEALKAKYSDQLVFTGSIRVRTGYEILRLTSYLQQHLHRITVPMLVMHGADDMVTDPQGSQKLYEEASSSDKSLNLYNGLLHDLLIEPEKEKIMDNIDEHPGLPMVMTRSLIICRAEEGERCCKPAMLLASRRW

SEQ ID NO: 176045 - protein, 98 aa, Oryza sativa
  Clone ID: PAT_MRT4530_73832C.1.pep
MALNHLYCLILIIHSSQRDGSMEDFFAPSGKQSTHTRRQGKCYEQDANQHAGLQQTGGSVHIPDKKHRGKLTSASRAQLLRVTTTGRGWTCTLIYRLR

SEQ ID NO: 176046 - protein, 206 aa, Oryza sativa
  Clone ID: PAT_MRT4530_73833C.1.pep
MSVLNVKALVPVVLDLGAVNYTKWCVLFLITLGKYALNDHILSDTSFPDRASWARMDRVVLTWLYGTIAADLLESFHNFFQGDLSANDYYRRLKAMADTQSELGNPVTDRQLVLAMLQGVNPKYENLRTILPLQRPLPSFIEARSQLILAEINKSSNRSTNSTALLASTGSGNRNGTGGKNPAHATGYSNPNQSQGGSGNSQGGGN

SEQ ID NO: 176047 - protein, 101 aa, Oryza sativa
  Clone ID: PAT_MRT4530_73834C.1.pep
MKQHICKTRKQNNKHPRQAIRVARTGVWTYNRKMKGRAYKHVRGDTSIRRNNLTQTRHHNMRPADFDWVVALDDGASDPELLTIHIFGVNLTQVTTSCHAS

SEQ ID NO: 176048 - protein, 197 aa, Oryza sativa
  Clone ID: PAT_MRT4530_73835C.1.pep
SRVFFFFFWVGKILHSYFLFTHESELKQVVAAATSQIYTAWLAISSRGYASSSTTLLFTNASMTSRLARGRAMGDVTDDQLGAKWSRRRKTVVSDMAPPHAPTSPSSFLLLVSTPRAAPAPATPFFSSASSPLCRRRRWSVLTMACHFPCSAAESSPSHSPPAACSPPDAVAVAEDMVDLMRIKLREKSQMLPGALV

SEQ ID NO: 176049 - protein, 100 aa, Oryza sativa
  unsure (1)..(100): unsure at all Xaa locations
  Clone ID: PAT_MRT4530_73836C.1.pep
MELLPEWSNAESKPVDMGCDNGRDGXLSDKCGARMTKPPATSSGVTWTVEDVLAAAAGDELXCGAWIVEDLLNMEDMAAGDELXHEAXWMLEDAATDDDL

SEQ ID NO: 176050 - protein, 84 aa, Oryza sativa
  Clone ID: PAT_MRT4530_73837C.1.pep
MPRWASARFLGYDIDLSHAGSDDLRALRRGAGDGVHDAPAARRAWAQLYCSRVGSTGPSRDNMFRFPERLLTGSKALFPSNVTG

SEQ ID NO: 176051 - protein, 78 aa, Oryza sativa
  Clone ID: PAT_MRT4530_73838C.1.pep
FFFFLRKKGWSFQFRNGLGYSAMNRRNKRAGVFLTKNQGAKKGPKTGGTGRPTQVTDKRDKTRRSTRDAGPWTTPKPE

SEQ ID NO: 176052 - protein, 182 aa, Oryza sativa
  Clone ID: PAT_MRT4530_73839C.1.pep
MEEERSVRLVTFSPSASKSALGDDSDARGEKEVEALGDGNSGGLGGGGGRRWQMRWHPGLPVVRRRRQPIPGGGELDDEQIGRLVHHLEWPSMGASPPPWIWWKPSPFTSPLRRLLIPSTRFSGGDGVLIRWLDLLHAAEAPPHPSHRVHRGLGIPLPSANILGPRDESERGSATMRLLRVP

SEQ ID NO: 176053 - protein, 49 aa, Oryza sativa
  Clone ID: PAT_MRT4530_7383C.1.pep
LLCAANADDLSCIISAWSDEAKASNGEAHLLPELRSSRGGCRPTAVRAS

SEQ ID NO: 176054 - protein, 46 aa, Oryza sativa
  Clone ID: PAT_MRT4530_73840C.1.pep
RDAIGARFPPRSVGRSHPHPSRSKPPGQPARARPVQWRLATCPLPP

SEQ ID NO: 176055 - protein, 56 aa, Oryza sativa
  Clone ID: PAT_MRT4530_73841C.1.pep
VGSLYVCGTVNEVYQPCKCSHEQLKHYNLQECVIKGRMDEWQQEIASFLVQCGQFR

SEQ ID NO: 176056 - protein, 688 aa, Oryza sativa
  Clone ID: PAT_MRT4530_73842C.1.pep
MAEETKVLLSLPRLERLIARGMWGEAIGYACRFLPRRPPSLPAQRTHLTAEAQTLLLFLHMHRCFADVVAGNETGAAWSDKHRRRYCLARVTGISSHAIAIRRIIQTFVLSDKIRESMDWGRVREKVVRVVRRLVHDTPELAGFLDLPGGMVKPHNVLPIGFGFRSKRHVRQQRRPRAYTIAQLYLEMKRCVPSSGQPDQGLSLDSSLRAGCESSEHHQWRYPLRSSEKKGVHDSIVLQTKFGNMTSPEKNYGFSSLTNAGTYMHSSQEDCHTENYCQGFIPRKHQREELAPEEDIDPKRQHTTLTFGEASLLRCAPERAPTGLRRVHYNLLQTRRKLQPVAAACNPFAVRSIHQTPTPSSGALPGLPLRHRRLLAFGMNKRTCLVFHACDVSDLVDLVETTYRPVAEGGCATSGGSPRRSSRAPIEAMTRPRSIGRFIDQLMVRRLVHAHPRRRPPELLQSSTLTAASSSLATSSRQPRTWWTLPDGQGSSTVRYGWYDNIYGVAIARRSGLVLGGDLARRVRRLDASRASPGPGRGGAQSRAGRRRRGRWRRSASERVKQWATRSASRRTESKTPAESMAPRASSPPAPGGGARARLSLEGRRERAPAAANAGQMWNAAWNDDAVASAPERGRRASLFAQDRRPPRVSLQSSPRPAAIARLVPNFRRFPPSSPIPAAIAHIDDDDE

SEQ ID NO: 176057 - protein, 635 aa, Oryza sativa
  Clone ID: PAT_MRT4530_73843C.1.pep
MAEETKVLLSLPRLERLIARGMWGEAIGYACRFLPRRPPSLPAQRTHLTAEAQTLLLFLHMHRCFADVVAGNETGAAWSDKHRRRYCLARVTGISSHAIAIRRIIQTFVLSDKIRESMDWGRVREKVVRVVRRLVHDTPELAGFLDLPGGMVKPHNVLPIGFGFRSKRHVRQQRRPRAYTIAQLYLEMKRCVPSSGQPDQGLSLDSSLRAGCESSEHHQWRYPLRSSEKKGAPVAAITQTMFSTIKTDSENSGTASATKKGVLDSIVLQTKFGNMTSPEKNYGFSSLTNAGTYMHSSQEDCHTENYCQGFIPRKHQREELAPEEDIDPKRQHTTLTFGEASLLRCAPERAPTGLRRVHYNLLQTRRKLQPVAAACNPFAVRSIHQTPTPSSGALPGLPLRHRRLLAFGMNKRTCLVFHACDVSDLVDLVETTYRPVAEGGCATSGGSPRRSSRAPIEAMTRPRSIGRFIDQLMVRRLVHAHPRRRPPELLQSSTLTAASSSLATSSRQPRTWWTLPDGQGSSTVRYGWYDNIYGVAIARRSGLVLGGDLARRVRRLDASRASPGPGRGGTQSRVGRRRQGRWRRSASEWVNQWVTRSASRRTESKTPTESMAPRACVAAGPGGRRQGAVEPRGPP

SEQ ID NO: 176058 - protein, 144 aa, Oryza sativa
  unsure (1)..(144): unsure at all Xaa locations
  Clone ID: PAT_MRT4530_73844C.1.pep
SHFYGLSGSKLDEEDFYYLEELHXLVKLQLYDAYNGXELSFQATSFPKLRILKIWGAPHLSLIKIERGAMSSMVDLKLLLCPELKLLPRGXEHVTTLEEMTLDSTARGACGHGLGRRMRPRISHVKRVYVGFIRNGELAAERIQ

SEQ ID NO: 176059 - protein, 86 aa, Oryza sativa
  unsure (1)..(86): unsure at all Xaa locations
  Clone ID: PAT_MRT4530_73845C.1.pep
MVGCEHMVSMVVLMTIKDRFTSFGCETLTVPTTSQSGQRLDTLYNKAHCGAPDXEVAEISPWGSLGSPCLVXKGVIMIQERCTALS

SEQ ID NO: 176060 - protein, 140 aa, Oryza sativa
  Clone ID: PAT_MRT4530_73846C.1.pep
MELIRVAKVGQPQDRQLGGGRRWAAARKAAAGAVGCERRQARLEARKPAFVEPPPLGHGDGEDDHRRWHESFLPLSELAGSDDEPRLVHSYTKVVSSFAARLTDGKLDVVSKKHPDRRMRASSITAAAVSTIPSYLRHRD

SEQ ID NO: 176061 - protein, 338 aa, Oryza sativa
  Clone ID: PAT_MRT4530_73847C.1.pep
MGFAERAVAAAGAAVVSAVLVNPLDVAKTRLQAQAAGVVYNPIWSDFRCYPWCNPGMNGLGPSCSSECFQYRGTMDVFYKVTKQEGVFRLWRGTAASLALAVPTVGIYLPSYDLLRNWIEEYSDHSFPKLRPYAPLIAGSVARSLACITCSPIELARTRMQAFKVSNVGGKPPGMWKTLLGVLALRQSINHPENIRSYHLLWTGLGAQLARDVPFSAICWTVLEPTRRHLIRIVGEQSNAAVILGANFSAGFIAGVISAGATCPLDVAKTRRQIEASLTLDDHMHTRRILHEVWSKEGISGIFRGAGPRMARAGPSVGIVVSSYEVVKHIMHRKHAEL

SEQ ID NO: 176062 - protein, 354 aa, Oryza sativa
  Clone ID: PAT_MRT4530_73848C.1.pep
MLCQQAVPIHRGRRSARRRWPLAVRRPPSPAARLLPESSSTTAGALDLLRYGRNFRRASPPPRPPQRSFWEIGDRLHIVFRVHASKLLNGINVTNWLVNSAEPSSAQVLREPDVSFSVGLLSNTASKEPITAHTSSSSSPLTVQHDDTETSTPSQCCLWSSPGSSILVRRPRGWYFVFYIRMDPGGCFHMYPDVGCGPYQSLSEVDDAINQHLHDLRIPEMGEELDRLPLMEKMIRQAMYWPDGKRKRCKSAGYFEKDKCHLIQALVEKNNGYVGMKHPNNDAYSGGHLDGYLPFGVNSYARNNDEELSVKDEEDMLRRMYKGLDKPGGFKRPIPKFATRIVWKTEEEAGVEAG

SEQ ID NO: 176063 - protein, 35 aa, Oryza sativa
  Clone ID: PAT_MRT4530_73849C.1.pep
LFNIYKYILSNSELYIIGKLMNFDEFRFKFHSNRS

SEQ ID NO: 176064 - protein, 289 aa, Oryza sativa
  unsure (1)..(289): unsure at all Xaa locations
  Clone ID: PAT_MRT4530_7384C.1.pep
LARHPGLRRVWCTRRTPTFWRRAPASAPPLDADTHAALHAQAVAMLNVKALIPVTLDLATGNYARCRGLFLVVLGKYALTDHVLYDAPLPNHADWAQMDCVVLGWRTISHDLLQEVMSPTATTRSIWHDLEFQILENCELRAINLSTEFHGFTQGDISIFEYCRRLNTMADNLADLGEPQSDRMLINGLSTKYXMQFLLPMQHPFPSFIQARSQRGPWSSSARRASAAPSPTATPSPHAWAGPSQWDPQALASSFSTSTLMPLTTPEWYTDSGASTHNHLRPAFCCFHH

SEQ ID NO: 176065 - protein, 50 aa, Oryza sativa
  unsure (1)..(50): unsure at all Xaa locations
  Clone ID: PAT_MRT4530_73850C.1.pep
PKTSVLNFFGNXGKSKGGXWTPGXKFXPIFXPEXFGSRGVLNXLAQKNFS

SEQ ID NO: 176066 - protein, 199 aa, Oryza sativa
  Clone ID: PAT_MRT4530_73851C.1.pep
MGPTHINIRLFSLVVARDRTAVRGLRRPPRPPPPSALSPAAASAAAVRAIARHDRRRHSRRCRPRPPPSSASPAAVCSVTGHGHAVARRPRRRPPRPPPPSALSPAAATAAVRAIAGRGLSYRSLRRHPPRPSLPSVSSLTATSAVVREPRRRPRPHRRPPRPPLQSASSPATTAAASTSSAEERAEDGRKGEEEERGE

SEQ ID NO: 176067 - protein, 79 aa, Oryza sativa
  unsure (1)..(79): unsure at all Xaa locations
  Clone ID: PAT_MRT4530_73852C.1.pep
VDSPPSATCCRTFCRAVLVLASASSSKGGWVLDLRGLESRGDLLVGSALSPEEEEEEXXGFLLRSGGRVVCGFSPWWEL

SEQ ID NO: 176068 - protein, 374 aa, Oryza sativa
  unsure (1)..(374): unsure at all Xaa locations
  Clone ID: PAT_MRT4530_73853C.1.pep
WARALWADQTRCVSCLPSPGRAPSSTSSSPSSSSPRSPRPPSAPCFSRASSANRALCPARPXAGRGAAGAAVADDPFAQMTLVVSXPSRSSSPRPCSSCHCSSPGTSSRSPSPESPSSWAPAPRASAACFFRMRTVEPAPAPPLPRPPRSAVSSRPFRCPSPPSASSSLPLGASRSASSTRHRSASLLRSPPCPSSASPLPPWSAPRSSSSASARRNMRPRRRTLPRRRPRNAPTRWWWWSSPARPPPELDGSPLAARTPPEPASSIRPPTSIPAAASSTAAGSEGEGRGLKKLRTSPASSSSPPWCRLWQAASSARRPGEEGVGRGRRASTGEGRTAPEAPTPVAGLLRTAAAEAPTPAAAVTASPTTLATGD

SEQ ID NO: 176069 - protein, 203 aa, Oryza sativa
  Clone ID: PAT_MRT4530_73854C.1.pep
MALTNHILAPAAAAACCFGRRVPLPPPHQLAVRRKQKSVVVAMADLLGDFGARDPFPEEIESNFGERVLGNVDTLHNILIPTLSVLSIARLPLEPNPAPVDAADARRLLHKVVGWRLLDDADGMRLQCVWKVRDEACGHELVARINAAVDGAPATVVFEAPNQVRAELQTPSAGGLTVNDFIVAARIDKVKTVDLIPKKRVWA

SEQ ID NO: 176070 - protein, 650 aa, Oryza sativa
  Clone ID: PAT_MRT4530_73855C.1.pep
MPAVCPCEDISPGTLLASLATLSADVADGCDVDRLPALRGGVGVAVRVAGLLREFLEEVRWAAAAELPGGSVLGMSELHVALQKMRFLLEDCGRKGARMWVLMNAEAVASELRVVLGSVATAMDVLPAGVVAASDDAREFAALVSQQAWRAAVRPDEEDSRAARSVRSMLARFRSGATPDAEDARLVLGRVGVASWWDCSQEVSFLEAEMLERLEAGGENDNDLVLISGLLTFLLYCRVVLFDRIDYGKADEPAPAPAPRAASYLARINPEGLQCPITLELMTDPVTLATGQTYDRASIKRWVKSGCRTCPVTGEKLRSADVVPNVAVRGIVEQLLLSSGVSLHEPSSKHRCAVDKTASPFGAAAAGGARLAVAFLVSKLCRGTPEEQKKATYECRKLSKRNVFHRACLVDAGAVPWLLHLLSSPDASVQDNAVAGLLNLSKHPAGRRALVEAGGLGLIVDAVSVAAKVEAQQNAAAILFYLSSDAGYCDEISRIPEAIPTLVRLVREGAYRGRKNALVSLYGVLQRGAGGHGRAVSAGAVAALASLLPGDRDDLANDAVALLARLAEQPAGAAAVLSSSALVTRLVDFLGASASRSAKDHCAALLASLCRHGGDAVVALLGKTPGLMPSLYALIADGGAQGSKKARWRR

SEQ ID NO: 176071 - protein, 100 aa, Oryza sativa
  unsure (1)..(100): unsure at all Xaa locations
  Clone ID: PAT_MRT4530_73856C.1.pep
GASRIIGIDLNXNRFEEARKFGXTEFVNXXXHDKXVXAGTXXXXXNXGXLTXKRLHCXXQHQTAMIQXFEXXSXXSWXXCXXWSAXHTRXPEXKSXPXNX

SEQ ID NO: 176072 - protein, 109 aa, Oryza sativa
  Clone ID: PAT_MRT4530_73857C.1.pep
MARAPFSCYTYPPVPSPSPSTSQGEGCQHQIWRYLGPPRARFGVSIDNRRGVADIVLLVDVVRRAGFKADTCGIMVDTHKFQTWDQLCHLSHYWYCGLLLAPRACSSAS

SEQ ID NO: 176073 - protein, 437 aa, Oryza sativa
  unsure (1)..(437): unsure at all Xaa locations
  Clone ID: PAT_MRT4530_73858C.1.pep
MWVPHVSLSFPSPPLPSPPQLSSFLSNFLLGWAAQPAGWGGGRWGKRESGGDDAAMGDEVAAAGDEATMLDKGDALHSSPRLRLLAPRVSSTPPPSAESADRGLSELVVRLHRSGFLPKNLLSSCSLTVVSLDSCALPHRDHTAVLPDWGRKGGGEIGEEEKEKWVPAVLLGHVQPSRAAGRPAARDREVGGGVGEEDREAGELWHELDKVNHLHLAVLGEQPTETDVRRVHVGRDAAEVAHPALAEAVEPLQCPFPRLLLAFASETFLLPSHLLLRXYSLSLLHAIMAPWEPTSHVPLLVSIAGGEVSLSSSSAAAAAVWCNGNSGVSQTSPTPSPVGLGGESEAAGCRRFPSPASSPRHPPPPHRQPSPPDSRLPHRPPPHPTGCAVQLRKKVRKEEERGREVERGGEEEADMWDRPTLSQLSRKAKPESNPPRD

SEQ ID NO: 176074 - protein, 79 aa, Oryza sativa
  unsure (1)..(79): unsure at all Xaa locations
  Clone ID: PAT_MRT4530_73859C.1.pep
LEIVREIVVAFVFGCLVVVVVPFLPXGPAAARDAVAQIRDGLLQAVQPPAAAAAASVAAVGLPLPLPVASVCEGITEEQ

SEQ ID NO: 176075 - protein, 66 aa, Oryza sativa
  Clone ID: PAT_MRT4530_7385C.1.pep
MTDELIHERRHRRWEVGDKGCPHGQKNHGLIDPDAMLSETSDIRQADKGGSEKRTSESTTIKQQVL

SEQ ID NO: 176076 - protein, 130 aa, Oryza sativa
  unsure (1)..(130): unsure at all Xaa locations
  Clone ID: PAT_MRT4530_73860C.1.pep
MSPVSALKCSCMDAYSTVTTSMHEIARCIRPELTTDPTPPNMMPTQDMGRSTVMFIXQPMSALRKQLSMQLQRMMPKRHWDTRYQMMPSMLQVICAGLVRHQMMRNMAMQMPYMCNMARXNLQLSYCGCC

SEQ ID NO: 176077 - protein, 115 aa, Oryza sativa
  unsure (1)..(115): unsure at all Xaa locations
  Clone ID: PAT_MRT4530_73861C.1.pep
STAVAAALEVVXXPGCRNCGXXSSVKERVQMARARCRQXILXALSXDLTXAPXGARXVILIPXLISXXXPXXSCXWSSXXSCMYTWVXVAFXIKRXIHXSXEXMXXXXTXTSYAA

SEQ ID NO: 176078 - protein, 117 aa, Oryza sativa
  Clone ID: PAT_MRT4530_73862C.1.pep
MADLDKVGGGVAGQGSRGALCWTEHMSAFMLRKMVELIARGTQVYNHLCKCRSRWVRIARLKDLSGALWDDQNNMIVLEEEHYMGHTKDKSKGVEFLNVLVENYTPMSIIFGGTQAT

SEQ ID NO: 176079 - protein, 112 aa, Oryza sativa
  Clone ID: PAT_MRT4530_73863C.1.pep
MASGRYMAYSPSPSTTPHSPRIPGLRAASSAVADQEKYLAELLAERHKLSPFIPVLPNSVRLLNQEILRVSTLLENASLLNQSGLEHGSPLTTGGLYSNGAAADMNGWTSAF

SEQ ID NO: 176080 - protein, 247 aa, Oryza sativa
  Clone ID: PAT_MRT4530_73864C.1.pep
MSSPVRRVGSDLSSGIYSAAASHGHQQQTTSDNGHGSANDDDDDDDVAKAKQRLSSLLFSGVGTWRRSVDGSGGDSKRQVKGNSSRGGGGGLDIAQLVKKYASMVERLFFASSLSNNRRRGGGDQSGRRTELRRRRHSFIISGLRRGAAAAAAAPSKRHEGSWLFSAPASLRGSPVASGHLSVKVSTSSEESTMEELHSAVQAAIAHCKNSIAAAAPSSRPAAAAAATTPTGVNADAVVACTSSRAS

SEQ ID NO: 176081 - protein, 341 aa, Oryza sativa
  Clone ID: PAT_MRT4530_73865C.1.pep
MGGRASAAAAVAAFGRRAARLRSWQIRPVPAWILRAVRFPPRFFLWRESDVGFKEFLASDLIPPRRDLPFVVAPLHFDCVEQVGCSIQRLLRYLAELLAERHKLSPFIPVLPNSVRLLNQEILRVSTLLENASLLNQSGLEHGSPLTTGGLYSNGAAADMNGWTSAFQSEGSPAYSWRGGSQGSSSGLIVKKTMKVDIPVDKYPTFNFVGRILGPRGNSLKRVEATTDCRVLIRGRGSIKDPAREDMMRGKPGYEHLNEPLHILVEAELPVEIIDTRLIQARDILEDLLKPVDESQDFFKKQQLRELAMLNGTLREEGMQRSGSASPFHNSLGMKRAKTRG

SEQ ID NO: 176082 - protein, 356 aa, Oryza sativa
  Clone ID: PAT_MRT4530_73866C.1.pep
MASRTSATAGMLLLAAAAALVCSSAAARMPPLAKGLSLGYYDASCPQAEAVVFEFLQDAIAKDVGLAAALIRLHFHDCFVQGCDASILLDSTPTEKSEKLAPPNKTLRKSAFDAIDDLRDLLDRECGDTVVSCSDIVTLAARDSVLLAGGPWYDVPLGRHDGSSFASEDAVLSALPSPDSNVTTLLEALGKLKLDAHDLVALSGAHTVGIAHCTSFDKRLFPQVDPTMDKWFAGHLKVTCPVLNTNDTTVNDIRTPNTFDNKYYVDLQNRQGLFTSDQGLFFNATTKPIVTKFAVDQSAFFDQYVYSVVKMGMIEVLTGSQGQIRKRCSVSNAAAAGDRAWSVVETVAEAAESLVL

SEQ ID NO: 176083 - protein, 595 aa, Oryza sativa
  Clone ID: PAT_MRT4530_73867C.1.pep
MVESASMVNENSENPYWKAIGYRVEEPRRDRAESMPSPSPSPVSRRPLDNGVVETRALTDTTLLRSLAAKGLAVRPGASDEHHTVRCDAVIVGSGCGGGVAAAVLASAGYKVVVVEKGDYFTKEDYSSIEGPSMERLFERGGVFCTSNVTTMIFTGATVGGGSAVNWSASIRTPAGVMQEWSREHGLAVFASPGYARAMDAVCERLGVTDACREEGFQNKVVRRGCDALGLRADAVPRNSSEGHFCGSCNFGCPTGDKKGTDTTWLVDAVERGAVILTGCKAEHFIVESNGGGGGRSKRCVGLVATCMSNGITKKLRVEAKVSISASGALMTPPLLRNSGLKNRHIGRNLHLHPVSMAWGYFPDNTPEPHIPGKCYEGGIITSMHRVTERTIIETPALGPGAFAALVPWESGRDMKERMRRYARTAHAFALVRDRGAGSVDGEGRVRYAPSRDDAEELRAGLRRALRILVAAGAAEVGTHRSDGARLRCKGARDADVEAFLDEVTVEKGPMHSTTDKWSVLCSAHQMGSCRMGASPRDGAVDVAGESWEAEGLYVCDGSLLPTAVGVNPMITIQSIAYCVAKGIADSMAHGKEQR

SEQ ID NO: 176084 - protein, 50 aa, Oryza sativa
  Clone ID: PAT_MRT4530_73868C.1.pep
LALCRSMSNKRTAKAAWLASSYLATHYSRLAEKRGASFWLFSSCYPQPSC

SEQ ID NO: 176085 - protein, 42 aa, Oryza sativa
  Clone ID: PAT_MRT4530_73869C.1.pep
CGFGSGEVGVGGGVTDQAESRSLAGAVRIPVLANNGGTVGVL

SEQ ID NO: 176086 - protein, 145 aa, Oryza sativa
  Clone ID: PAT_MRT4530_7386C.1.pep
METIEPRVQIPWSWCQIHRCSSSMFKARLPYVQLPLELLEEPVASPELKLAQRHERRPEMATPGRPRIELKEPSSTTIHLLTIERRSTYMVHRPSASSIIFAKSLRQAAATSSLHHTFLIADTLHLAATSSSYICQCRHCRRLSY

SEQ ID NO: 176087 - protein, 168 aa, Oryza sativa
  Clone ID: PAT_MRT4530_73870C.1.pep
MGGRCVGAAVKCGEGAAGGAEEGVGDSGWRCALPDLAARPSLAAPRQAFGRRRRQRRTRWVAMRDMKAAAGSNVSAGTALSVVALAAAADWIHIADCRPVDRFPLPSRPSLPPASRAPRHPHEVRKAVVSEALPLECPPLSLPRPSPPSVVRPSAPQSAARPSTPPGV

SEQ ID NO: 176088 - protein, 69 aa, Oryza sativa
  Clone ID: PAT_MRT4530_73871C.1.pep
SSVLNTVRSLIELSDSILYFPLMLMWELSDFVLILASYVSVRICKCDTFYAYCSFTKVYPMPSIDYLHW

SEQ ID NO: 176089 - protein, 63 aa, Oryza sativa
  Clone ID: PAT_MRT4530_73872C.1.pep
RDRNSRIYPPVLTKKKNRMPTGAIIVRGSTSIFTLAVKGRSLDIQAPRRVALHASAVDYSCNI

SEQ ID NO: 176090 - protein, 85 aa, Oryza sativa
  Clone ID: PAT_MRT4530_73873C.1.pep
AKQLQVRNNQLQQSAAGLLRAVSAVLPPGLLEGRRRGGESLVEVALSIKKHPVVAGLGFLPPTIDLPLHLHAPPLEPHDPLAEIP

SEQ ID NO: 176091 - protein, 136 aa, Oryza sativa
  Clone ID: PAT_MRT4530_73874C.1.pep
HLSNPWWTQTHTHTEGLRHAHTGMSHHTGGTLDLLMRKPGGCIDNTEIEGPGLNTCRGCPSCWSHSSSQGPPTQIQLLWQPPERAPYWVHQLGQGWQPGWGGGITSQAVVPGDRSHRCIGSNRCCVREMATSGGTG

SEQ ID NO: 176092 - protein, 40 aa, Oryza sativa
  Clone ID: PAT_MRT4530_73875C.1.pep
MTSSLTNDTHEECGRGRQPSAVITSGLPWTSHKSSENIPR

SEQ ID NO: 176093 - protein, 102 aa, Oryza sativa
  unsure (1)..(102): unsure at all Xaa locations
  Clone ID: PAT_MRT4530_73876C.1.pep
MDFSGGGVMLSEMYQSTWRRLLSACDDVASVGANLVFLSRFRCRRITNGKGNPADEXPLLAKPPLLSEVAMPRRGRLRNGVGLVKSVCFMAASLVLLMLVDL

SEQ ID NO: 176094 - protein, 71 aa, Oryza sativa
  Clone ID: PAT_MRT4530_73877C.1.pep
PMPYVAKVFFIQCDLCVFFSIRPVSHFVQVVVQEDGVFSSDRFCVNLVCISMSRILILVECVGSWDLSYFA

SEQ ID NO: 176095 - protein, 134 aa, Oryza sativa
  Clone ID: PAT_MRT4530_73878C.1.pep
GRQRRGRRHARRGGAGRGARRRRDGGSMWARRTRARGQGDDSDGRRTTARVGLEGRWRRPEEVGDGVGDGERGADALAAPRHVLLEQQLRGAVAGCLRLTDFRARAVAPAAPLRATVVLRRARHCSRTTLPSDL

SEQ ID NO: 176096 - protein, 609 aa, Oryza sativa
  Clone ID: PAT_MRT4530_73879C.1.pep
SAAPGRAPAAALPPPPPRRRVPPAAAAAAAAASCDLARGPVGGRRPPAMASASEDNGGSERCCGSYSPSAEVSESETSGDCSAPTTTTTTRRFASSSSRGVASSSSSSLLPTPPPSSAAAFFLSAKPAADLSEVDMMKERFAKLLLGEDMSGSGKGVCTALAISNAITNLFATVFGELWRLEPVASVRKAMWTWEMDWLLSVADSIVELTPSIQELPDGGGQFEVMVPRPRSDLYMNLPALKKLDAMLLAMIDGFKETEFWYVDRGIVVDDSGGPFSSSSSSCGRPSVRQEEKWWLPCPRVPPKGLSEDARRKLQQDRDCANQILKAAMAINSDVLAEMEIPEVYLESLPKSGKSCLGEIIYRYITAEQFSPECLLDCLDLSSEHHTLEVANRIEAAIHVWRLKGQKKSTPQAKSKKSWGGKVKGLVGDTEKSHVLSQRADGLLQSLRLRYPGLPQTSLDMNKIQYNKDVGQSILESYSRVLESLAFNIIARIDDVIYVDDATKKSAAADSVSIFNRGIGVPVQKRISPSPFSIQHTPYASPFATPTFCSSTPVTGSPGRVQPPLNKDNLPTKQEVKVEKLFSGDIEKVWTYAGNLSARKDAGDAPERD

SEQ ID NO: 176097 - protein, 157 aa, Oryza sativa
  Clone ID: PAT_MRT4530_7387C.1.pep
MFMHLRHLKCEVYVLTSAPNTCKGVVQLAHYLEFTPLLEVLEWHMYYYKKYKCRVRKTKVAREDYRLSRHDHLKTVYMSGFRCYRPQEELVYFILENAVALEFMSIEPHTILADDDHCDFSDIAEDKKIRKWARRTSACFGKQVQVKKKKLAQYFTM

SEQ ID NO: 176098 - protein, 412 aa, Oryza sativa
  Clone ID: PAT_MRT4530_73880C.1.pep
MDSSSWIHGYTNANATGANSGFMCGYAASPVEFPQQQQLISMQMGMDDESAVYDGASMVGDLLMASSSAHHAGAGSFQYSSSTTSSSASFRSASVSCNPESSAAAAPELPAATGGAFSRYARHLRPRRPPKPGACGQRMFKTAMSVLANMHVAATYRRQYYYQQAAAAAAAEAAPAPPSDNQLQHMISERKRREKLNDSFVALKAVLPTGSKKDKASILIRAREHIKSLESKLSELEEKNRELEARLASRPAAKNDKGETAAAEAGDETKREDLVEIEVTTTSGGSGAAAAAATGGDQETCCTLNVDLRGGGGGGMSTTDVVLRTLQCLREQIGDGASLVAMSTSAGSGGRPPSANLTLQLKSPTYGRCSYKYEFTLFLVNRQKPTIKHIRYGSRKISMSLSMDDVTMISPR

SEQ ID NO: 176099 - protein, 82 aa, Oryza sativa
  Clone ID: PAT_MRT4530_73881C.1.pep
MDEVVMMNISEANVGYTGCGSAVEICRQMKATRAGVRAQSWPACPGIPVVGRVGSVLLFTARMGEGLCHVFYDGFHLQGNAE

SEQ ID NO: 176100 - protein, 1449 aa, Oryza sativa
  Clone ID: PAT_MRT4530_73882C.1.pep
MATPSSSSPPVPPIRSVNLGGWLVTEGWILPSLFDDIPNNDFLDGTKLQFKSVVHNTYLCAEHGGGDIVVADRTAASGWETFKLWRVDENTFNLKAIDDSAVHFVGVDGNGVVVATAATPGPSETFVIVRSDRDNSRIRIRASNGKFLQAKTTVSVTADHGEGTSWGDDDPSVFAINRGEKLQGEYQLCNGYGMKKATEVLREHWSTYILENDFKFISSNGLNAVRIPVGWWIASDPNPPAPFVGGSLEALDNAFRWAEKYNLGVIVDLHAAPGSQNPWEHSGSRDGSQTWGTTDETIIQTVQVIDFLASRSAKGPSLLAVELLNEPLAPKVSAGMLKKYYQDAYNAVRKYTSDAYVIMSNPINADYSNEILQFAGGFFGAVFDVHYYNMFNGSFDNTTAEWNIQFVRNDRSAELRSVTKQNGPLTYVGEWVAEWKVNNASEEDYKRFAQAQLDVYSQATFGWAYWSFKHVQNHWSLEWMIKNGYISLNQPKLPIRAVNLGGWLVTEGWIKPSLFDGISNKDLLDGTQLQFKSVTNNMYLAAENGGGSAIVANREKASGWETFKLWRINETTFNLRVFNNQFVSIGGNGAVIATATVPGPNETFQIIRLDSDKSRMRIRAPNGKFLQVKAMGSVTADHGASTNWGNDDPSVFVVNNIYGLQGEYQICNGYSAGNATEVLREHWNTFIVEDDFKFISSNGLNAVRIPVGWWIASDPNPPAPFVGGSLQALDNAFKWAEKYNIGIIVDLHAAPGSQNRLDHSASRDGSLEWGTSAANIAQTVGVIDFLASRYAKSSSLLAIELLNEPLAPDVPVDTLTKYYQDAYNAVRKYTLQAYVILSTRMSGDPTEFLSVASSLFGAVIDVHYYNLYNSMFDNYTVEQNINFVRNNRSSDINTVTKQNVPLTFVGEWVAEWYVDNASKEDYQNFAQAQLDLYGKATFGWSYWTFKNVKNHWSMEWMIKNGYISLNNLPPSSPPIRSVNLGGWLVTEGWILPSLFDGIPTRPLLDGTTLHIKSVIQDKYLAAEQGGGQTIVANRVVASDWESFTLWRVDETTFNLRVFKKQFMGIDSNGTVIATATTPGLSETFQIVRSDTDKNRVRIRAPNGSFLQAKTANSVTADYGESTNWGNDDPSVFIVDMVGGPQGEYQICNGYGAEKASQVLREHWSTYIVESDFEFISSSGLNAVRIPVGWWIASDPNPPAPFVGGSLQALDNAFKWAENYNIGVIVDLHAAPGSQNHWEHSATRDGSLEWGTTDTSITQTVQIIDFLASRYANSPSLLAIELLNEPWGPDVPLEKLKKYYEDAYNVVRKYTAKAYVIMSNRLAGESNTELLDFASRFPGVVIDVHYYNLFNDDTFKNLNVEQNIEFVKNSRKAEFSNITKQKSPLTFVGEWAAEWKVNGASKEEYQRFAQAQLDVYGRATFGWAYWNFKNVNNHWSLEWMIKNGYISLKI

SEQ ID NO: 176101 - protein, 160 aa, Oryza sativa
  unsure (1)..(160): unsure at all Xaa locations
  Clone ID: PAT_MRT4530_73883C.1.pep
IGKPPTPSPPPDPSTGRSSDPLGRRHRRQIHPRPSPTPPPPPEGXEKRGGGGSRRCQIRPRLPPRPTDPPADATDTVIAVDAAVGTAPPDLEGGEGAIAERDGRPSRSIGRGRGEGTAXPPSPPRPPSPRRAGETGGIGGEGAAPPDGRGEGRGSATAGR

SEQ ID NO: 176102 - protein, 273 aa, Oryza sativa
  Clone ID: PAT_MRT4530_73884C.1.pep
KYHTVFVPGIPFAYGAGRLENRAQLETDIDEVAPTHVFNAAGVTGRPNVDWCETHRTETIRANVCGTLTLADVCRARGLVLINYATGCIFEYDAGHQLGTGIGFKEEDTPNFVGSFYSKTKAMVEELLKNYENVCTLRVRMPISSDLSNPRNFITKIARYDKVVDIPNSMTILDELLPISIEMAKRNLTGIWNFTNPGVVSHNEILEMYRDYIDPNFSWKNFTLEEQAKVIVAPRSNNELDCTKLKAEFPELLSIKDSLVRYVFKPNQKTSKA

SEQ ID NO: 176103 - protein, 100 aa, Oryza sativa
  Clone ID: PAT_MRT4530_73885C.1.pep
QKYADSKGTSYTKSLANGQTAHHAGQTALFAGQTAPAIAGQTVPYLRKIVPPMAGITASLTTSQTGPLAGQTRCLAGQTGLCIAGQTSTLEPLPEFCPMT

SEQ ID NO: 176104 - protein, 149 aa, Oryza sativa
  Clone ID: PAT_MRT4530_73886C.1.pep
NSALFDPEKRDTYVICVSLESVLRSAVTHHSSPAGAREEEPADGDPKTPEATREEAAAVVEKAPADGEPDSPAAARRRQRRGRASVGHARGGGGVGGAAAAVGGGARRSGGRVQGGSERLREAATGLRWRSNSSTRLHAGRPARRRRRH

SEQ ID NO: 176105 - protein, 43 aa, Oryza sativa
  Clone ID: PAT_MRT4530_73887C.1.pep
PKGPPKGPPKGPKCAGLIKFISCKTVLPVIDQTPKTGPLFNWK

SEQ ID NO: 176106 - protein, 103 aa, Oryza sativa
  unsure (1)..(103): unsure at all Xaa locations
  Clone ID: PAT_MRT4530_73888C.1.pep
KAAYLREQDSQQEIGKNRCPEPRNRRXQSPRIHQELVKNQELSHDRXGGNAAISRIQSRLGGRWQRRHNPPVXRRGSAARWCATGGRSRDGRRSYIRGDAHAA

SEQ ID NO: 176107 - protein, 595 aa, Oryza sativa
  Clone ID: PAT_MRT4530_73889C.1.pep
MAAPGPGWVVPPPPQPQPQQQQQAVVVDGRDGLVAWLRGEFAAANAIIDLLLAHARDAADPAGFDAVAAAVQRRRHHWAPVLHLQHYFPVTEVALALHHAAARQGPPPPPPPPRPPSGSAGAEGDDAAIASGGVKEVETSAEATQNSQLVSHISHATEAQPQKGLHVISNVVPVPTCFVVNEVIDGRMVNVLEGLKLYKGYVDLTEIGKVLSFVNEAKTMRRKPGLEGQTVVVAKRPMKGHGREIIQLGLPITEGPPEDEHLREVKVDPIPGVLQNLFDSLVHQKVVPSSPDYCVIDIFNEGDYSHPHHHPPWYGRPICTLCLTDCDMVFGHVIAADSRGDHAGPLKLSLSTGSVLVFEGKSADIAKRALPATSKQRILLSFGKSVSRKHVQSESSLLITPPLTPPPMPWAAPLRPGNIAIHPSSPKQLVYNPSNRVPAVSTPGLHHIPSNGIQTVFVAPLPITPKAVPFASAVTLPNSTAAWIAEAAPRPASPRLPLQGTGVFLPPGSGNPPPAQKLGVKHADAKPFFPQESSASSSGVSARAHKANGSVSSKPTRKDDMAEAKPKCNGSSDGGSSVAHAKATGGLEEQNVVAK

SEQ ID NO: 176108 - protein, 239 aa, Oryza sativa
  unsure (1)..(239): unsure at all Xaa locations
  Clone ID: PAT_MRT4530_7388C.1.pep
MVCAPYVGRRTRRHRRSGRFPWLGALACLMKCRAGQCCCLLDLLHYHSLTQAADQRYNANNLAGNLMTKQIYDALLTGGETSPNWTFIWKSKAPMKVQIFAWFLSRERLSTKQNIFKKNIVSSAVFAICESSAETASHLCIQCPFATTFWNKIGLHPTIXDVKMLHLLKPGQGLPRKHFQLFYLLCFWXFRNQTPSLSRCLRKCVDEAGLWAERLKSSDRPVVSTWKELFCTPLQTLST

SEQ ID NO: 176109 - protein, 59 aa, Oryza sativa
  Clone ID: PAT_MRT4530_73890C.1.pep
FRTDEKPSPLYTVSLYQLDLCITRPNAPTSHVPVIFIKSRPTMYDMIEEKKSRAASAAQ

SEQ ID NO: 176110 - protein, 58 aa, Oryza sativa
  Clone ID: PAT_MRT4530_73891C.1.pep
DSSEDDRGERRSKHTVYSHDDCHDTHDTASRVGMHNSYSKDGMHSVDTINGVCDCIGS

SEQ ID NO: 176111 - protein, 470 aa, Oryza sativa
  Clone ID: PAT_MRT4530_73892C.1.pep
MATNLHLLLELGFRFNPSPEEVVTYYLPRLIAGHPPKDTESCIHRANVYGAEPRELAAQFAPVARSSNGDRFFLTECKRIKGKVSRVAGGGSWVSQTSKDIKNREGIKVGEAKNFRFKKDGTNTDWLMEEYHLCLRQASDLEPVLCRVYVSPRAAKDSAAHQESAALTPQEPAPPLAHAPAPAPIQEPAALPRQELAPAPPRLEAVITQQQATMKMGGSVPASKATRQSCVTASAPPPRRVAPQPAPPSLRTAPAAVAPPRQVPVITQQQAPPLKRPAPPVPSPPCAKKIRGPVSASPAARQSCVAASAPPPWCVPPPPRPAPPSRRVMAPLPPYPMDPFETPPSPHAPRHDPFEPPPSPDPPIQSYAIDPPIQSYAMDPFEQPPSPYAPHGVDDMDEFTRSLEAQLEEADGDEIAAATVAPPMAQNVAPDDDMDEFTRSLEAQLEEADGDDKIDDDEIDEEIFQIPLKD

SEQ ID NO: 176112 - protein, 162 aa, Oryza sativa
  unsure (1)..(162): unsure at all Xaa locations
  Clone ID: PAT_MRT4530_73893C.1.pep
NRELGVLNAAFAEAAGGPEPRRDEEQHRRXREDGDLRKHLNGRRXIGEIETRTTVITITPLLIARTVLRTDNTVIALPRGEKETTAEGIPPTKIEIVGPIMIDTITTTIKIRRIIAEDRRGTVTTDEIKTPNLLTRVEIEDAIITREAELLIQGTHHPRLRH

SEQ ID NO: 176113 - protein, 48 aa, Oryza sativa
  Clone ID: PAT_MRT4530_73894C.1.pep
GGLRRQPNDNPETKLKILTRTTPQEGIDYRRQALKPRNPRGRGGPPLS

SEQ ID NO: 176114 - protein, 80 aa, Oryza sativa
  Clone ID: PAT_MRT4530_73895C.1.pep
MMRWVEGSEEDSAVCEIMSFKSVDRTDTKFSVLGWLSLSALIFHMEGEIQPPEGSSLVLGLSMFRSPPEWEELSAGHRFS

SEQ ID NO: 176115 - protein, 63 aa, Oryza sativa
  unsure (1)..(63): unsure at all Xaa locations
  Clone ID: PAT_MRT4530_73896C.1.pep
GLVWELKILSSSWLLVYFFILQLQLLIAESTRNSSNQSHXXSVVWFYGPGFCCRRTGQGXSAE

SEQ ID NO: 176116 - protein, 305 aa, Oryza sativa
  unsure (1)..(305): unsure at all Xaa locations
  Clone ID: PAT_MRT4530_73897C.1.pep
GGVQGIESHRQHTHHSLRSRSTRSQVAGRSRRIHRQRSHPRSNVPQYSTHPVREYPSPTVARQVGGLGAQGSTSMTSGLPNNSPIASVNQGVSTSTPLVWTQVGSIIFPVYTITPISAGPIIIGNERGTATAKRNDAPPTIPPTQVENGTSTVPTPGRNPQAAEFHLPCERSKPTRITTLKPRTWCPVHKTTKHTLEDYPVILHVQAELYACWERGIQRTSPTGTTYCPIHRFKAHDLTNCRIFLRTLNPAHHRVQQPXVHTPCVAKEPDAAPVLDRFVGFVGANEPSVFHLLEGYGCSRISMDL

SEQ ID NO: 176117 - protein, 614 aa, Oryza sativa
  Clone ID: PAT_MRT4530_73898C.1.pep
MTSGLPDNSPIASIDQGAFTSTPLVWTQVGSIVFPVYTVTPISTGPIIIGSERGTTTTERNDAPPTIPPTQVENGTSTALTPGRNPQEAEFHLPCERSKPTRITALKPRTWCPMHKTTKHALEDCPEPDAAPVPDRFVGFVGANEPSVLHLLEGYESSSQSPRDVNVVDNNETSASAAARTPAHQLRNLDEILRESPFDPATNPGASQWAERLRETVTNLNAAFAEAAGGPEPRRDEEQPTEDADGEDLVGRRTSGDRSPRRRRDPTPPRREDGDLRKHLNGRRLNRRDRNENDRHHHHSPSHREDCTPHRQHRHRSPSWRERDDSRGNTPNKDRDRRPHNDRHDNDNNQDQENNRRRQERDGDNRRDQNSQSPHPSRDRGRDHHSRSRAPDPRNPSSSSSSSSSDRPPRRRRDHGPHPNPGNGRKAFTPTFRNVRWPEKFQPESIEKYDGSIDPEEFLQMTNALANYLPAALKGSARSWFVHLPLNSISSWEDLWQQFVTNFQGTYKCYAIEDDLHTLTQNPGESLRDYIRRFNECGNMIPEITDASVIRAFKSGVRDRYTTQELATRRITSARKLFEIIDRCAHADDALRRKEGKSKVGDEKKMSTDKDAPE

SEQ ID NO: 176118 - protein, 98 aa, Oryza sativa
  Clone ID: PAT_MRT4530_73899C.1.pep
SNREGIRAEQKNRLNLTMLMVQLSCIIRISNSNTIWLSIVRTLYTRSLSPSRYRVELGRHSTRHKLELSWKNSPKVPASAPVLSTLVKNPQAAVEPSC

SEQ ID NO: 176119 - protein, 86 aa, Oryza sativa
  Clone ID: PAT_MRT4530_7389C.1.pep
RSTDQLNTAGKIDSILHLDIQVGLLSILQIHAHLFDIDMGTMGRLHDLPKLYMQTLADNSRGNGNHNTSSRVHSHRLKTKTAGPLY

SEQ ID NO: 176120 - protein, 298 aa, Oryza sativa
  Clone ID: PAT_MRT4530_738C.1.pep
MEWTAAELAEARSVIARVSDAYNSGVGSSSSACDTKHDRIMRELQARFPSRTMVQVIDLYVNLTVETAAQPQDAGSAGDAAAVVHPTFAGGMPVVNNNDGMVHGGAAMEVGAVAVNGGDGEVVNPDNADDDVLWTDYEHRLFLTGMRVYGRGDWRNISRYFVRSKTPEQISMYADNYFHMMEIAAAMEADGGDDDDGHHEINNNNNNLGGGQLHAVVGAVGHGPGAGHIAPATPSNNNTAAAAVNNNVDTPFWVPLLYNPEIEQRMMEMQAQSQKAWDDQQMKMAEAATPKEEGAADK

SEQ ID NO: 176121 - protein, 907 aa, Oryza sativa
  Clone ID: PAT_MRT4530_73900C.1.pep
MAEEIPPTKTETVGPIMTDATTTIEIRRIIADNRRGTKFRPGSIDKYDGSTDPEEFLQVYSIVLYAAGADDNALANYLPVVLKGFARTWFVHLPPNSISSWEDLWQQFVANFQGTNKRHAIEDDLHTLSQNPGESLRDYIRRFNECKNTIPEITDASVIRAFKSGDRDRYTTQELATRRITYARKLFEIIDRCTHADDALRHKEGKSKVGDEKKKSIDKGAQESSKKRSRKSGKRKSSGEVLATEQVESSRRSNPQNEDSCKAWFPIHKTCNHAMEDCYVIKKELTRQLAIERRKRVRVVETAEEAATDNPDSTFLEYDLHVSHIFGGSMSYTSKREYKKAEHEITFDVAEFDTAYNAIIGRTALAKFMAASHYAYEVLKMPGPKGTITIQGNAKLAVQCDKRSLDMVEHTPNPPATTENPKKELALITFLRDNANVFAWQPSDMPGVPREVIEHKLMVRPDAKPVKQKLRRFAPDRKQAIREELDKLLKAGFIREVLYPEWLANPVMVRKANGKWRMCVEFTDLNKEFPKDHFSPPGIDQLLDSTTKKSDSLIDYLRETLDNLRRYQMKLNPEKCTFGVPSGKLLSFLVSGRGVEANPEKIKVIENMKSPTRLKEVQLLTGCMASLSRFVVRIGERGQPFFALLKKQDKFEWNQEAENAFIALKRYLPNPPVLAAPHMNEELFLYIAATPYSVSTVIVVEREKVQHPMYYVSEALRDTKIRYPPIQKLLYVVVMTSRKLRHYFQAHKVTVISSSLGELVRNKDMVGRIAKWVVELSQFDVHFVPRTTIKSQVLADFVADWTIPEDRPATHMDNKTWTMAFYGALNSQGAGAGFILTFPTGDQFKHAIHLNFRATNNMAEYEGLLAGIRTTAALGIKRLVVKGDSELVTNQVHKDYKCSSPELAPNI

SEQ ID NO: 176122 - protein, 106 aa, Oryza sativa
  Clone ID: PAT_MRT4530_73901C.1.pep
KKGHPLQDKSQRFFNWIRPPENDYLLPNSVPGLASINAEGFLAAGKLLIGREPSPWLVTAHLVSGLNSAEAAGGATASPAPAPAPARGRDGVRRRRKRWARANSSK

SEQ ID NO: 176123 - protein, 68 aa, Oryza sativa
  Clone ID: PAT_MRT4530_73902C.1.pep
VLKHHGWPFILINTGPHHSPRPNLTPYILSSLIFCKGTHILTASHKSNHSFINYLNHVDNGYHHGCFP

SEQ ID NO: 176124 - protein, 81 aa, Oryza sativa
  Clone ID: PAT_MRT4530_73903C.1.pep
MASHHAHCRSVCKYVVRCIIHSRYPIGTKFDTCGITADTQVLNLIPGTCEVSSIMAGCEVSRVEARETEEDPCNAPIFVQD

SEQ ID NO: 176125 - protein, 67 aa, Oryza sativa
  unsure (1)..(67): unsure at all Xaa locations
  Clone ID: PAT_MRT4530_73904C.1.pep
MSKEVSEEPEHVLPRDYTDPTSAPLFELRELRMWAFXRALIAELMITLSVLYITVNTVSGYKVHSNV

SEQ ID NO: 176126 - protein, 309 aa, Oryza sativa
  unsure (1)..(309): unsure at all Xaa locations
  Clone ID: PAT_MRT4530_73905C.1.pep
MTSAVTSPPAAARRLGSSGAHARRRTTARRRERRAPTGSGLHDELTGDQSNGGKSTDGDGVEEEAAATFGLTTATVLRRSTATAEGRTRTAVTWRPRWRPPRATATAGATAKHGWTDGDDGGSRLHGARAPRSTATTKKAVGAEEGGGAARVVGVDGGPAVRGLSEGLDGVDGSAAKPEEATPGRETXPASGEGRPEVVGDGGERERRRELDSGRETVRQGRKRAREARGGTGCGGFGGGGGGGAWRGRRGGSGGRKGMTGGPHPSARVVGGPARQRRARRKRLDGPRGRGERGREMGRIRPKRGKRDF

SEQ ID NO: 176127 - protein, 70 aa, Oryza sativa
  Clone ID: PAT_MRT4530_73906C.1.pep
LESVMVGRTTVVVAHRLSTIRGADVIAVLRDGEVVATGRHVELMAKKDGVYASLVELRMSSERAGDSKPS

SEQ ID NO: 176128 - protein, 60 aa, Oryza sativa
  Clone ID: PAT_MRT4530_73907C.1.pep
MADVSLARSLLLAVLCAVLWSAFSIFETLDRHILVNHERLTIDDYVACTERISPILSLEL

SEQ ID NO: 176129 - protein, 161 aa, Oryza sativa
  Clone ID: PAT_MRT4530_73908C.1.pep
RLRNNSGDMAEGSLVVAICQYGGEVTSGPNGNLIYKGGEAHAVDVTREMSLDNFKDEVSKVFHVEVADVSLKYFLPNNNRTLITISCDRDLQRMVDFTASSAQVDVFLISRVENRYFLFYLFVQPFGVTFASLQNLRQSYLRSTDSSRNFAIPWLKPIVFL

SEQ ID NO: 176130 - protein, 486 aa, Oryza sativa
  Clone ID: PAT_MRT4530_73909C.1.pep
MTDVQMSDSEPQAAPPAAPAASALHHLKEIASVIEAGSLSKEVRRISRAVRLTVALRRRLAARDVSAFLAFALPPSSEAYTRLTSLVPKEDDTEMDIDMAAPATQISIKHGLPEIEIYCYLLVLIFLIDQKKYDDAKACANASIARLKNLNRRTVDVLASRLYFYYSYVHELTNSLAEIRGNLLALHRMATLHRDELGQETLLNLLLRNYLHYNLYDQAEKLRSKAPRFEAHSNQQFCRYLFYLGKIRTIQLEYTDAKESLLQAARKAPITARGFRIQCNKWAIIVRLLLGEIPERTVFMQKGMKEALTPYFELTNAVRIGDLELFRAVADKFVSTFSADRTRNLIVRLRHNVIRTGLRNISISYSRISLADIAKKLRLDSDNPVADAESIVAKAIRDGAIDATIDHANGWMVSKETGDVYSTNEPQIAFNSRIAFCLNMHNEAVKAMRFPPNSHKEKESAEKRRERLQQEEELAKHMAEEDDDDF

SEQ ID NO: 176131 - protein, 38 aa, Oryza sativa
  Clone ID: PAT_MRT4530_7390C.1.pep
MAQVQPGFPQTVFAVVTATPRFGRGYRHPTVWPLLATI

SEQ ID NO: 176132 - protein, 180 aa, Oryza sativa
  Clone ID: PAT_MRT4530_73910C.1.pep
MAPAPAVDAEGECGGGKSHNTLKPDGVRVAAASTTLDSSDSHGPAADVQGGGGSGERLDSSDGEGRATDVQGRSSAGESLVVKSEHACAADDPVGDGALLAPANKPTGADPLAVASSSHDIDAASADPANDEEDGDTTECSSSFGNSCCETDDEADHGGSEVDSPFSENADGVQALIRPR

SEQ ID NO: 176133 - protein, 208 aa, Oryza sativa
  Clone ID: PAT_MRT4530_73911C.1.pep
MPAASVGEGERGDRRDIVGGEKAQGMSHKEVATAAVAGGGKAAGAEGSSSAGDSGGAPPPQAPCRGRRLPTTILRSAPSSSSMPPPRATLDLPRPVRPRTFTTSSVASVLDSSRCAGLGSPPMAAPPLSPPLSPLPSARSAASPLASYSARRRYHNPGVQNHGGCPRGAAAGERGSGQWERGQRDGRSGMCALVRRQSSTGCLAPICH

SEQ ID NO: 176134 - protein, 508 aa, Oryza sativa
  unsure (1)..(508): unsure at all Xaa locations
  Clone ID: PAT_MRT4530_73912C.1.pep
MTDVQMSDSEPQAAPPAAPAASALHHLKEIASVIEAGSLSKEVRRISRAVRLTVALRRRLAARDVSAFLAFALPPSSEAYTRLTSLVPKGSGPGSLTLLFHCVYNDIIRREDDTEMDIDMAAPATQISIKHGLPEIEIYCYLLVLIFLIDQKKYDDAKACANASIARLKNLNRRTVDVLASRLYFYYSYVHELTNSLAEIRGNLLALHRMATLHRDELGQETLLNLLLRNYLHYNLYDQAEKLRSKAPRFEAHSNQQFCRYLFYLGKIRTIQLEYTDAKESLLQAARKAPITARGFRIQCNKWAIIVRLLLGEIPERTVFMQKGMKEALTPYFELTNAVRIGDLELFRAVADKFVSTFSADRTRNLIVRLRHNVIRTGLRNISISYSRISLADIAKKLRLDSDNPVADAESIVAKAIRDGAIDATIDHANGWMVSKETGDVYSTNEPQIAFNSRIAFCLNMHNEAVKXAMRFPPNSHKEKESAEKRRERLQQEEELAKHMAEEDDDDF

SEQ ID NO: 176135 - protein, 100 aa, Oryza sativa
  Clone ID: PAT_MRT4530_73913C.1.pep
FFFFFFLEENKRDLAISFFKAHALGFGTERQRWTKANLMCYQLMPNTKIRKKQRNKREGGKTSKAASNGTVAKRASTNSSLALINLFSPNYGFYYLAQPD

SEQ ID NO: 176136 - protein, 121 aa, Oryza sativa
  unsure (1)..(121): unsure at all Xaa locations
  Clone ID: PAT_MRT4530_73914C.1.pep
WHKRFWTLMGYNNVGYLFDPHNARSQIRFVLLXCGIAISWKYSKQTLVATSSNHSEIFALYEASHECVCLCRMMEIGYIESXITKNIAPKLSYPHELXSMETNILQTKSCDNLADLFTKPL

SEQ ID NO: 176137 - protein, 159 aa, Oryza sativa
  Clone ID: PAT_MRT4530_73915C.1.pep
VSSPAAAYPQRNPRHRAGRIDAYGRAVSAGEVLAAHPNHVLSRQCSSQQGAMGRIHIVSPESKLECGEIYFLIPAASVPDAKRRTSTGGAAGHGHHVRSKSEGNAAVADWLGSQCSASPETTRMMRVQKQHHHQHRRRMSTGSHASPWQPHLSCITEDP

SEQ ID NO: 176138 - protein, 56 aa, Oryza sativa
  Clone ID: PAT_MRT4530_73916C.1.pep
TKEKRPSITNEWMIKEVYWGPNQDLLQVYFYLTTSLLVHRRQGIKFYTFWIRIRAS

SEQ ID NO: 176139 - protein, 72 aa, Oryza sativa
  Clone ID: PAT_MRT4530_73917C.1.pep
MSKQDFGNTKRGGNQARKLDGLEEKGFVAEIAWNEIDQCRNKISAILKGGGNQARKVDGLGEKRFYRFGLSR

SEQ ID NO: 176140 - protein, 3161 aa, Oryza sativa
  unsure (1)..(3161): unsure at all Xaa locations
  Clone ID: PAT_MRT4530_73918C.1.pep
MEPEREASSEWXDGVGVLDFRVKASSCEKTAQKAANEPYLLSHFRIYKKTVIKRLMNVVLXQRRRSTFSGGFGALARGIAHCSTXLLDLMLKPGHSRSARASSREMGDXSIFESVVLKLNATSNDLYPISRDLPFPTLNSIIFVXLQAANENGCFEPPFLYKIEADLFCVTDTPDSSLHLLAFLAGRFYPILQITKERDFTKSLISSADSDALKSSLASTPTMLVHLPINLVKLEEAQPRRSRSPSSVQPACFLAFRSETAVLLLRKAHRDRALGIVCLKASKVLQELLEPDPLLDDASDQVLCTDYSSLFGDEFSLSENRFDASILNILDIAAVEEGILHILYAASSQPLLCCKLAEKGSDMWSVLPLVQALLPALRPPLSPGSTEQIDGCLSQWNHPNVHKALSQAKAACVLLDLCRGPLSPWVPMITAKVDLAIELLEDLLGIIQGVGQSLTRSRAALKYIALAISGHMDDVLTEYKVHSFFLLKDVKHKLLFILEMLDPFIDPSVSVMTDAMAFGDVSVVHLEKQASACNISLNIIRTAVKRPAVLPSLELEWRRGAVATSVILSTLDPHMPLPPDIDLCKSSMPEIDQISLIVPNCPPHSCSAEDADGRDTSETTPRADILEQCNSLFAPEELEQSELTKTLEEKKHEKISTDLDQNFPEDTKSNGKLPAGLFQLDNIFATDYYDAHADYLQLVNYQDCELRALEFQRLALNLCTQQEPTVEGHNAGIDAFLLAAECYVNPLFLLDFHSNSESSDEIERIHAELIQGNCFSEAKHLRAKDIDLMKIYNLENKRDKAVLDLLMQAARYDFEYQGKIPDGKPFPDDVEDGKQYIEISPEARHLADAVTLVRKNQAMLCHFIMKQFEKKGHSPNEILLQSLLFLLHSATDLFCPPENVIDIILKSAEDLNGKLVCLYNSVNARNNKLDRIKLHYLRRRWALLQKLVLASSGSDNTRELVSIKRDGFRFKSLVPPSAWIHKISDFSRSFSPLPRFFGWMAVSRYAKEYLNEQLFLASDFSQLTSLLSIFTDELSLMGGVTTQKAKSAKIEQSGCNNYVLLKKEPLLSDQPSMRLFQILLPELHFFFPSMSKKFDAFGQSILEAVGLQLKCLPKSAVHDVLCWFSEMCLWPYLGNIREHLAFANGVNSLKGNIAAKAKAVVFYLLESIVAEHLEVIVPEMPRMVHILVSLCRASYTDVAFLDSVLCLMKPMISHFLRKSTDNGNVSGDITECSDFELLCFEELFETIQFGKQSEDTPGNKNQNIELFGMHVLSERNQSTEFANSASPDDTMDNKKAQASVAQRLVSNLAPSIEGSWKWHLQLASRLSLSIAKCLLYAKCLKSIAEGGYLGGFRQRNGYQYWFLMELKALRTKPRFVTKQTAKIMENEAKLDLLLKKMEETERKREEGEKKQSLEMRVFKEAVESWIPAVEKKVDVLQSTVDMLQTQVAKLSAPPPTNSATPSSSSPSGAAGVRAIDSTGLNGQGAANSTREEADGVFNTPKPPPGNGTLASQNFSPFHCRVDASAMNSFQSGTSVGLTGGVAPMTCPKFDGDNPIMWKVNCESYFDLYGIHPINWVKVATLNFTGNAAFWLQAVRSQLEGVTWEELCDRVCTRFNKDRQQALIRQWFKICQTGTVADYVEKFDSIMHQLMAYDPTFKPVYFVTKFVEGLKHEIRSAILLQRPGDLDAACIHAPSPLLPPIRGLGRIPKISLGCAYXIPFSAELPVTPCAWKTSPVQHGIERCPFXGTSMSLTSFSFSSVNFPVPARGDKGPIFEDGPKFXHGNLEFSMAKMGFVPLSHGSFERSEKPNAESPILNLTPWLAIAAPIILSAVGGFFIRLRGWLQGIEVLMLVDSDSTHSFVDHQLGLKLTGVKSMASPARVKVADGGHLNCSLYVNNCDWLTQGIHFKSNFRLLSLGTYDVILGMDWLEQFSPMKVDWVQKWLEFQFQGSTVRLQDSLLPGSKAVFIRPYRHTPAQKDEIERQVKEMLQNGIIQHSSSPFSSPALLVKKKDGSWRVCIDYRQLNAITKKGTYPMPIIDELLDELAGAKIFSKLDLRAGYHQIRMAEGEEFKTAFQTHSGHYEYKVMSFGLTGAPATFQGAMNDTLRPLLRKCALVFFDDILIYSPDMNSHLDHLKQVLQLLDTHQWKVKLSKCDFAQTQISYLGHIISGQGVSTDPSKIQSIVDWAVPTTLKKLRGFLGLAGYYRKFVKDFGTLSKPLTQLLKKDAPFVWSAEVNQAFQALKHALTSTPVLALPNFQQGFTIETDASDIGIGAVLSQNQHPVAFVSKALGPRTQGLSTYEKECLAIMMAVDHWRPYLQFQEFLIITDHHSLMHLTEQRLHTPWQQKAFTKLSGLQFQIVYRKGKHNAAADALSRHVPEETSEFLGISTCSPVWLQDILHGYDQDPLALSLLTGLAVNPSSYPHYSLSKGLIKHKGKVWVGNNSNIQQQIISALHDSPLGGHSGFPVTYKRIKSLFSWPHMKLTVQKQLASCAVCLQAKPDRSKYPGLLQPLPVPDGAWQIISMDFIEALDVAKVFMLNVYKLHGLPQIIISDRDKIFTSALWEQLFLRSGTKLHLSSAYHPQSDGQTERVNQCLEIFLRCFVHATPAKWSLWLHLAEFWYNSSYHSALNKTPFEVLYGYPPSHFGIRADACVISDLDSWLSERHLMTQLLRQHLNRAQQVMKTQADKKRSFRSFQVGDWVFLKLQPYVQSSVAKRANHKLSFRYFGPYQILSKVGSVAYKLQLPADSMVHPVFHVSQLKGTQNFKHSIQSQLPNITDHIQYPVQILDTRIQKKVEATWEDEEELKQRFPSALPWGQVVKELLTESTAKPVETDFKGIRESILQVLSSLSSVESYFEFFSTRSDQEYQELEEAEIELEIVKNEKARHSFIVHPQDTMIPDMSSYYKDGNEVNKQLQQIQEDIRSLERSKLREEIIARRQKKLLIRHTREKYLEETSSREMELLQELDRERAHEMEREIERQRQLDLERVKSRELQFNLDMEREKQTPRALQRELDQVELGRSSRREFSANTNSRSRERYRERDNGRGQQEGRSRGGGGGVEAGGSATRSFSGNLPTILQQPRERTTSDERTSTGGNYYEENAEGSGDASSVGDPESAVALEAGTRHTPSRGSKSSASTLTSTSRQGVVQRRERREGKWARKHS

SEQ ID NO: 176141 - protein, 95 aa, Oryza sativa
  Clone ID: PAT_MRT4530_73919C.1.pep
LAPPLVSPCRTPLPAAPTPPAPRPSVSPCLSLHLPSPPPPRCTRLRYKRCQPAPPPSVSPRLSPRIPSPPPPWRTLAMPWQFGEHRSRESRRRRQ

SEQ ID NO: 176142 - protein, 155 aa, Oryza sativa
  unsure (1)..(155): unsure at all Xaa locations
  Clone ID: PAT_MRT4530_7391C.1.pep
XTYLMAHWRRXNIAHXPTWYPTCRFFFSYSTFCSASPPSNHLYFFLYIFISFFLSFFFYFFLFFFIPQRDFFFFLPLLKGGPPPPAPPVQLPFSLFPPFFFFFPPIFPSFGGCPFIDIPMFAFFFFKKKKKKKKKKKKKKKKKKKKKKKGRPLAI

SEQ ID NO: 176143 - protein, 114 aa, Oryza sativa
  Clone ID: PAT_MRT4530_73920C.1.pep
EFFDSLQTQPRRSRSPSSVQPACFLAFRSETAVLLLRKAHRDRALGIVCLKASKVLQELLEPDPLLDDASDQVLCTDYSSLFGDEFNLSENCFDASILNILDIAAVEEGILIYY

SEQ ID NO: 176144 - protein, 2066 aa, Oryza sativa
  Clone ID: PAT_MRT4530_73921C.1.pep
MALLTGVTDSMLFLSRVPVALRPPLSPGSTEQIDGCLSQWNHPNVHKALSQAKAACVLLDLCRGPLSPWVPMITAKVDLAIELLEDLLGIIQGVGQSLTRSRAALKYIALAISGHMDDVLTEYKVHSFFLLKDVKHKLLFILEMLDPFIDPSVSVMTDAMAFGDVSVVHLEKQASACNISLNIIRTAVKRPAVLPSLELEWRRGAVATSVILSTLDPHMPLPPDIDLCKSSMPEIDQISLIVPNCPPHSCSAEDADGRDTSETTPREDILEQCNSLFAPEELEQSELTKTLEEKKHEKISTDLDQNFPEDTKSNGKLPAGLFQLDNIFAADYYDAHADYLQLVNYQDCELRALEFQRLALNLCTQQEPTVEGHNAGIDAFLLAAECYVNPLFLLDFHSNSESLDEIERIHAELIQGNCFSEAKHLRAKDIDLMKIYNLENKRDKAVLDLLMQAARYDFEYQGKIPDGKPFPDDVEDGKQYIEISPEARHLADAVTLVRKNQAMLCHFIMKQFERKGHSPNEILLQSLLFLLHSATDLFCPPENVIDIILKSAEDLNGKLVCLYNSVNARNNKLDRVKLHYLRRRWALLQKLVLASSGSDNTRELVSIKRDGFRFKSLVPPSAWIHKISDFSRSSSPLPRFFGWMAVSRYAKEYLNEQLFLASDFSQLTSLLSIFTDELSLMGGVTTQKAKSAKIEQSGCNNYVLLKKEPLLSDQPSMRLFQILLPELHFFFPSMSKKFDAFGQSILEAVGLQLKCLPKSAVHDVLCWFSEMCLWPYLGNIREHLAFANGVNSLKGNIAAKAKAVVFYLLESIVAEHLEVIVPEMPRMVHILVSLCRASYTDVAFLDSVLCLMKPMISHFLRKSTDNGNVSGDITECSDFELLCFEELFETIQFGKQSEDTPGNKNQVPFLIFILGSLFPDLSFKRRIEILGSLLVWVDFGSSDPSSLLCSYLQGFQAFIDGCETILVQNIELFGVHVLSERNQSTEFANSASPDDTMDNKKAQASVAQVQRRSTEYHENGENSKGVDSPHTVCIKEFCGALERLVSNLAPSIEGSWKWHLQLASRLSLSIAKCLLYAKCLKSIAEGGMIYSSIKQEVGTEISTDLSQKHWESALQGLAETILVNQKKQCWQVASVMLDYMIKLPNILAWDNVLNVMSSAMKHLCSHAPRISWRLQTEIWLSILVSYGIEGLKNSENSLIDLFCTLLSHAEPEQRSVALQQLGRIIMSTTKVDSEYTTYKQNSLSSGSTVTSLLVTHTWDRVAALAFYDSSMLLRKHALALLTEYIPFVDRNHLQSFLGSSNSILNGAEQFSYAIEQGYLTRMSLLLLSRACLYSAPEDIALIPECVWRKLENMQTSIPGCFGDMEKDLCRALCQLRSESDAKTVVKELLTESTAKPVETDFKGIRESILQVLSSLSSVESYFEFFSTRSDQEYQELEEAEIELEIVKNEKALHSFIVHPQDTMIPDMSSYYKDGNEVNKQLQQIQEDIRSLERSKLREEIIARRQKKLLIRHTREKYLEETSSREMELLQELDRERAHEMEREIERQRQLDLERVNSRELQFNLDMEREKQTQRELQRELDQVELGRSSRREFSANTNSRSRERYRERDDGRGQQEGRSRGGGVEAGGSATRSFSGNLPTILQQPRERTTSDERTSTGGNYYEENAEGSGDASSVGDPESAAALEAGTRHGPRGGSKSSSSSSRQERRSVCGVHMDPFFRRASSDPLCLEDNSVQHGIERCPFLRNINEPTSFSFSSVNFPVPARGDKGPIFEDGPNFDMAFRVFHGQDGVVPLSHGSFERFEKPMPKPNPEFNPLAAKAATISLSAFGGFFSFGDFSNKRNKKNSNQKKPNNLPQNGGQPNNHEALSNEWLEMGQCPLAKSYRALSGVVPLVAKMMTPPAGMKLRCPPAVVAARAALSRTAFAKGLRPQPLPTKILVMALLGMAANVPLGIWREHTEKFSVQWFAAVHAAVPFIGMLRKSVLMPKTAMALTIAASILGQTIGSRAERIRLKRAAKVAAGSQGDASTRMSLKTGRYTDDVQFWDPLALRVESTIGTGTPVLVPTFH

SEQ ID NO: 176145 - protein, 68 aa, Oryza sativa
  unsure (1)..(68): unsure at all Xaa locations
  Clone ID: PAT_MRT4530_73922C.1.pep
FEEEVLCEERVGXXXTGPERPRMDLLXGXEGXRXXXDGIASLLQPPXQPPPPPPNLALSPQPSPLAAA

SEQ ID NO: 176146 - protein, 60 aa, Oryza sativa
  unsure (1)..(60): unsure at all Xaa locations
  Clone ID: PAT_MRT4530_73923C.1.pep
TPAMVTRGSVVFRNNKKAXREAVFSGCARDSYVHQSGYVFAPTQQRQVLLRFLSSPTQTL

SEQ ID NO: 176147 - protein, 175 aa, Oryza sativa
  Clone ID: PAT_MRT4530_73924C.1.pep
MASQSTKPAQAAAEPSPPAATAAAGEAPPAPNPASAATPAQNPTAAAGAAAGGATDLEKKMRRAERFGTAVVMSEEEKRSSRAERFGTGSSNEKAEEQKRKSRAERFGLASSSADEDAKKKARLERFGQSTNVDKGEEEKRKARALRFAETSSGPSQENGKDSSKPDAATVAGTA

SEQ ID NO: 176148 - protein, 95 aa, Oryza sativa
  unsure (1)..(95): unsure at all Xaa locations
  Clone ID: PAT_MRT4530_73925C.1.pep
AVFLFLEPYKTKGMGLIEKGGRQPNITIGILVSIGALFVTALFRILLGGKKPAASVKPAAQVKKPKSTGSQAAGSNCGXEDQKEEEENDGSFAPR

SEQ ID NO: 176149 - protein, 637 aa, Oryza sativa
  Clone ID: PAT_MRT4530_73926C.1.pep
MGIRKPRGKSAKKLKEFAGLCFTVIMLQGSVICMLSKLLYQNFILSACQHCMYGPCNGPERPDFVGWLKNIQIDAQQNWLFLGDFNFYRSTYDRNKVGADMNDIFIFNEIISSLGLLEIPLKGRRFTWSNMQQNPLLERLDWVFTSASWTLTFPNTTVIPLTRNISDHVPCVVKIDTKIPKSPIFRFENFWVEAEGFFDVVQQVWLLDPGFDDPAKCISFKLKIMRKKLKLWSKNLSRIMLLLNNCNKVIDFLALLEEDRSLSLFEWNFREVVKHQILKLLEYKKIYWKKRCTNRWMLLGEEHTKFFQSIATERYRMNIVSQVSNQSGQIVYLHDQKANLFYHSFKNRMGISCSPTMDFNLTELFVPRTDLECLIDMFYTQEIDNLISIIPADKARGPDGFNGFFMKKCWHIIAQDFYRLVAHFHAESTDLQQSKREIIILKLDFEKAFDTIEHTAILSVMQSMGFPQKWLNWVQMVFSSASTAVLLNGVPGNSFTCKRGVRQGDPLSPLIYVLGAELLQRIVNRAFNLGLISKPINANDGSGFPIIQYADDTLILLKTSQKEIFCFKALLNMFALSTGLKVNYAKSSLYPLNLSEEKTDLIAGLLRCSVGKLPFTYLGLPLGTTRPRVIDFAPPGG

SEQ ID NO: 176150 - protein, 25 aa, Oryza sativa
  Clone ID: PAT_MRT4530_73927C.1.pep
LYMRQVSILLRIRSTFHRARLAKHQ

SEQ ID NO: 176151 - protein, 106 aa, Oryza sativa
  Clone ID: PAT_MRT4530_73928C.1.pep
DQRCWPIYVLHVWVCSDAPRVRQELHQAPLASRDAFGRILGLGIVRQVRFIRLSASTRSRWCQSGCHVSTCSSRAGALQLLLQECMYVCAYVVCVCVPIQDIFSFI

SEQ ID NO: 176152 - protein, 90 aa, Oryza sativa
  unsure (1)..(90): unsure at all Xaa locations
  Clone ID: PAT_MRT4530_73929C.1.pep
XAVXXTHPGAQGAXGXXEGVXAHXHLLHLLFPHPHAAAHHAVVLLLLGRASIPIAMALGGVSMAIIXMALGXXGRRRXXILXGKXXXXXP

SEQ ID NO: 176153 - protein, 262 aa, Oryza sativa
  Clone ID: PAT_MRT4530_7392C.1.pep
MQILRRKLLEASRRLPFYFPSAPTAHYRGHAHAVATLAAVLRDQTAGSLAAAPWAAIQRRGAKMLGSEVKLGNVIQRRVLWITTYPIPLVNLQGRIYQVIKAQHSHQGRGGATIQVELRDVDTGNKITERFRTDEALERVFVEEKSFTYLYQEGDNVTLMEPETFEQLEVSKELFGKTAAYLKDEMKVTLQYFDGRPMSASVPPRVTCTVVEAQPHSKGITAQPQYKRVLLDNGLTVLVPPFVEAGEKIVVSTADDSYMTRA

SEQ ID NO: 176154 - protein, 66 aa, Oryza sativa
  unsure (1)..(66): unsure at all Xaa locations
  Clone ID: PAT_MRT4530_73930C.1.pep
GRXRFRLYSKKKDXVSHRNEGXFSFFALLCYCXXARPSGAVWMVLGQSYKAISAAXRLLLLXATGA

SEQ ID NO: 176155 - protein, 63 aa, Oryza sativa
  Clone ID: PAT_MRT4530_73931C.1.pep
KKKLPEGLAFYKKGPWGGKGKIFFWGNFFKGPFKTGKFLPLFGTFLNPGKGKNQFFKKRGEMV

SEQ ID NO: 176156 - protein, 103 aa, Oryza sativa
  Clone ID: PAT_MRT4530_73932C.1.pep
MTKAKGIQEEDMELEQKDGPAGDNGVIELHDMATVVNLEIEAEAERGRIGLFPIRSGMEDMRVVSKDDHHNGGWSQQSIGRRSSSTKEETSWKSNDNDNREHK

SEQ ID NO: 176157 - protein, 50 aa, Oryza sativa
  Clone ID: PAT_MRT4530_73933C.1.pep
SGYGESCCVESRSGCLMGNGGAGAGGCVGGAPAWLLQLAPGACAHGSSKA

SEQ ID NO: 176158 - protein, 430 aa, Oryza sativa
  Clone ID: PAT_MRT4530_73934C.1.pep
MGASVTTGLQMAAARPCIPACQRLLGSRAALPSFGRALSTQTGFASCRKTASAGPFVSLNHKRFAVRAMSAQGLPIDLRGKRAFIAGVADDNGYGWAIPKRTMGASAATGMQMVAARPCISASQGMLTSRAAVSRIGRALSTTTGFATCPRICYSSPLGSSKRSGVAIRAMSSESGPQGLPIDLRGKRAFIAGVADDNGYGWAIAKALAAAGAEILVGTWVPAQGKKGSAGSSDWSVKALAQSDENDFGSIDIFAHAVANGPHVTKPLLETSRRGYLAALSASSYSFVSLLQHFLPIMNPGGASISLTYIASERAIPGYGGGMSSAKAALESDTKVLAFEAGRKGKIRVNTISAGPLGSRAAKAIGFIEKMIEYSYVNAPLQKELLADEVGNTAAFLVSPLASAITGSTVYVDNGLNTMGLAVDSPTISS

SEQ ID NO: 176159 - protein, 94 aa, Oryza sativa
  Clone ID: PAT_MRT4530_73935C.1.pep
TSRKKKGQAQGGIFKGSIRKGAEKKGKHLWLKPLGKAFVGETFGFCGGAPKKIAFFCPRVLTKLSGPKYCQIKGGLCQGPRKNKGPLFQKKKNP

SEQ ID NO: 176160 - protein, 68 aa, Oryza sativa
  Clone ID: PAT_MRT4530_73936C.1.pep
RRVRRSVVDIPGVKAGAILPYFLEPSCLLPPYAVSIRYHIRWQASQQLVLLAQCISANTLQCCSIQCI

SEQ ID NO: 176161 - protein, 55 aa, Oryza sativa
  Clone ID: PAT_MRT4530_73937C.1.pep
MGRGENRSTVVRSWGHGSAASRLLQPPPLTQVWQAAGQVVDFGERHHGPWIWPLE

SEQ ID NO: 176162 - protein, 93 aa, Oryza sativa
  unsure (1)..(93): unsure at all Xaa locations
  Clone ID: PAT_MRT4530_73938C.1.pep
MRRQAVVELVVVAAALAALAAGILAASLLLLWRCXRRATANTVVASDAELTVQSPKESRRRPGAAARLRQSAAPLLLCPARSPVGAAIARVRG

SEQ ID NO: 176163 - protein, 46 aa, Oryza sativa
  Clone ID: PAT_MRT4530_73939C.1.pep
AALCLLIASLLLHRSICMYTHFIALAVYVYALFFPYLPLACRFHSS

SEQ ID NO: 176164 - protein, 491 aa, Oryza sativa
  Clone ID: PAT_MRT4530_7393C.1.pep
MPFETCHSSCQHRHCRRRGRGEASSGAISMDPCPFVRVLVGNLSLKMPVAPRPAGAGAGVHPSTSPCYCKIRLNKLPYQTADAPLLLPPSPEASAAPAPAPATGALAAAFHLSKADLDRLTAKPSLFGSRTARLKIVVYAGRRGTTCGVGGGSGRLLGKVVIPLDLKGASAKPVVYHSSWICIGKRGRKPSSVSAANAQLNITVRAEPDPRFVFEFDGEPECSPQVLQVQGSMKQPMFTCKFSCRSNSDLRSRSMPADMGSGGRNWLTAFGSDRERAGKERKGWSVTVHDLSGSPVALASMVTPFVASPGTDRVSKSNPGAWLVLRPGDGTWKPWGRLECWRERGAGAAAGDSLGYRFELVLPDPTGMGVGVSVAESTIPASKGGRFAIDLTATQQFGRSGSPACSPCGSGDYGMWPFGSCRGFVMSAAVQGEGKCSRPAVEVGVQNVGCAEDAAAFVALAAAVDLSMDACRLFSHRLRRELSASRSDLLR

SEQ ID NO: 176165 - protein, 50 aa, Oryza sativa
  Clone ID: PAT_MRT4530_73940C.1.pep
AEDGERCEAAGAEGSRGFNTSLYCSTVIGSGMVGFFFGCRGLVSFGGLGG

SEQ ID NO: 176166 - protein, 72 aa, Oryza sativa
  Clone ID: PAT_MRT4530_73941C.1.pep
MQLKMGAVLAILLASFTGFGIAISLNAMLIEYLRWRLLRNQRLTQRRNHRHGQSGNNASNENTASNARQQGS

SEQ ID NO: 176167 - protein, 1151 aa, Oryza sativa
  Clone ID: PAT_MRT4530_73942C.1.pep
MGGASKLLSSLLLTSSPLRLRPSAGAFALFLSPPASRRHLLLSSPAPLRTLSTASASAAAGGASSDSYSSGSCHSPFPEWSRLVDRLSAAGYGARAPSPADELDLDPECGLSSDAEAAVSSFLAFARDRPDLLRSLPRKDVEVLVANAAPALFKDGEASELRLRQYLAGEGSDVTQSERAETIDIVRYLLSYAYGSPVSYLKDKELTDSAVRNILAEFVSFSGFPQTSSYAESTARQNTLGSRPPGQNIEMKRGDWICTRCSFMNFARNARCLECNEHRPKKMLTGGEWECPQCVYYNYGRNMSCLRCSCKRPGTIPPNPAGAGLDGVAQFLNTSIVGKSEIERKLAENDQKAERWLNKVSQLDDSADLSSLAADEDFPEIMPIRKGVNKFVVSTRKTPLERRLANAQYSSNNSPQDGSSDSKISKTLDRILGRSTSTSVQNNQSGDGDVNTSSNKTTSNLGGIDPVPFVPLSADQFAKPQNSFGDGQSDTQISTEADSMAKSQMDSMERRDDKRSFDTTENDFPEIMPMRKGENRFVISKKKDRSLTSPQYKRRSVLEHADNSNFIPFVPFPPDYFAKKNKPVENSSDAGIVPEGPPSAEKLPETKYSSGNLGNFQNSSQVMGSQAANNMNNENRNGNYPHQNLSTSGYGYGESITYQHQPQSQGMVGRSGGASETGTRNANNNQGSFSESRDRSTYNRGSHSAQPPYKSGYGNNNNAWSSNNNGSNNAWSSTRDYDNGGRSDNNPYYNSSTWSSNSTYSNNAAWSSNSSYNSNSAWSSNSSYNSNSAWSNNSNNSWSGSYSDNGGTGSGSSASRPNQTAGYSSYGESANRGYTGKSLEGSAVKDPDPLDMSEEAKAERWFRRAAQIKDISELANIPDEDFPEIMPMRKGVNRFVVSKRKTPLERRLTSPQYRRNLPIPGIDEVCQKKNERRKKKKTPEPTQHLVTMLAEVVWWPNLIAVQDGHGCTVCSSDFFVSLLLVVTQQSISLWLEGTELCRFSGQKIYPGKGIRFIRADSQVFLFANSKCKRYFHNRLKPAKLTWTAMYRKQHKKDIHAEAVKKRRRTTKKPYSRSIVGATLEVIQKKRSEKPEVRDAAREAALREIKERIKKTKDEKKAKKAEVAKSQKTQSKGGATQRGAKGPKIGGGGGKR

SEQ ID NO: 176168 - protein, 85 aa, Oryza sativa
  Clone ID: PAT_MRT4530_73943C.1.pep
MVVAERWVPQADILVHRTFLNETFLVDVLRVGVRVREAASKAATEAVARAVVRLMNDDDNDAAAARKVRVAELNVTARGAVAESR

SEQ ID NO: 176169 - protein, 159 aa, Oryza sativa
  unsure (1)..(159): unsure at all Xaa locations
  Clone ID: PAT_MRT4530_73944C.1.pep
HSTTKRGQPAKNTEVGKLTIKNTVIPTATPGRDLIKKSPSTWNSCPSPPPPPPXPPSPKRSTPPPPPPTPAAPPGWSTLPPPRSPPPPPLSPRSSDVARASPRPPAQPRRCRRRRCRCGGRSTAPPPVISSWLAPPSWSVVMDVAAGSSGATRRRRSGG

SEQ ID NO: 176170 - protein, 121 aa, Oryza sativa
  Clone ID: PAT_MRT4530_73945C.1.pep
MGASSERRRGASGKARCGAPYAAASLLKLGHPSAPPSRCRSATSPNPNQWTISFDYSIICLIWPVSTACTRHAGIVAGGPASRHSENVKAKHQPEENQVAVRCGLISAPTIAGCGCFRGLS

SEQ ID NO: 176171 - protein, 722 aa, Oryza sativa
  Clone ID: PAT_MRT4530_73946C.1.pep
MAGSSRLNSSTADAAKSSKSTPHVAATARPVACGIPRHAAARAERSPALVEKTPSPSSADHRSPKISSRISTLPSAEKHRTAVKKQSMEQLAAIQEDLRRAKEQLAKKETEHRKVADDARRTADEANAKLRYALAELKKAEEASETEMFRAIELEQTTIESTQRKDELQRRLEATRRQQEADAAALRSMVAQLEEARLELADAIDAKNLALSHADDAIRAGEANAAQVELLNAEINRLKDSFNSELESKVKESAEKTRKLEAETSVLRIKLKKAKVAEEKVAELEGAVEGLRADVANAIKARREADGLVGEWKKKAQLFEIKLELANQSSILKAESMSSVMKELDAANALLQVKESQIALLHDKIESLEHEVVRQNEDINASGQRVDAAQRGALALRTEIQELRSRLGAMEQEKRGTIKDGSFTSSQIEAICEEKDKLAKELESSKYECEKVRKAMEDMASALQEMSAEARESQENYLHKEKEIEHTRAKLQELNISLNNTRDNYEVMLDEANYERICLKNKVEQLEAEAKTTSEEWRSKELSFVSSITKSEEEIMSMRTRLGKALETARDMENRNAQLEEKVRELEALMDKDNNYRGGKDTKAYKENDGLHLHVKESSGSEKIKDLYSLIGNDEGNTEKDGPVLLVSKMWENSYNLSKERDDGEPEVDLLDTDRDIAADGNGSRLSTEKTNSNTKLVVKQNQQKKALMKKFGGLLKKKSQH

SEQ ID NO: 176172 - protein, 85 aa, Oryza sativa
  Clone ID: PAT_MRT4530_73947C.1.pep
QKRGRETEGEKAAAGKTGAPKSTESRGGGITKTGARGGDENEPRGKGREKTRPGTGENGGQGNGRKTEREEAGKQTAQTGPAKGN

SEQ ID NO: 176173 - protein, 1060 aa, Oryza sativa
  unsure (1)..(1060): unsure at all Xaa locations
  Clone ID: PAT_MRT4530_73948C.1.pep
MRKMRDKGEGSSAARTEGRKLVVRAREGEAELDEVEHIDVGLERVEWGIGSGGEEPVEIREVWTDNLEVELALIRDVVDEFPFVAMDTEFPGIVCYPRRRSALCAAVDRKHEAWEICLTPVQVQSLPSALPPPATATIASSSAADLYGLQVLTDGIQDDDIQRKREMKRGRWGERRKKRRGEDDMWRRGRPKPRRVGPRMAPAAADPDADDPPARRSDATDVAGNTWDLAALPPPPPAARGGGGEVYIYRNTYNLVPRSIGGCRGSVRSLKFFGNDVEVLPPEAGELDQLESLQVKVSAPRVSGAPLRRMRALKELELSIVPPRPSACSILVEVAALKCLTKLTICHFSIRYVQASGLIGPGSVLFSKVLQFVHNGVFYVIEQRYAMYLPPEIGSLRKLQELDLSFNKLKNLPNCITELGALKSKLNDDYVDEMAVNMTEDESPLHDMENNIDDHLPDGFYDAGRDMPFMPLEEYERSIGLYAREVILLDREQDEELDAIASSAQILLSNLKMPSCFVADEDAGQDLLRASVLALFVSDCFGGCDRSASLSRTRRAIVSLRKEQPFVCTCSAGSICDSTEASKRINNLYGHFDFTGLHRAVLMKXPPIPCELVRGHLDYTPHAWNVVPVRKGNTWVXPLSRLQIILDDQGYTPRSPFPSVSLCKEIETTASSSVYYCKIGAVDAAAKVRYLDTRCASSDEVKNFEYKLLAEVRMLGALRKHQSIVEIYGHQLYSKWVQADDDKEYKILQSTIMMEHVKGGSLKGYLTKLLKEGKKHAPIDLAFYIEVDIWSFGCFLLEMLTLRIPYQGLPDSEIYDLIMRKKQRPRLTQELEAFWTLDKPITRLELGITSDAHAEKLRLLIDLFYQCTKGIASERPKAEAEPVDETASQIGLRQDGKLCWVVLAGRRLAEASSEYVMEEAAATRSTLSQRHRHRIHTRSPSPLSDPPWEGGERGQREPSPLDPSSSAAGSTRGRRRRRHRCRIYRGREARWRGGDGERGESIRGSLGLPVSDHSLRLKLLASEYHHRLHVFALQEDLHGDGIVDLAGNSREKEGLRRCCG

SEQ ID NO: 176174 - protein, 261 aa, Oryza sativa
  Clone ID: PAT_MRT4530_73949C.1.pep
GIPGRPTRPPSACSILVEVAALKCLTKLTICHFSIRYLPPEIGSLRKLQELDLSFNKLKNLPNCITELGALKFLKVTNNKLVDLPSGISSLRCLESLDLSNNRLTSLGSVKLISMLTLQYLNLQFNRISNSCVIPAWVCCDMRGNGENNMKPGKLKSIAVVSNTSAESRSMNHTCNASRLCSHPEASANLKVHPTQKTKKGWKRRDCLQQQARQERLESSRSKLNDDYVDEMAVNMTEDESPLHDMENKSEMKGIDEEASL

SEQ ID NO: 176175 - protein, 339 aa, Oryza sativa
  Clone ID: PAT_MRT4530_7394C.1.pep
NSARGALEKDEHNPHLELTVSGRKKISSVLEHLNRKWGSSNIASGELLLFPYCAHREDLATYQRWTTRDTVVVADVFLSVNSPPVFRLRYGWFSLAELEGGSGISSTHFKNCMMPEDIHAKSPSDACVQKDGTFLNSCAPEEHLCNSKDRPALFLAMTFSTGKSAKGQEQHSDFPASWFSRQKQEKDSTNQVLEANLGMDCAIISEGEWADTLTDISVGYLLTEASIGTNTDCPGTAIAKNTLFLENPCSYDSFDAAVALHASRHKTVEQPALASHSTIWGAEETCDEFSFNLAASRKQESSNTSASSCPGSDSGVLPSTSQLIGYILQIKLISKLYIP

SEQ ID NO: 176176 - protein, 167 aa, Oryza sativa
  unsure (1)..(167): unsure at all Xaa locations
  Clone ID: PAT_MRT4530_73950C.1.pep
MKALAQVGNSEAQQWLGGEEDVVGGEQQPSDNCERSRCPRIRRGRSCCHPIHSQPAPLPPDPHAVAVPVVRSAWEGGERGQREPPPXSVLIRCHRCQIHPRPPPTPPSMPDLPREGGEMERRRWRAMRIHPWLARPPRLRPLSPPQAARLRIPPPPPRLRPLGGPPW

SEQ ID NO: 176177 - protein, 40 aa, Oryza sativa
  Clone ID: PAT_MRT4530_73951C.1.pep
LTLENSLWDILTTGVILSYSHSCLCSQLFNKSITHAFISY

SEQ ID NO: 176178 - protein, 655 aa, Oryza sativa
  unsure (1)..(655): unsure at all Xaa locations
  Clone ID: PAT_MRT4530_73952C.1.pep
MMLLWLLKEILQNHLSIHGNLKGTLIWDCNPKPSKCXRPFDECSKLSYKYSVQSFCSIDDHLPDGFYDAGRDMPFMPLEEYERSIGLYAREVILLDREQDEELDAIASSAQILLSNLKMPSCFVADEDAGQDLLRASVLALFVSDCFGGCDRSASLSRTRRAIVSLRKEQPFVCTCSAGSICDSTEASKRINNLYGHFDFTGLCDKSSRXIKERRNSGIVPIGALQFGVCRHRAVLMKYLCDRADPPIPCELVRGHLXYTPHAWNVVPVRKGNTWXVRMIVDACYPTNIXEETDPEYFCRYVPLSRLQIILDDQGYTPRSPFPSVSLCKEIETTASSSVYYCKIGAVDAAAKVRYLDTRCASSDEVKNFEYKLLAEVRMLGALRKHQSIVEIYGHQLYSNWVQADDDPEYKILQSTIMMEHVKGGSLKGYLTKLLKEGKKHAPIDLAFYIVREVACALLELHKKLVIHRDIKSENVLVDLEXERSDGTPVVKLSDFDNAIPLHSLSHTCCIAHLGTYPPNVCVGTPCWMAPEVLRAMRDKNQYGLEVDIWSFGCFLLEMLTLRIPYQGLPDSEIYDLIMRKKQRPRLTQELEAFWTLDKPITRLELGITSDAHAEKLRLLIDLFYQCTKGIASERPKAEAVYNLLCSLPTCYDMR

SEQ ID NO: 176179 - protein, 98 aa, Oryza sativa
  Clone ID: PAT_MRT4530_73953C.1.pep
MKNSNEKDACQPWVKVYRVVHVETGSTTEQVAPGEAERRADEITGNGFGINLVIHDSMQLPATSTPTCGATPTSEAEAAKRREDVIYRSNYPGHFGGQ

SEQ ID NO: 176180 - protein, 54 aa, Oryza sativa
  Clone ID: PAT_MRT4530_73954C.1.pep
MSCGGSCNCGSSCGCGGGCGKMYPDLAEKNTTTTSVTMVLGVAPEKGHSEAGFE

SEQ ID NO: 176181 - protein, 319 aa, Oryza sativa
  Clone ID: PAT_MRT4530_73955C.1.pep
MSWRGGRFLDVKSPVPSLLRPAPPCRILAPATDDGPCRSRSAVSIGGPRPLSVSMRVGGSSRRAIACTTMASRDHSGLTRQLLDFQHGTVDEIDGEHDPFMELKARFMDFKHRNRVDNISNYQNLAQQQTPKFMVVACADSRVCPSSVLGFQPGEAFTVRNIANLVPPYQHGASETSAALEFAVNTLEVENVLVVGHSRCGGIQALMSMKSKQDDSQSRSFIRDWVSIAKSARLSTEAAAGNLNFELQCKHCEKESINSSLLNLLTYPWIEKRVNEGTLSLHGGYYNFIDCTFEKWKLVYRQGLEGGSKYAIKNRTTWS

SEQ ID NO: 176182 - protein, 89 aa, Oryza sativa
  Clone ID: PAT_MRT4530_73956C.1.pep
GPPISVPARISPGPTGECLDRKWNSLPAKPIAFWWGCFPVPSLEVPLIEPAASFPRDFSPASGDPPGVYLAVLPNQKFFLVIAPKSMDG

SEQ ID NO: 176183 - protein, 129 aa, Oryza sativa
  Clone ID: PAT_MRT4530_73957C.1.pep
SITASTPTSAKYSQGDSMSKDPPAEAENGASTTSQLEKGSDAAKPCRSDMNREPRKMTSEATRSSATCSKRSLPQRTQSSHQLAMPMVKTTRQRESFPTSCLFTAPATTTTITTIANGGCQTILVEDVA

SEQ ID NO: 176184 - protein, 183 aa, Oryza sativa
  unsure (1)..(183): unsure at all Xaa locations
  Clone ID: PAT_MRT4530_73958C.1.pep
MARTSALRHGAAASRSSAPRSGGSSSGKGHGGGDRAGCRGGGGELRLRLQLPPPPPVEMVLGMGAVADGRGGWRRGRDXGRRAVVDAAGGGAPDGGGGRWRRSSPPPPLRPTRSPPPCPARPLLPLGPRRTNRTPSPSAXGVAVGVRMGVAAGGGGGXGAADASCSPSPSPPKPPPTTASRRL

SEQ ID NO: 176185 - protein, 90 aa, Oryza sativa
  Clone ID: PAT_MRT4530_73959C.1.pep
MATPPAQAVRLRLVFDNQRILRRSLRESGLRRCWLLLPPELSTVSDLAAHIAARFRLRRSCPSCVILSIDGFVLPPFESTCIFRDNDIIR

SEQ ID NO: 176186 - protein, 101 aa, Oryza sativa
  Clone ID: PAT_MRT4530_7395C.1.pep
GPGKGKGLGATTRGPLAPPRATKPLLLNNPIESPHEGHTYEGPSKFLSSPLVLKAFNSPVFSSFQRFGGERERERERERERSPTCLFGFDFLLRALESSMK

SEQ ID NO: 176187 - protein, 145 aa, Oryza sativa
  unsure (1)..(145): unsure at all Xaa locations
  Clone ID: PAT_MRT4530_73960C.1.pep
PRQRRQHAEGDGVRLVRRGPRGSSGRAGHGGGDRVGRRGGGGELLRHRPPPPSGAPPPAASTTXPPSLSRPRLQPPLPSATAPIPSTISTGGGGGSWRRRRSSPPPPLHPARSPPPCPLPLLLPPDRGAELLLAAAPCLSADVRA

SEQ ID NO: 176188 - protein, 71 aa, Oryza sativa
  Clone ID: PAT_MRT4530_73961C.1.pep
FHHMLMYVYRLQESRSMQTRHTPSRSLLMIALIGSSVTVTLLDQPLYQYCAHNIRRGDHEERSTRHTCIPR

SEQ ID NO: 176189 - protein, 52 aa, Oryza sativa
  unsure (1)..(52): unsure at all Xaa locations
  Clone ID: PAT_MRT4530_73962C.1.pep
DLFVISISPMWSSRWLLLLAQVNTSLLVKVMPLPATXAGHHHQLPRCRRPPA

SEQ ID NO: 176190 - protein, 56 aa, Oryza sativa
  Clone ID: PAT_MRT4530_73963C.1.pep
MTFNIDWNWMIAEGITMHARVFFLHGSVSSVAWVFVYLRSPVTRGQGRNAGCGALR

SEQ ID NO: 176191 - protein, 136 aa, Oryza sativa
  Clone ID: PAT_MRT4530_73964C.1.pep
QGGQQKQKAGGQRKGEKQLAPGFKPKKRGNPQGKTGLIPKNPERPKEPKGGGESPPWSGGSPNPPNQQRAKTTSGRVTIGGPLTSGPWSLEKTKFPQGFGNPDPKTPPPRKEPRKKRFFLEPTPKNMSRKLKPLKG

SEQ ID NO: 176192 - protein, 663 aa, Oryza sativa
  Clone ID: PAT_MRT4530_73965C.1.pep
MAALLLLLLLALLCLCGGAAGDPRTAVARQECAPGGAVSGPALADNFVPAMDDLNSNVSANGFGTSAVGTTAGLNPNAVFGLGQCYRDLSPVDCKLCFAEVRSLLPKCYPSAGGRLYLDGCFGRYANYSFFSETLGPDDAVTCGVVGGGGAGGGNYTGANPRGFADAVRAALANVTGVAASAAVPGGGDGYAVGSASAGGATAFALAQCWGSLNATACGQCLRAAAAAAARCAPAAAEGRALYTGCYLRYSTRLFWNLNSTAGSGSSRHNDVVWILLGSSLGAFVIVFIVVFLAWKKKIFRNKKRSKSFIDIYGDGVPVRIAQSSLNFKYEELRKATNYFDPANKLGQGSYGAVFKAILLDGKQVAVKRLFLNTREWVDQFFNEVELISQVRHKNLVKLLGCSVNGPESLLVYEYYFNKSLDLFLFDASRSRNLTWNLRVDIIQGIAEGLSYLHEESETRIIHRDIKASNILLDDKFKPKITDFGLARAFGEDRTHLTTGVAGTLGYMAPEYLAHGHLTEKADVYSYGILVLELVTGQRCSGSIGSHGGHFLLTKVWNHYKNKAVEMIADRSIYEDTIRDEVMHVVQIGLSCTQANAGDRPTMTKVVELLRSHRHDVEIILSDPPFLDVEAFEDIKQGEQSRLLSARSAHSVSGSSRSYLSGR

SEQ ID NO: 176193 - protein, 524 aa, Oryza sativa
  Clone ID: PAT_MRT4530_73966C.1.pep
MANRRKFSQAGGGGGGGVFDPFGTKQAVSSLRKGGRLPVYVAGVFFVIFVIIMYGEDIRSLTLDPIARAGTTPARIVEPVVTEERHVARVNPPRREVSSAEKAAALPLDVDERPKLATPTPTEAAKEVPKVEKIRKPKKPKTTKKKPRKPRPAKKTVAAAAGGLLGVPETCDLSKGEWVFDNTSYPLYREEQCEFLTSQVTCMRNGRRDDTYQKWRWQPKDCSMPRFDAKLFMERLRGKRFMFVGDSLNRNQWESMVCLVQSAMSPGKKYVTWEDQRVVFHAVEYNATVEFYWAPFLVESNSDDPKIHSIQHRIIKADAIAAHAQNWRGVDYLVFNTYIWWMNTLNMKIMRPGGQSWEEHDEVVRIEAYRKVLTTWASWVNDNIDPARTSVFFMSISPLHISPEVWGNPGGIRCAKETMPLLNWHGPIWLGTDWDMFHAAANVSRTAATRVPITFVDVTTMSERRKDGHTSVHTIRQGKVLTPEQQADPGTYADCIHWCLPGVPDIWNLILYTRIMSRPQLGLG

SEQ ID NO: 176194 - protein, 191 aa, Oryza sativa
  Clone ID: PAT_MRT4530_73967C.1.pep
MPLLGDALVIAGTIFFAFSNVGEEYCVKKKDRVEFVAMFALFGLLVSIIQILIFEKKNLVAIAWSPTMLCLFAGFAVALFMFYSITPFVLKMSGSTLFNLSLLTSDMWAVAIRVLFYHQQINWLYYIAFAVVAIGLIIYSLNDHSSDSGTRTTANTEAAAQYQQLPGENNSTGIGSNDSQERKQEEEVHIC

SEQ ID NO: 176195 - protein, 77 aa, Oryza sativa
  unsure (1)..(77): unsure at all Xaa locations
  Clone ID: PAT_MRT4530_73968C.1.pep
CTRVGRVGLXNHALLQRLHGRAGDQVFGXSARHDYSLFVNIYFTFTNMSNTGDKEKEAPVNTNGGNTASNSNGGPFL

SEQ ID NO: 176196 - protein, 975 aa, Oryza sativa
  unsure (1)..(975): unsure at all Xaa locations
  Clone ID: PAT_MRT4530_73969C.1.pep
MGFVSGIDDFAFPPGQAYQLGSLDFITDSFGKISLLDSDSNQSRRDDERLLPTSLGLTQLQPQSDLSPEEIEEYLSTPSIDSHAPTENIDYGDFDDEYDFNNFDDYDDLDEVFXVFMADNETEEQLLAREANEEXACQEAERLRLERERQEQGQXDCGQNAVTAITLLDTLMATGATENVAQILNQTETMIAASVPIGSRSTRQPSASVRTPSGSRVSPPRSWDYHQPSLSVTKSRSPHEGRAHREQSVHSSADRHRERRADHERPCSPRQWQPVDLRDTLNRHRAERDDRRRPHTLDRYDANDEGVAAFTSDLRRVDLPAGFKPTSIEKYDGKTDPESWLTVYTLVIHTKGGGRKAMRPDESLRDYIQRFSEQRNKISDITDDNIIAAFTKGVCNDLLVVLIKFDCSGHPDRVVHPGRYPLVLDPVVHNVKLKRSLIDGGSALNILFAKTLDEMQVQRTELRPSSAPFHGVIPGLSSTPLGQITLPVTFGTRENFRIKNVCFEVVDFETAYHAILGRPTLAKFMDVPHYTYMMMKMPGPQGVISLRSDIKQAVTCDKESCEMARTREIALGREEIRLAASTSAEGEVPATKLPKTGEGDTKTKKIPLDLSDPTKIVVIGAEIDYAIPIKQRLCRFAQDRKDAIKEELTKLLAAGFIKEVFHPEWLANPVLVRKKAGQWRMCVDYTDLNKSCLNDPFGLLRIDHVVDSTAGCELLSFLDCYSGYHQISLKESDCLRTSFITSFGAYYYITMLFGLKNTGATYQHDEIQREEEGHAKKVQRPIYLVSEVLVDSKTRYPQVQKLLYGILITVRKLAYYFQSHSVKVVTSFPLGDILHNREATGRIAKWALELMSLDISFKPPSHNVAEYEALLHGFRIAVSLGIRRLAVRGDSHLVVNQVMKDCSYLDDNVAAHRQEVRKLEDKFNGLELTHVLRNNNEAIDRLANFGSKREASHSDVSIKHLYEPIAPKKNKIEDE

SEQ ID NO: 176197 - protein, 98 aa, Oryza sativa
  unsure (1)..(98): unsure at all Xaa locations
  Clone ID: PAT_MRT4530_7396C.1.pep
FPLSLHLENVYNLQKKQXXAYDQVWSYVNRSTSPTRVIFGACLPRLGFFSSGLLRNKNHHPRIIYFSLHTFIHYPVIFLPCPGLNPIFFFLNHQPILK

SEQ ID NO: 176198 - protein, 38 aa, Oryza sativa
  Clone ID: PAT_MRT4530_73970C.1.pep
LYRETSIYSIEVDFLMDPSRCLSIKSDPLVTYFFPLVR

SEQ ID NO: 176199 - protein, 128 aa, Oryza sativa
  Clone ID: PAT_MRT4530_73971C.1.pep
MAVQMARAPVNTRTVGGQQAAVVRSARPSVVVRAAATSTLTRQSVPLELEEGPMPLNTFNNKAPFKAKIKSVERIVGPKATGETCNIVIETEGKIPFWEGQSYGVIPPGTKVNSKGKEVPHGVRLDSI

SEQ ID NO: 176200 - protein, 110 aa, Oryza sativa
  Clone ID: PAT_MRT4530_73972C.1.pep
MVYWSLQAITKGKLILQAIHLVQSSNATQFPSNEAFSTKHPPRCSPASTISSSLGEARILLLLLQWLKFFNLKHTNSKLLPNPLPNKHTSSSLLINVQELTLKDKLSLNS

SEQ ID NO: 176201 - protein, 299 aa, Oryza sativa
  Clone ID: PAT_MRT4530_73973C.1.pep
MTPWRPFELSTTGLGFTATGEHKVVRLFKRLNGEHACEVYTLGKPGGWRPCAGRVPASAASILPAMPPVFVNGYLYWLLQPAAPGDEQIRRILSFSIGAEQFGSVYVPPRLSSRMCHLANLDGSLCAVFDNRVEGDVYGLFTCSEPSASPSPSWSVRCSIYLNRLPREVSDELMEERVIVPLCTAGGKILLATGHHKVFAYDAERNTVERVFRMQEFVDLRHDYIKAPLLINIGLHDECIADVHNGDGGGERMLRVNMGRRDNMVVKQEVAVEYHDASNRQFNVLLKDLKRIAACFRRT

SEQ ID NO: 176202 - protein, 35 aa, Oryza sativa
  Clone ID: PAT_MRT4530_73974C.1.pep
MVRATKDEKISDAEQAQKTDHAMVKRWLKAIHSYH

SEQ ID NO: 176203 - protein, 139 aa, Oryza sativa
  Clone ID: PAT_MRT4530_73975C.1.pep
MWCAEGIAGERKDEFGLSGENGGDGVKFLRGDGSELDKDQINWHAREPKSKIFGPALKLSRGLVFSHQHMPVLSPHLHRSGDGRGRHDPHFTRIGLHPGQPPCEPTEGQNGEKCGNLDTRVGFHPYKCYMDEEEPKKIE

SEQ ID NO: 176204 - protein, 71 aa, Oryza sativa
  Clone ID: PAT_MRT4530_73976C.1.pep
YQFECRFILCIFFISGHDVPLIFGTVCSSSPVFPSSFRFPSSRFLCFIPALSVSFCVFHQVALYVITVVHL

SEQ ID NO: 176205 - protein, 101 aa, Oryza sativa
  Clone ID: PAT_MRT4530_73977C.1.pep
MAGGHRHVDSKGKAGAEEQRTIYSSEQEEGEKLLIMAPFKINKTIAATFFMVLIMSCALTSTSACQGGTECTVEEPHCTMDSCREKCKDIGHQPQVQPNDS

SEQ ID NO: 176206 - protein, 445 aa, Oryza sativa
  Clone ID: PAT_MRT4530_73978C.1.pep
MATHAALAASRIPATARLHSKAASKQRVDFADFSGLRPGSCSISHAAREASFSDVLGSQLVARATGENAVRAPAEAKLKVAINGFGRIGRNFLRCWHERENSPLEVVVVNDSGGVRNASHLLKYDSMLGTFKADVKIVDDQTISVDGKLIKWSSKNRDPLKLNWAELGIDINKEGTGVFVDGPGAGKHIQAGAKKVIITAPAKGADIPTYVLGVNEGDYSHEVANIISNASCTTNCLAPFVKILDEEFGIVKGTMTTTHSYTGDQRLLDASHRDLRRARAAALNIVPTSTGAAKAVALVLPQLKGKLNGIALRVPTPNVSVVDLVINTVKTGITADDVNAAFRKAAAGPLSGILDVCDVPLVSVDFRCSDVSSTIDASLTMVMGDDMVKVVAWYDNEWGYSQRVVDLAHLVASKWPGAAVQGSGDPLEDFCKDNPETDECKVYEN

SEQ ID NO: 176207 - protein, 280 aa, Oryza sativa
  Clone ID: PAT_MRT4530_73979C.1.pep
MAARWLDEADDTGTMSVQEDDDAAGPEVDRLRRHDSFYGDAEKVSNDKSHGTGENWARTLQLAFQSIGVVYGDVGTSPLYVYSSTFPDGVKHPDDLVGVLSLMLYTLILIPMVKYVFIVLYANDNGDGGTFALYSLISRHAKIRMIPNDQTEDANVSNYSIEAPSSQLRRAEWVKQKLESSNAAKIALFTITILGTSMVMGDGTLTPAISVLACAIRAPPTTRYPHAIPARAACGRPRAARRWLCVTHAPPSHRPPRTGHAPSRRSAAIDPAANRACPWE

SEQ ID NO: 176208 - protein, 133 aa, Oryza sativa
  Clone ID: PAT_MRT4530_7397C.1.pep
MSPTSITTSLGSPVVQNLMNTRQTHRLGIREQQIGDRETETELNQSLAMLGLWSSIAAAAAADDDDDDDSSPPWPSPSRSSSSSPASQKGKDTRERRETRELSIMATNNEKNEGIYGTSAQVKAKTCSEKPGF

SEQ ID NO: 176209 - protein, 310 aa, Oryza sativa
  Clone ID: PAT_MRT4530_73980C.1.pep
MDGGGRWGDVPTDVLWEILRRLPQITGRRWRDVVDEIEPEVQRRRAKPLAFFKNGCYEPPSAFSLHDIAGDCDVTSLFREEKQEDNDGGDRDFFARYNNDDMVGSCNGLICLWLDRSYSGGCGIFVTNPVTGETLHIPSPPLETMATSSHRRTAGPLCFGYHPTTGKYKIVHFPSNGGRVDDVTLGGTTSAAAAAAASSFPSRHGGVVNVLTLGDGAASWRAVGVPPWSLCIAWGVVSVDGATYWVAEGREIMSFDLEHERVAAVAPLPAMSRCRLPVSMAKEDACCPADGCRREAGSLHRHPPAELNLH

SEQ ID NO: 176210 - protein, 412 aa, Oryza sativa
  Clone ID: PAT_MRT4530_73981C.1.pep
MPPDGVANIDELDPETPAPATDDDDRWGDVVLTDVLWEILRRLPQISGRRRLRLVCRRWRDVVDEVEPEVQRRRAKPLVFFKDGRYEPASAFLLHDVAGDCDVTSLSLFREEEEDDDGGDRDFFARYNNDDMVGSCNGLICLWFDRDPLYYGSIVVINPVTGESLHVPSLPTATRAGTISFGYHPTTGKYKIVHFPSNGGLVDDVTLGDSAAASSSSSSPSRHGRGGHGDGVVDVLTLGDDTAGGGGGARWRCRLPVSMAKEDACCQLTDVGGRLGVSIAIHRRNSIRIEVWILEGQRWSQWRTIQGLQPNQKIGRPYFAYGKFVLTNIYRKIFRERLNIGYQHLPCSLKAGSILSRAIEGTPVAKFKTEELRMFSYTETGEPLNIYKEEEDKKEEVEESSSSEEEEVAVNA

SEQ ID NO: 176211 - protein, 476 aa, Oryza sativa
  Clone ID: PAT_MRT4530_73982C.1.pep
MATVEVLTSEVVAPAEETPAGAVWLSNLDLAARRGYTPTVYFYRRNGDDEAAFFAADAVRDGLARALVPFYPLAGRLGLAGGGEDGRVQIDCTGEGAVFVTARSGHYALDDLMNEFVPCDEMRDLFVPPTPPPNPPCALLLVQVTHLRCGGVVLGMALHHSVVDARSAAHFAETWASIVRGAPAGDAPVPPCFDHKLLAARPARAVLYDHPEYKPEPAPAPAHAATASTYASAIITLTKQQVGALKAACAGASTFRAVVALVWQESGGEVKCDLRRERWRREEASRTWPPRAAVVAAAGGGGLPVVRGGEVSGGEGAPHRHLKGLNKPAVKSIERVWLHLGRGFGRKHEQGGRFALGLIVQSARWHSDSKEDVFSVALCGCARPFFQPYHLIIVLDGDPKKTIRVTASMKKFISKKKYIYTIDEFLPFHPSINFTSVRSVSVKDVKGRGSGDLLSRSLVHAGERDGVVYERRRSTE

SEQ ID NO: 176212 - protein, 108 aa, Oryza sativa
  Clone ID: PAT_MRT4530_73983C.1.pep
PTRPWTRGSPQAPLRPTLWRSPASAGTLAALARRLSSCRTAPINHRTRRHLNAPDSQFRPWAIDADIVRVHCRENTQYQMAAVRSRHRMDRSRGAPPWWRLWTWSPCY

SEQ ID NO: 176213 - protein, 605 aa, Oryza sativa
  Clone ID: PAT_MRT4530_73984C.1.pep
MASSTAANLWVLLGLGIAGVLLAAKRLRRPARPDNGAFIARLELLPPPQPPPPQARHPLTGLCFAIADAFHVTGYITSFGSLEWAKTHDAATQTSLVVSSLVDGGAMCVGKTVIDEMAFSIHGENKHFGTPTNPAAPDRVPGGCSSGSAVAVAAGIVDFSLGIDTIGGVRVPGSYCGVLAFRPSHAVVPNNGVIPVAPSLDAIGWFARDPSVLRRVGHLLLRLPYADIRQPRHFYIADDCFEMSKVHARRLTQVVTKSVEKLFGIFAGHQLPHVDFFPLRITLGQVLGHVNLENYLASRIPSLRNNSNGHGDSKFSSLLALSRAMQFLHKHEFKDQHMEWINSVKPAVDACIVGNLSDDGESTINNSQDARKEVRAALGALLKDDGILVIPTVLGCPPKLNARELSSQDYNVQTSCLTSLASMSGCCQVTVPLGTHDKCPVSVSLIARHGGDRFLLDTIQTIYATIQEQVDALAKSNVSSKQAMSEEAAEAAKEKGNIAFKEKQWQKAINFYTEAIKLNNKVATYYSNRAAAFLELASYRQAEADCTSAIDIDPKIVKAYLRRGTAREMLGYYKEAVDDFSHALVLEPMNKTAGVAINRLKKLFP

SEQ ID NO: 176214 - protein, 77 aa, Oryza sativa
  Clone ID: PAT_MRT4530_73985C.1.pep
MPDECLDNSPKVRVGADGYLPTTSWVFRRGKVLDAVVMVITEGSQAQARRGTTGLIPVPGVRPIRPGLIVGPMSWHG

SEQ ID NO: 176215 - protein, 56 aa, Oryza sativa
  Clone ID: PAT_MRT4530_73986C.1.pep
IGSKFFFYHFFFKFVFFFKNLTPNDSIANKTLVIPFLISHNLNTPANWLKNQPIDF

SEQ ID NO: 176216 - protein, 76 aa, Oryza sativa
  Clone ID: PAT_MRT4530_73987C.1.pep
QDYKGVEWWRLMKHLKAINKTPNRILMTIKRKDVGQVVKQSVNTVVTIKKGGSERAVEEYSDNVANVLTELLESKR

SEQ ID NO: 176217 - protein, 75 aa, Oryza sativa
  unsure (1)..(75): unsure at all Xaa locations
  Clone ID: PAT_MRT4530_73988C.1.pep
NPQRIGDEREASXXXGRTKAKLVLXKKRTPQNQREPRXXRLYTELFXSFXFFISSFFCSILXRYHLLLSLFDRFS

SEQ ID NO: 176218 - protein, 276 aa, Oryza sativa
  unsure (1)..(276): unsure at all Xaa locations
  Clone ID: PAT_MRT4530_73989C.1.pep
GEFELGTRGSSRVDLQACKLVAFNISAVGSTASRNCHCQIRGLPSPFPLASSPPTCPSLPPQPPSPSPRAPRSPSPXPSPPTPPRSVRPSTRRKLPDPPPAPVAGRRHPSPPPDLQGEGREWPRATXQPSPPLLPPPAPAAPIYPSPLTDLQGEGGAARYRRRLPPDPPPPXPSPPPDLQGEGGAARHRRRPPPDPPPPXPSPLPDPPPPXPPPQLSPSPXPPPDPPPPSNPPPLSPAAVPPPPPPPPPSPEPTLPSSSLSPPPTEPAHYHRLSPL

SEQ ID NO: 176219 - protein, 416 aa, Oryza sativa
  unsure (1)..(416): unsure at all Xaa locations
  Clone ID: PAT_MRT4530_7398C.1.pep
AVVTFGLNALQGRQQMGRGVWGGAWNSSNAREFMEYTVSMNYPIDSWEFGNELSGSGIGASVGAEQYGKDIIELKNIISQLYGNSRKPLVVAPGGFYDQKWYAQLLDISGPNVLDTMTHHIYNLGAGNDPQVANRILNPQYLSQSSDTFRDLQMTIQRHGPWYLDQLGQSAKYDTKVXCRQTLIGGNYGLLDTETFVPNPDYYRQVFLYFALPQSCFTTLYTFCTKPRYMFSALLWHRLMGKGVISLDTSGSSYLRAYAHCGKQKGGVALLMLNLNKNMGFMVSVRNDLNINFREMAGIKRDNSFVHGLKRTVSWVGSKASDGLEKREEYHLTPQDGNPFARTVLLNGAPLQLTGDGDIPSLPPVMVSVNSPFYVAPLSIAFVVFPDFEAEGGNVPSLQSANVELNSAGKEGSMSK

SEQ ID NO: 176220 - protein, 34 aa, Oryza sativa
  Clone ID: PAT_MRT4530_73990C.1.pep
IYFVFCISKLKAYGHCTDCAHSSLHAIVCIYMRP

SEQ ID NO: 176221 - protein, 58 aa, Oryza sativa
  Clone ID: PAT_MRT4530_73991C.1.pep
DDRYSVRSIRIMTGRLLRRDDPELGRVAAVDAAHDGAGPVGVRPVGADDDERHHREEA

SEQ ID NO: 176222 - protein, 105 aa, Oryza sativa
  Clone ID: PAT_MRT4530_73992C.1.pep
SLIIILCRDLEREREPTAISYLAKQPSNLVCLSLQEAAFLRVRVRERERERDGWEEAASASSSSLGILAAHSSSLFSVAVLHRHQLRRRRPTTSRRRRPPRAYYS

SEQ ID NO: 176223 - protein, 83 aa, Oryza sativa
  Clone ID: PAT_MRT4530_73993C.1.pep
SEGEGRSRRGYETKGDGGVIERGRKIWSGGQERRGNKVGVGIQLKNHRVMHRGEERFHVSLLTASDEPPKRQQPPPHNRGGLV

SEQ ID NO: 176224 - protein, 75 aa, Oryza sativa
  Clone ID: PAT_MRT4530_73994C.1.pep
LLIKQAKIIVACCALHNFIRVSGIRDKHFDRCDRDENYVPSQATADQPETEEVFDDCDPMNAFHDSIALCLVNRS

SEQ ID NO: 176225 - protein, 45 aa, Oryza sativa
  Clone ID: PAT_MRT4530_73995C.1.pep
QVVSSSSLSPQSYLGVERKRKSSHCCEATKLSLRYVCSWSFFQYL

SEQ ID NO: 176226 - protein, 60 aa, Oryza sativa
  Clone ID: PAT_MRT4530_73996C.1.pep
PEDFCYLIKCTTTTCLSGNYLGAKLSRERTKFLLAILIRICITYDSKCDNTLCYMKARWF

SEQ ID NO: 176227 - protein, 62 aa, Oryza sativa
  Clone ID: PAT_MRT4530_73997C.1.pep
RLQLRSTTLMKRGNNSKGEYNHRTQQNTPMMQTCKGIQGWLVAIYIKAVVKHFIEQNSKTVE

SEQ ID NO: 176228 - protein, 902 aa, Oryza sativa
  Clone ID: PAT_MRT4530_73998C.1.pep
MARLVTVAAAKVKGSASRFRYVCSTPRTLDQPWIIAGGKVIATKIRNATQLLSCKLGELVPEAWRECPNCKCHIDNSDVTLQWPEFPDGVKFDPSDLEVLEHLERKINLGNPGPQGLIDHFIPTLEKIYHNGVLKGWKKILVLYKGSKKNKIVQANWVMHQYNLGVEEGGEDGELVVSKVFYQLSSKQTGTPEMDSVTEEASDALTIRSDPITPITNPPLPRCLMNSPCDTEQNGTISHDQEGECSTSTLRPMVEAGNRAGCSAGASTAGDFNEDLLQRCEFPEDPVPTLDDTLPFLYTDETDLFSWEDFQFGSQESFGWVDGDHTLVQFLYLCMWDRLLVDDLLREKSIPLPNSVENSRKTLLRSPQFHMAPPTSAAAAVAAAARASPTSAAALALFKSVLSADKALSPLAVLPHLDGAPSSLPNLLLTASAAVRPHATSLRLYSRMKSLSLPISTASLHPLLSALPSAPAFALFADMFRLRLPLCTTTFNIMLRHLCSAGKPARALELLRQMPRPNAVTYNTVIAGFCSRGRVQAALDIMREMRERGGIAPNQYTYGTVISGWCKVGRVDEAVKVFDEMLTKGEVKPEAVMYNALIGGYCDQGKLDTALLYRDRMVERGVAMTVATYNLLVHALFMDGRGTEAYELVEEMGGKGLAPDVFTYNILINGHCKEGNVKKALEIFENMSRRGVRATVVTYTALIYALSKKGQVQETDKLFDEAVRRGIRPDLVLYNALINSHSTSGNIDRAFEIMGEMEKKRIAPDDVTYNTLMRGLCLLGRVDEARKLIDEMTERGIQPDLVTYNTLISGYSMKGDVKDALRIRNEMMNKGFNPTLLTYNALIQGLCKNGQGDDAENMVKEMVENGITPDDSTYISLIEGLTTEDERAIDDERLAAADAAKV

SEQ ID NO: 176229 - protein, 72 aa, Oryza sativa
  Clone ID: PAT_MRT4530_73999C.1.pep
GTSSYPARTTTRLTKTQTSPTTRPKKVKMGSALPPPPPPPRRRLGGNPGKNPKPPQNNKEPRVLATPFEWIG

SEQ ID NO: 176230 - protein, 190 aa, Oryza sativa
  Clone ID: PAT_MRT4530_7399C.1.pep
RHGPWSAPWVGEAGGAYNSGSRKVSNTFLNSFWYLDQLGQSAKYDTKVYCRQTLIGGNYGLLDTETFVPNPDYYSALLWHRLMGKGVISLDTSGSSYLRAYAHCGKQKGGVALLMLNLNKNMGFMVSVRNDLNINFREMAGIKRDNSFVHGLKRTVSWVGSKASDGLEKREEYHLTPQDGNPLPRQCCSM

SEQ ID NO: 176231 - protein, 221 aa, Oryza sativa
  Clone ID: PAT_MRT4530_739C.1.pep
MGNAIAGGRRRTARVMTVDGTTYKYRPPASAAAALRDHPGYQVLESEEVRRLGMRARPLDADAPLKPGKLYFLVELPRLARAPRRTWSGALVHVGGAGERLESMMLSRRSASDVAASPVSSVEAGEGGAVRLRMRLPKAEVARLVKESRDAAEAAEKIMQLCVDRDHSSAPATPVLRRPPPLPLPLPLPAALVSSDKKKVADKKQKKARFMTDVPDEIIDF

SEQ ID NO: 176232 - protein, 61 aa, Oryza sativa
  unsure (1)..(61): unsure at all Xaa locations
  Clone ID: PAT_MRT4530_73C.1.pep
AKHQDTGMVTRAEFKVKHLGLLMVRXTMKYFRIDEKVIMSQKSTTIISYVATKDEIEGRIA

SEQ ID NO: 176233 - protein, 966 aa, Oryza sativa
  Clone ID: PAT_MRT4530_74000C.1.pep
MARLVTVAAAKVKGSASRFRYVCSTPRTLDQPWIIAGGKVIATKIRNATQLLSCKLGELVPEAWRECPNCKCHIDNSDVTLQWPEFPDGVKFDPSDLEVLEHLERKINLGNPGPQGLIDHFIPTLEKVEGICYTHPENLPGIKLDGTSSHFFHRISNAYGSGQRKRRKISHTGHAASDENIRWHKTGKIQQIYHNGVLKGWKKILVLYKGSKKNKIVQANWVMHQYNLGVEEGGEDGELVVSKVFYQLSSKQTGTPEMDSVTEEASDALTIRSDPITPITNPPLPRCLMNSPCDTEQNGTISHDQEGECSTSTLRPMVEAGNRAGCSAGASTAGDFNEDLLQRCEFPEDPVPTLDDTLPFLYTDETDLFSWEDFQFGSQESFGWVDGDHTLVQFLYLCMWDRLLVDDLLREKSIPLPNSVENSRKTLLRSPQFHMAPPTSAAAAVAAAARASPTSAAALALFKSVLSADKALSPLAVLPHLDGAPSSLPNLLLTASAAVRPHATSLRLYSRMKSLSLPISTASLHPLLSALPSAPAFALFADMFRLRLPLCTTTFNIMLRHLCSAGKPARALELLRQMPRPNAVTYNTVIAGFCSRGRVQAALDIMREMRERGGIAPNQYTYGTVISGWCKVGRVDEAVKVFDEMLTKGEVKPEAVMYNALIGGYCDQGKLDTALLYRDRMVERGVAMTVATYNLLVHALFMDGRGTEAYELVEEMGGKGLAPDVFTYNILINGHCKEGNVKKALEIFENMSRRGVRATVVTYTALIYALSKKGQVQETDKLFDEAVRRGIRPDLVLYNALINSHSTSGNIDRAFEIMGEMEKKRIAPDDVTYNTLMRGLCLLGRVDEARKLIDEMTERGIQPDLVTYNTLISGYSMKGDVKDALRIRNEMMNKGFNPTLLTYNALIQGLCKNGQGDDAENMVKEMVENGITPDDSTYISLIEGLTTEDERAIDDERLAAADAAKV

SEQ ID NO: 176234 - protein, 53 aa, Oryza sativa
  Clone ID: PAT_MRT4530_74001C.1.pep
SFFLNEQKKYARLNALNLKNTLTPEQHTLKATISLYTISSTQTLHEDSYLRGS

SEQ ID NO: 176235 - protein, 47 aa, Oryza sativa
  Clone ID: PAT_MRT4530_74002C.1.pep
MEKTLWHTSDDLQISSRIVLKVGFDHWTILRGSGGWAVTATMQDILI

SEQ ID NO: 176236 - protein, 128 aa, Oryza sativa
  unsure (1)..(128): unsure at all Xaa locations
  Clone ID: PAT_MRT4530_74003C.1.pep
TVARAGQMGYHHRTSVNHKIYRIGKGDADDNXXTEIDVTKKTITPLGGFVRYGEVKNDFVMLKGSIPGVKKRVMTLRKTMFPQTSRRALEKVSLKWIDTSSEFGHGAFQTPAEKKQYQGTLKKDLSSA

SEQ ID NO: 176237 - protein, 410 aa, Oryza sativa
  Clone ID: PAT_MRT4530_74004C.1.pep
MAPTTTATAAAEQAPPPQHTRKAVGLAAHDDSGHLTPIRISRRKTGDDDVAIKVLYCGICHSDLHTIKNEWRNAVYPVVAGHEITGVVTEVGKNVARFKAGDEVGVGCMVNTCGGCESCRDGCENYCSGGVVFTYNSVDRDGTRTYGGYSDAVVVSQRFVVRFPSSAGGGAGAALPLDSGAPLLCAGVTVYAPMRQHGLCEAGKHVGVVGLGGLGHVAVKFARAFGMRVTVISTSPVKRQEALERLGADGFIVSTNASEMKCNFARLCKPKKSLNTTDAPHCRQSILRLFGQAAMGTMHGIINTASASTSMHSYLALLKPKGKMILVGLPEKPLQIPTFALVGGGKILAGSCMGSISETQEMIDFAAEHGVAADIELIGADEVNTAMERLAKGDVRYRFVVDIGNTLRSD

SEQ ID NO: 176238 - protein, 109 aa, Oryza sativa
  Clone ID: PAT_MRT4530_74005C.1.pep
FFFFFFFFFFFFFFLLGFFFYFCFFFYFSDKPNKKKSLLNHVQIFGPNENGHTKGAKTFLGGCSKLDKPVEFNFKPGFTPILKKWNKPGVNFGFPPGVKSGGGEKNTRC

SEQ ID NO: 176239 - protein, 78 aa, Oryza sativa
  Clone ID: PAT_MRT4530_74006C.1.pep
ARQGAITHGGPPRCLLLMRHAAGVGEEVRGVRLSDLPAGGVILFILRTDRAILVQEIYGLVVNAVHGLEQGTVDQLSP

SEQ ID NO: 176240 - protein, 152 aa, Oryza sativa
  Clone ID: PAT_MRT4530_74007C.1.pep
MASSSASPQLSSAPAAAATFTICCAASAAFVDASGRVAKKNALVIAATTGADDINRPFLVRLLSEIGLGVRVEDNRKRRPAKTRREDWAGNRRGRQLRGDGWQRSICDTPVRRETRWAAEGEGIALHVTRDRMARRGTHKAHANPCYRPAID

SEQ ID NO: 176241 - protein, 49 aa, Oryza sativa
  Clone ID: PAT_MRT4530_74008C.1.pep
SCQATDSPVPSFYKGCKLIHCMDASLVIVLRMNGFVHVFPPDCPLPAYN

SEQ ID NO: 176242 - protein, 51 aa, Oryza sativa
  Clone ID: PAT_MRT4530_74009C.1.pep
CMLGRPVVDLSRMKVEIIHRPSPYMKIQPPTPLIPDAAFSAARSPQCLRWF

SEQ ID NO: 176243 - protein, 77 aa, Oryza sativa
  Clone ID: PAT_MRT4530_7400C.1.pep
LGGREVAYRRPGFINPGLFYGPVPERGALTMRLGAPPRCCAVFRQIPFGEAPAVVHFCATPCRGWSHFALVATAAPR

SEQ ID NO: 176244 - protein, 1099 aa, Oryza sativa
  Clone ID: PAT_MRT4530_74010C.1.pep
MRRRASAVFLLAWLVAGVVKAAEAASGMARPLAYDYSSSSECLPEPMDAHYGGGIIRNGDFSAGLQGWSAFGYGSLAVGSSPAGNRYAVATNRTRPYQSVSQKVLLQDGTHYTLSAWLQVSDGIADVRAVVKTAGGDFIHSGGVEARSGCWSILKGGLTAAAAGQAELYFESNATVDIWVDNVSLQPFSREEWSAHHGAAIKKARKKTVRLQARDAAGNPVAGARMHIEHVRNGFPLGSAMSKEILTNPGYQRWFTSRFTVTTFENEMKWYSTEAIPGREDYSVPDAMLRFAKSHGIAVRGHNIFWDDPSTQMGWVKALSGEQLRRATEKRIKSVMSRYSGQVIAWDVVNENLHFDFFEGRFGWEASAAFYRKAHQMDGGALMSMNEFNTLEQPGDLTVLPGKYLRKLWQIKAFPGNGNAARMGIGLEGHFSAQPNIPYIRAALDTMAQANAPIWLTEIDVAPGPDQARHLEQILREVYAHPAVHGIILWTAWHPQGCYVMCLTDNNFKNLPAGDVVDKLIWEWKTRSHVGVADADGYYETELFHGDYKVTVTHPAANSTVAQSLSVDRESDNEFTIHCVKEPEKPLYGGGILKETEAKGYASGKKLLSENSKSAAPVKGSALKVDLKKDHHYALSVWLQLSKGEGDIRAVLVTPDGKFNTAGMIAAKCGCWTMLKGGATSYDDGKGDIFFETNVTAEVMAEGMALQPFSFDEWKGHRAESVKKERMKKVKITVVGPDGKPVPEADVSLERVGKGFPLGNAMTKEILDMPEYEKWFAARFRYATLENEMKWYSTEFHQNEEDYKVSDKMVELAEKHNITLRGHNVFWDDQDKQMDWVEKLGVPELKEAMAKRLKDIVTRYAGKVIHWDVVNENLHFNFFEGKLGKDASAEIFRDVAKLDSKPILFMNEFNTIEEPNDAAPLPTKYVAKLKQIREFPGNADLKYGIGLESHFAAPNIPYMRGSIDTLAQAKVPIWLTEVDVKPCKNQVEYLDEVMREGFAHPAVKGIVLWGAWHAKGCYVMCFTDNSFKNLPVGDAIDKLLKEWTAGHTGKTDSKGVLEVEIFHGEYNATVKHKEFKENCMTLDLDSKAEAKIELRSGTY

SEQ ID NO: 176245 - protein, 133 aa, Oryza sativa
  Clone ID: PAT_MRT4530_74011C.1.pep
MGYADVSKGGAGADRWAPHVSGTQGRGRTVDAVHRGLGRAVDQDHGGPRAATGQGGGGEKERREMLTECLWQGSGAGSSTMRDGGGRAPAMADGRGRVAEGRWGAVELVVGAARRGDSYGGGVSATGGGVSGW

SEQ ID NO: 176246 - protein, 59 aa, Oryza sativa
  unsure (1)..(59): unsure at all Xaa locations
  Clone ID: PAT_MRT4530_74012C.1.pep
ALALKTLCALALPYVMGQKNLKASKIMPTXDVPGPRALKFAFYLFKIATGGNHIPPKKK

SEQ ID NO: 176247 - protein, 36 aa, Oryza sativa
  Clone ID: PAT_MRT4530_74013C.1.pep
HGDQTVGQKPGYKTGEGGDDTVDTYGRETGSDHHGT

SEQ ID NO: 176248 - protein, 435 aa, Oryza sativa
  Clone ID: PAT_MRT4530_74014C.1.pep
MADNRRRRGAAIAGLNTVFVQKPDRVVSRLRPNLLFTILIGRSGPNILISCTIAFLSYYILCLLSSTYILLVSTTLILAIATSRPLRCHKPATGYSILSIAGMGGAQNERYQQGNTNRVPDDLYAKFMFKIPSFLGYYDAEKYLDWEMTIEQKFSAHLVPEHHRVQRATSEFKDFAIIWWTGLAAEGVLPTTWEEIKVAMHDRFVPSSYHTDLSKKLIRLEQGDKSVKDYYGELQKELMRCRIVEGTEDSICRFYSGLRREIQDIVDYKEFNTVNQLFQFAMLAEKELQGVINSIQCHRCHGFGYVQKVCPSQRACVATEDGYISISNIEDDEEEEKKDEEKKDLSIAPCMLEECSIDQAPIIYEDENKGNDNGATTNQGMHIYDVPTMSTTYATLEQPIVETIVENLCHNTICLMFLVIKKSCAMLHLYQCHNK

SEQ ID NO: 176249 - protein, 647 aa, Oryza sativa
  unsure (1)..(647): unsure at all Xaa locations
  Clone ID: PAT_MRT4530_74015C.1.pep
GPNQELLQVYFYLTTSLLAHRSSIIAFLCYYILCLPSSIYILLVSTALILTIATSRSSRCHKLATGCTILSIAGMSGAQNQXYQQGARDDSTLVQQVLSSQLEKAEQWQYHELFETKFVVKDRACRTIIDSESCNNFVSLDLVEKLELPTQPHPHPYYIKWFNSCGKVKVNRVVRINFLIGNYHDTANFDLVPMQECSLLFGQPWLYDNNGSHNFVANTYTFRQNGRKMKLVPMSFTEIFEDNLERMKNGIKEIFKDSIERTKNRIDVIFRDTRKDTIVMPSTKSELLQNERNVVPIVLDTNILQASENNQGNNDKEKKDEEEKVLSIAPCMFEECSIEQAPIISADEKKGNDNGATATQGMHIYEVPTMSTTYATLEQPMVETIAEIPLSQNNLLDVSRDKEELCDASLISMPQLVNEHASSIVEPPSVEFKHVIHIASENEEIKLLSSLNTWGYIQFDDICPLNCLKKKLFARFELPCPSDVIFHIIGNYEKKYMDAYWSATWSPCYASCESSNVVNSARGQTEIRTGNIDHKHTFDPDNSIVTLDDLSEDQRRELEWELKVESVELRKQKLARLLKKRKSVMEKQQKPINLELSSNKDEVVVLDFSRDIGVFVLPDELRAKKVDEHQVDGARYLENTEEMLEGH

SEQ ID NO: 176250 - protein, 477 aa, Oryza sativa
  unsure (1)..(477): unsure at all Xaa locations
  Clone ID: PAT_MRT4530_74016C.1.pep
VCSKLKRNLVVLKLHRATKAEFCVFSFAEVLAWAKEKRPNVTNAXMIKEVDWGPNQDLLQVYFYLTTSTLHFLISIIAFLCYYILCLPSSTYILLVSTALILAIATSRPSRCHKPATGCTVLSIAGMSGAQNQRYXQGARDDSTLVQQIWLRNLSCLHNRILIHITSNGSTLVASENNQGNEVEEKKDEEQKDLSIAPCMLEECLIDQAPTISEDDQKGKDNGATTAQGMHSYDVPTMFTTYATLEQPIVEAIAEIPLSQNNLFDVSCDKEELCDASLISMSQLVNEHVSSIVETPCVEFKHVIHIASENEEVTXLSSLNTWGYIQFDDLCSLNCLEKKLFASCLXLQVGLQEGECCGFSTTKILGSNHMAIKKCSAQDVVIDKDKYNTLHDKVKPRTISNQEGEDEEDITSSDITMTILCINQIKVHMFYIRFTCYIFEQTLLHNEFRVFSFAEVVAWAKEKRPSVTNKWMIEEVD

SEQ ID NO: 176251 - protein, 61 aa, Oryza sativa
  Clone ID: PAT_MRT4530_74017C.1.pep
MEHGGDEVLWDGASGVEEADITATAIAAGGGVGGVEEEIVKLLVRCFYSYVGFFPGIYFLY

SEQ ID NO: 176252 - protein, 196 aa, Oryza sativa
  unsure (1)..(196): unsure at all Xaa locations
  Clone ID: PAT_MRT4530_74018C.1.pep
MVVVTLAMKGGGRPGARWGKAEEEEGGAVTMAXATAAAVAAAVGLHGGQRWDRGAARRAASSPFNLTASASYRPAPCGSPQCVLISXVFMQRNYHGLEDKSPGCSNFLALVPWTPPQIATASNWSSSDSEKREFFEVPMESDETEVDSMDVEESLEANAAAIDGESLHQWAVATTLHDPIVTTKPFSTCYVFKVTE

SEQ ID NO: 176253 - protein, 118 aa, Oryza sativa
  unsure (1)..(118): unsure at all Xaa locations
  Clone ID: PAT_MRT4530_74019C.1.pep
SVGIPSILGYTSCTGMVYLRVYGRSLYMLRKFIMESTDGRSPTRIELGRHCIVXGPMSPSSTWRPTDLRYKRDPXREDLRHRISPPTQPPQPTKSEPSGAXHRGDLIEPTRLRSRRYH

SEQ ID NO: 176254 - protein, 567 aa, Oryza sativa
  Clone ID: PAT_MRT4530_7401C.1.pep
MRLWFLIPLLLCFPTLIRSEDYSDVTIVVRGAETIASTSNEFICATIDWWPPEKCNYDQCPWGQASILNLDLTNPLLAKAIQAFSPLRIRLGGSLQDQVVYGTPNLGSPCTPFSKSSSGLFGFSQGCITMERWDAINKIFMDTGAVVTFGLNALQGRQQMGRGVWGGAWNSSNAREFMEYTVSMNYPIDSWEFGNELSGSGIGASVGAEQYGKDIIELKNIISQLYGNSRKPLVVAPGGFYDQKWYAQLLDISGPNVLDTMTHHIYNLGAGNDPQVANRILNPQYLSQSSDTFRDLQMTIQRHGPWSAPWVGEAGGAYNSGSRKVSNTFLNSFWYLDQLGQSAKYDTKVYCRQTLIGGNYGLLDTETFVPNPDYYRQVFLYFALPQSCFTTLYTFCTKPRYMFSALLWHRLMGKGVISLDTSGSSYLRAYAHCGKQKGGVALLMLNLNKNMGFMVSVRNDLNINFREMAGIKRDNSFVHGLKRTVSWVGSKASDGLEKREEYHLTPQDGNPFARTVLLNGAPLQLTGDGDIPSLPPVMVSVNSPIYVAPLSIAFVVFPDFEAEGCER

SEQ ID NO: 176255 - protein, 190 aa, Oryza sativa
  Clone ID: PAT_MRT4530_74020C.1.pep
CLYSRSNPPSIKGMSGAQNQRYQQDLVEKLELLTQPHPHPYYIKWFNSCGKFKASENNKGNEEEKKDEEEKNLYIAPRMLEECLIDQVPTISEDEKKGKDNGATSAQGMHSYNVPTMSTTCAKLEQPIVETIVEIPLSQNKLLDVSCDKEELCDATLISMAQLVNEHVSSIVEPPSVEFKHVIHIASENE

SEQ ID NO: 176256 - protein, 260 aa, Oryza sativa
  Clone ID: PAT_MRT4530_74021C.1.pep
MLLNVTPSPMLTYTVFGYPAQHPLLAAQHAQDVAFSGRLYLGRCVSPKGIDTRIDVFIDDLTLTSRDSTVKGNQIDPLSLLPPFCSPLPGPSDAAAQTVAPLFPADQPSSGAAPLHQLLRAPEEVGLLNAASESAAAAAAVGFPPVRMPTPTGAASPTQERCRRPFAGTCRLLAGAGPRRTRRHLHDDYTKPCFYRFFNQPRASGQPLPVESSSPESSSHPPKVSDPPIESPIASAAINPSTTSSHLPVDCSHQTVQTTA

SEQ ID NO: 176257 - protein, 46 aa, Oryza sativa
  unsure (1)..(46): unsure at all Xaa locations
  Clone ID: PAT_MRT4530_74022C.1.pep
GISLTLLQYRPRTVLILXPSTPMAFQCPPRYYFPIHQLSPSXRCVL

SEQ ID NO: 176258 - protein, 131 aa, Oryza sativa
  unsure (1)..(131): unsure at all Xaa locations
  Clone ID: PAT_MRT4530_74023C.1.pep
SGAAPLHQLLRAPEEVGLLNAASESAAAAAAVGFPPVRMPTPTGAASPTQERCRRPFAGTCRLLAGAGPRRTRRHLHDDYTKPCFYRLXFMAQTPTAQEIGSDLFIALVGLIRLQSLQSRGIPAASILGKT

SEQ ID NO: 176259 - protein, 264 aa, Oryza sativa
  unsure (1)..(264): unsure at all Xaa locations
  Clone ID: PAT_MRT4530_74024C.1.pep
MGYNQAPSDVEDDEEEEKKDEEXKNLSIASCMLEECSIGQAPIICEDENKCNDNGATTNQGMHIYDVPTISSTCATLEQPIXETIVEIPLSQNNLLDVSCDKKELCDASLISMPQLVNEHVGSIVKPPCVEFKHVIHIASENEELKLLSSLNTWGYIQFDDLCPLNCLEKKLFASCLNELQVNLQERECWGFSTTKILESNHMAIKKCSSPDVVIDKDKFNTLHDKVKPRTVSNQEREDDEDTTSSDITMTNLCINQPKVHMFY

SEQ ID NO: 176260 - protein, 271 aa, Oryza sativa
  unsure (1)..(271): unsure at all Xaa locations
  Clone ID: PAT_MRT4530_74025C.1.pep
GCRRPREPPPRYRSVAAAPSPVPATSSQESARVELAGTCTTTTPSRAPTARSSSPKPPAAQEIGATTSAASVSVAGTPQXQNRAHHHDPDLQASXYASNILVPEQTHTARPPTSPPCSTLSLTPPKQPVGSTRSDFRLNAINLVANRSRQVACRLPSRRMTRVLHLAVSLSNAAHRKAXGHPPRVFDSTDRERQSPPASINPERLASRSLLKIAHRKVXATRPKCSTHQLNCQSLPPPSTRAPRLVISLLIAAIERFRPPPEMSDSTDQIP

SEQ ID NO: 176261 - protein, 479 aa, Oryza sativa
  Clone ID: PAT_MRT4530_74026C.1.pep
LHFLISTFAFLCYYILCLPSYTYILLVSTALILAIATSCPSWCHEPTTDCTVLSIAGMSGAQNQRYQQGARDDSTLVQRVLSSQMEKAEQWQYHELFETKFVVKDRAYRTIIDNESCNNLVSSDLVEKLELPTQPHHHPYYIKWFNSCGKFKASENNQVSKEEEKKDGEEKDLSIATCMREECSIDQAPIISEDEKKSNDNGATATQGMHIYDVPTMSTTYATLEQPIVEPIVEIPLSQNNLLDVSCDKEELCDASLISMQQLVNEHVSSIVEPLCVEFKHVIHIASENEEPKLQSSLNTWGYIQFDDLCPLNCLEKKLFDRVELPCPSDVIFHIIGNYDSKGEYNVHRVYICSNLTIPHFHDKMYCREDRVHTSNSLSSSSSCLNELRVGLQKGECCGFSTTKILGSNHMAIKKCSAQDVMIDKDKYNTLHDKVKPRTVSNQEGKDDEDITSSDITMTTLCINQIKRYLLGRRKRDRA

SEQ ID NO: 176262 - protein, 274 aa, Oryza sativa
  Clone ID: PAT_MRT4530_74027C.1.pep
MEGIEDVDTWCSCSDARDESTLVQQVLSSQMDKAEQRSYHELFETKFEVKDRACRVIIDTESCNNFVSLDLVEKLELPTQPHPHPYYIKWFNSCGKFKENRIVRVNFSIGNYHDTTNFDIVPMQACSLLFGQPWIYDNNALHNDIANTYTFRHNGQKMKLVPISVAEIFEDNLERMKNGIDEIYKDSLERMRNRIDEIFRDTKNDTNIAMPSTKSELLQNECIVVPIALDTNILQASENNQGNEEEKKDEEEKDLLLVFLTITYKIHKRTDIPM

SEQ ID NO: 176263 - protein, 342 aa, Oryza sativa
  Clone ID: PAT_MRT4530_74028C.1.pep
MADLNNNNGPRRPNLLTSSVNVNQSWISTATAPSIFSVEVVVRYEDEDNYESLVKYVEMTKALLPEDKRDKIKVPKKTKVATNKRTDVPEFGGRQQTGFLVHRHDNFIYILTTAHAVDSVYQKGVHQISILDLNVAFSFSIICTHHEEYLKSTQPDMKVSELVRSYSAASVIAIDTQKDLLLLEAEVDQLRLHDVDDDQFVACPFDHPVITMSLSPPAKDELVLMHGWPPHRVNSSVWGNASHNNRTYDVLTRSNVKGYDMRLMEVPQFDCSDGFSGSPILNGDSNCVVVYHAIIKQTKFGYCISLDDVRRFVTTALNNYISGSFVCDTRPEGICQGSLPAP

SEQ ID NO: 176264 - protein, 406 aa, Oryza sativa
  unsure (1)..(406): unsure at all Xaa locations
  Clone ID: PAT_MRT4530_74029C.1.pep
MLHDKVKLRTVSNQEGEDDEDTTSSDITKTTLCTNQPKMHMFYIRFTCYIFGKTLLHNEFCVFSFAELLAWAKEKRPNVRNAWMIEEVDWXQNQDLFQVFFHLTTSRVHHSSRTIAFLCYYILCLPSSTYILLVSTTLIFAIATSHPSRCHELAXGCTVLSIAGMSGAQNQRYQQGNNNRVXMILMLRLSLKYHLFLAYVATEDGYISTSNVEDDEEEEKKDGEQKDLSIVSCILEECLIDXVPIISEDXKKGNDNGATTTQGMHNYDVPTMSTTCATLEQPIVETIVEIPLSQNNLLDVSCDKEXLCDVSLLSMPQLVNEHVSSIVEPPCVEFKHVIHIASENKELKLLSSLNTWGYIQFDDVCPLNCLQKKLFARFELPCPSDVIFHVIGNYDSKGEYNVHEVY

SEQ ID NO: 176265 - protein, 61 aa, Oryza sativa
  Clone ID: PAT_MRT4530_7402C.1.pep
CCTCCDVSLDIIEKTTFVPIVDYSGSLEWTVGPVFFTPHTEEVFPRKSLVSCVHVLLLFRY

SEQ ID NO: 176266 - protein, 467 aa, Oryza sativa
  unsure (1)..(467): unsure at all Xaa locations
  Clone ID: PAT_MRT4530_74030C.1.pep
MRKKEVLAWAKEXRPSVRNAWMIEEVDWGPNQELLQVFFHLTTSLLHFLISTIAFLCYYILCLPSSTYILLVSTTLILAIATSRPSRYHEPATGCTVLSIAGMIGAQNQRDQQGNNNRDSVPPLPWIXHVQKVCHSQRAYVATEYGYISTSDVEDDEEEEKKDEEEKDLXHIAPCMLEECLIDQAPIISEDEKKGNDNGATTTQGVHSYDVPTMSTTYATLEQPIVETIVEIPLSQNKLLDVSCDKEELCDASLISMPQLVNEHVSSIVEPPCVEFKHVIHIASENKELKLLSSLNTWGYIQFDDLCPLNCLEXKLFSSCLNKLXVGLQEGKCGGFSTTKISGSNHMAIKKFSSTDVEVNKDKFNTLYDKVKPRTNSNLEGEDDEDTTSSDITMTTLCINQPKDQLQTDLTADLEGISGPIVLVGKLMESTFRWFWSHVKILTKLPGICKTSHGLAFSERSTGFRHG

SEQ ID NO: 176267 - protein, 911 aa, Oryza sativa
  Clone ID: PAT_MRT4530_74031C.1.pep
MDSYNGDGDNGGGYGDGHDGGGYGNGDNGGGFADGSHVSGYGDGNAVRVFGDGSHLGGYVPDSRLGAYGGGTTGPLYGAEHRFGAGIPTRDFLGQPLHASRDGGHPSFSSGGFGEGSSSSQNPSRLEFGALDLNSGDDWSSVHAYEDLLRGGGCATGQVLKGLLDLGRDVPFRCRLEDSADRIPLLLGSKRQWLRIPLLLGSKRQWLRHLEVQAKEASSCLRSGRQLRLLLRVEAEVGVAVHGLGRHRYKNFNIKFCTFILALSHASDCCLRFFQGHPELRKLKNGMPDHLDELDRMFMGVAVDGSTSFVPTHRASQPANPIVDVEDSDDDEESDKDYFDPLSPSSVGTKRSHSMRSTPSTRSMATSPSKKLKSPAVRAVVKEMQVRNNLQKDKATSIDTLFGRLDQRRDDDDARARQKAERIMALCRECRVTEATPPLWVAMFKLLKDRDAINVFELSNPEGRKTLLEHLAREDVRPDPADTSEEVSDKDLEIILVEYFMDDSADTTFLYGAYFIATHIDKYCNRSDYRDHSTTMSGLEWVEHKLADRKRCYNMFRMTPDMFYSLHDLLVDKYELKSSTKSTSIEVLGMFLWMCGAPQLVRQAEDRFECSLGTVHNMFHKVLASLLKLAADIIKPRDPQFTTLHGRLRNPRFYPYFNDCIGAIDGTHIPVQVSKDLLVQHMCRHHITTQNVMACCDFDMIFTFLLVGWPGSVHDMRVFHNAMSTYSHVFPHPPPGTQLPVVILQCLTSITCNLQVITAAGKYYLVDSGYANRIGYLAPYKGTKYHITEFQNAPEPEGKEEVFNYAHSSLRNVIERSFGVLKQKWRILKYVPCYPREIQTHIIVACMALHNYIRLAGLRDKHFGRCDRDENYVPPEAYEDQPPEDEAPSYLQCEHMNAFRDTLALELLHRA

SEQ ID NO: 176268 - protein, 108 aa, Oryza sativa
  Clone ID: PAT_MRT4530_74032C.1.pep
PPFLGGKRKLVFVPYEGKWFDHLHDPGCCALTSHGGCLDLSIFVNPFGAFKGHVCNLGLNIFVKQFGAPAQPQLSPGVGPWGQVVVEQNVECLVFFCKRRGGALLHSC

SEQ ID NO: 176269 - protein, 62 aa, Oryza sativa
  Clone ID: PAT_MRT4530_74033C.1.pep
IINRTKREINGPHRFNPGDFVGFPISLNLYSILHYSWSFTHPTVLIAYSNNGLKIKLFACLC

SEQ ID NO: 176270 - protein, 788 aa, Oryza sativa
  Clone ID: PAT_MRT4530_74034C.1.pep
EPSTVQLVIIVSCTSMSDLFVRLARFLNLKKEASSFAGRLVEPVLLLLNGNGQVAVGSFPPQDEAVDLLRTVIKLYPSSLNRHYNKDYSIMLSASPNGGDKASLGGGVDFLGARVESAIATNVMSSEVNIKLKEKFARALASLPSVRVSEESWSLMIQKILIVVNNLLNDAFIGLEEEKKGHEILMLLVPPGNDPPLMLGDQTKWSGGNVHVTKKFRVYTVPTISVLIHCCCVMLTSYYPVQVNVPVRALIALTRRVLSVDGSLHKKLFPSTTSLHQELICFELPSLHSTFLDLLSATIKGMRSQLLPHAANIVRLITKYFEIAKLSTMRTKVYGIVQQLLTSMGVGISMHLLEAIVSNSVADLDDSCGQDMTSLSTKPTIATNESSSKSYSKKRKQETDSQNLHVSGSDKTVISPKKRKSSSMSTTSETTADVRMLTPLSVKLAALETLEILLNVGGSLRTDHWRAEVDLLLINIARSACDTGGRYEYKLSSAVGETSIADFQLASLKALLASFLSSHARPPYLAQGIELFRRGKLEIGTKLAEFCSHALLALDVLTHPRALSLESAAPSGPGLTYGAPEKAIFGTEKYRFSLSGNQSQALEDDDPYDDWLTSTKVSEPTGSPAKDSPVGKEKAIEKSQGEKQITPVEEHQQIDLAVVPAAIQDVPTSGKTDIEMADAATTETVNLKATDNPSSSNDGLTQVRTLLPDLNQQVAAPVSDEGHTDIVDHLRNKTSAFDASLSKTVTGGEAPQSGSGSSHFMQSSKTDDSDVESEDSMPGIVDGDPDSD

SEQ ID NO: 176271 - protein, 148 aa, Oryza sativa
  Clone ID: PAT_MRT4530_74035C.1.pep
HEGYSDRRHLSHLNFSSTSPPLRRRPYTPPPLLPPPPPPDQGPRRVALSLLNPWFLVVVRCSPPYHAAGLGALPTLTPPAPRRPPARRRLLLPLHPHISVVLSSPAPIGVPGSWIDERGGAEVWRWGWWGDGGAVAGFARPGARPGAG

SEQ ID NO: 176272 - protein, 109 aa, Oryza sativa
  Clone ID: PAT_MRT4530_74036C.1.pep
MAKGATCGGDVRQWPWPREMAVAVAVARDPGCDWQQHIDDDRGTVGRSTSKWRGSRQHRVMGGFSHGDGVASNGTSPVPTITVGLPSCTDQGIGPEWKSALGVAIDWSA

SEQ ID NO: 176273 - protein, 108 aa, Oryza sativa
  Clone ID: PAT_MRT4530_74037C.1.pep
MAKGATCGGDVRQWPWPREMAVAVAVARDPGCDWQQHIDDDRHINKLSGAASMANLPRVMGGFSHGDGVASNGTSPVPTITVGLPSCTDQGIGPEWKSALGVAIDWSA

SEQ ID NO: 176274 - protein, 126 aa, Oryza sativa
  unsure (1)..(126): unsure at all Xaa locations
  Clone ID: PAT_MRT4530_74038C.1.pep
CNTPDNHCRCRLTHVVGEDSIWHTMEILCVYGMRIRILKESKFGMIGXVKLVSCTGRYTRWIRTSCISLVRGFRLPTSCINREGGSNRRDTSSQTGGYTAVRLATVTGSRGDFGTVGPVNLYRSDR

SEQ ID NO: 176275 - protein, 107 aa, Oryza sativa
  unsure (1)..(107): unsure at all Xaa locations
  Clone ID: PAT_MRT4530_74039C.1.pep
MDLNNLTNLHGLYGXDDLTXKYYFKLRRQNXLEVSAKATCVSLCXYVNLSNGRSTSNLVYKSKLCVRYASIVMIPGNSTPLTIEQSQKGHTTCXMVLDMRGCEPINI

SEQ ID NO: 176276 - protein, 52 aa, Oryza sativa
  Clone ID: PAT_MRT4530_7403C.1.pep
WFPLLKYQIAVICIAISIHGHGLSPLPVYFVYHSYVSYYFMCQQTYFLVLKV

SEQ ID NO: 176277 - protein, 94 aa, Oryza sativa
  Clone ID: PAT_MRT4530_74040C.1.pep
KGGRALPYPGAKKTRGLKPGGPLQGDIIQEGGGFTQKKTGTFIFFLKIPPGNPGGGGNRGSKLGENGKKNPFEDHQNIRDGPREGPHPQPKRGG

SEQ ID NO: 176278 - protein, 80 aa, Oryza sativa
  Clone ID: PAT_MRT4530_74041C.1.pep
YVMLTRIAYNRPISCTSLCKRRSDRQKKYIVINFLILPKTKMNRLHCFQKKARGDSTIFSMNNEHVQESLLHLSTSYIST

SEQ ID NO: 176279 - protein, 147 aa, Oryza sativa
  Clone ID: PAT_MRT4530_74042C.1.pep
YSHGPHRRRCQLCLCNVENVSFLPWCYVPPSDPPHQYLLPYPISRAQQPSRRILAHSSFPPISSLLTVAPVPLQLLQSYSPAPLGPSLPRYAAQDRQPLVFLCPPCLRSFLTFICSSLASSAYVAAWLATYGSFLVPVLSPRRRRRP

SEQ ID NO: 176280 - protein, 386 aa, Oryza sativa
  Clone ID: PAT_MRT4530_74043C.1.pep
MPAVWRGTARLPHFVSLCVAVAGLLLMLLGGGEASVHEYRGLGFLNKGNAFILHAGSEGLYAPSSPANATTAEDDEDAAAAAVADAFIRCRFAGIAWAIEDASDLCDERFDKITFRRPKDAAKETGSAMVQILVFEIEDREMIGGSAYGGQKAICCTSDLAKLGACTEGSVIYRPSQVNPGWPQLLFSSFDGSDTIATLPSRIIPITKTGMYNMYFIHCDPSLAGLEIEGQTVWKNPTGYLPAKTLDKLQARRSMAKLDIYRKFTIALAVTVLVSIGWIGYEIYFKSTDVFNERWQYAWIIPAFWHVLSFSLLCVISYLWAPSQNSMRFTYDASENFDREDSLSLIRPGPIASKNGWSLSSSPDTKATKNVTVTSFDGDDEENKRE

SEQ ID NO: 176281 - protein, 335 aa, Oryza sativa
  Clone ID: PAT_MRT4530_74044C.1.pep
MARVTMFQKQMDRQWMYADRWLKEFIDGVHYFLRVAEASKHKGFICCPCIKCKNQKDCTGFMPSYNCWTSHEEIGVQMEEDEVEDKNIPDWVQYAGFEGNRTGEVDGDVDDNDAADDLGEVDGQPTKKRIPAKVVWYFPIIPGLWRLFRNNGKPRMVCWHAEERQQDGILRHSADGSQWRNIDRTFKDFGEDARNISNLFGQSNKGYKACTHSMAETESTYLKHCRKVVYMGHRRFLVANHPVRKKGKHFEHKADHRIKPKHRSGKAMFAMVKNLKVVFRKGPGSQPIENEDGHATMWKKNYIFWELPYWEFLDVRHAIDVMHLTKNLCVNLMGF

SEQ ID NO: 176282 - protein, 97 aa, Oryza sativa
  Clone ID: PAT_MRT4530_74045C.1.pep
TQKSKGFLLLSLAAAARRLSSSTGGKVRSPSSLSTPADPFSRPRSLGCILFRVADPSARTLGGVLFFFFFYSRIVWIWFLGEQTFRFAWVIRFVMRC

SEQ ID NO: 176283 - protein, 88 aa, Oryza sativa
  unsure (1)..(88): unsure at all Xaa locations
  Clone ID: PAT_MRT4530_74046C.1.pep
VSNYFCCHGSSSEVCLDFVFWFIKTKYSXALSRTDLFCSAVSSRVESPSLLKTTNFFVSWTLIGLLHGPIFSXNYRXPCINILGLLSD

SEQ ID NO: 176284 - protein, 80 aa, Oryza sativa
  Clone ID: PAT_MRT4530_74047C.1.pep
RYVVVKKGQSQGCVYIAFKINPNFIVSHNSGKSSIFRAFPTKVLANANCISKEEAQRLKPSTGEEFGAFIPLQSKSFQGV

SEQ ID NO: 176285 - protein, 85 aa, Oryza sativa
  Clone ID: PAT_MRT4530_74048C.1.pep
RSDHRSSSTSAATASPDQVPDFVIAGNYYGGACTVFAGNSNSDADAAIAQITRPNLAGTLVGLTRSVYTARINPGIDQAFILSLV

SEQ ID NO: 176286 - protein, 84 aa, Oryza sativa
  Clone ID: PAT_MRT4530_74049C.1.pep
MASSSAMVRVVVVAVLLMQCCNAIMAARLLEGDLFGSSWLQGLQGGVATGELILQVLDKGTSDSEGNGCHQGPGGGSGASCHQP

SEQ ID NO: 176287 - protein, 82 aa, Oryza sativa
  Clone ID: PAT_MRT4530_7404C.1.pep
MASLLLLLRAIVIGVDVEERQLVSGAREAAEEAERSCSKHPAMPRRCGFFSDNDVEEERWLAKFVRLMSDAIFLIADAQLAL

SEQ ID NO: 176288 - protein, 356 aa, Oryza sativa
  Clone ID: PAT_MRT4530_74050C.1.pep
MASSSSGKRVSSSSTSSHQQHAKRRRRAPGDELSQTHGVARNAVAAMPMVGVAPLMLSPVTMQAQLLCYVAMPMAPVAGGGVPLAAALCRLRNGTLERMMREMAQECTPPLVARRDRKSGATPPPPPPWWPTAEEPWWGTEVAAHLRGRRMATPVPFASPRRLAKAEKVAVLVAVVRHVAPDFGRLAAAAGRSRLTELESSIWESALRGERERRYVVMPSFILLPPPPPPPPQHAHSAESAAAHAGPEPESADQTAVDFSVSGEDTVTTGPELEQLVGDGNGATVEGEGQKTEDSPVPPLLEQHGGEDHDHHRQHGGFSGEVSGAAPEDVDWFDYDEVLRGLDELEIPSFFGGYYI

SEQ ID NO: 176289 - protein, 313 aa, Oryza sativa
  Clone ID: PAT_MRT4530_74051C.1.pep
MGSATADSRSGIKLFEACINSNLRSFLHSVTPTLEPYTVAKPGGYSGRVPELGRCFFLVDLWNHFYPLSAYGVGTPVRLPSGQEIEQYFVPYLSAIQLHTISDFTSCNEIMVGNNLFDANNYGWCSAADNWNGQYATTSLARYDSPRSMNGGPCFQYFECDSPYERMPLADKVYELCYNFPPLSYLSSIELSPSSWMSVFWYPIGHVPAMNKKDLTTCFLTYHSLSTLEDRTPFDSKDPLTLPPIGLATHKTDGDVWTSANSGDQELTTSLVGAADSWLKKLDVQHHDFNYFLNSNRNLIHYRSLTEASTSAV

SEQ ID NO: 176290 - protein, 90 aa, Oryza sativa
  Clone ID: PAT_MRT4530_74052C.1.pep
SRAPSILSGHHMPLLHQRLRSITMITGYLPGLLRLAHNILHHWSNGYMDSPRMDITKDDALHAPTLEEHQMICCCATCMPHSAKLLRPVP

SEQ ID NO: 176291 - protein, 338 aa, Oryza sativa
  Clone ID: PAT_MRT4530_74053C.1.pep
MVAHGVLPSKEIIGWRPVFGEPFPTPDTHEIVERMYKILSSSIVVDFTHLLPVVPFNAFNPPPAENALMKSDPPIVQCRSLRRHQGQATGGPKIQPGGQKSSANLAKQAGSWKRKMIIDDDDDSDDESIGKQLKQATPSKKKTTSRPMPKIRRTSRKPPDIGPSSKSTDPPASSKAIEEGKTSPATGTGTFRVETPTGEKPTTGEADANKEPPTGNQSASAEASTNQEPLTGNQSAVHVADSQDLERRIKALENDKAALSKERDLVVKEFEDHMGKTKAQFDLLINKVEIAEKARDEVANIATPIIQAMYHCNSGTSSLDAMEIFDKLAIWEQAWPWQ

SEQ ID NO: 176292 - protein, 46 aa, Oryza sativa
  Clone ID: PAT_MRT4530_74054C.1.pep
VQERGIAYLGLKFSRCETTIRHLAAPCGEYHKGENTVKRDKTCRHD

SEQ ID NO: 176293 - protein, 858 aa, Oryza sativa
  Clone ID: PAT_MRT4530_74055C.1.pep
MERNDQGFLTAIIKVESYFTTSLLSQRTYVKGNNVKISIERDRYPTDSQLLDWLDKGNQHGVVNIHAIVNDFGGPLQVEPSPTKRRCHPSVRYSIPCTPPLFTDLLVDATPLTLPESYNHLENSIQPVPSTQNESTTHPESTSHPDDEATSPIKKSAKKVVKKCAKRRSQADDDDEEVRDDEKEENEEEEPQLCPNCDPLEVDSDSSYDSDAAASSDSEYDCDDLDDQIHDDDDNDSDLEHVFAYDFDNPCIDEGEVFADTTTCKEAVTHHAIIHDYSFETEKKGKHRFRAFCKKKEQGCKWRFHASTSKKYYGCKVKVNRPAHNCCSINKTGAAMATNSWVAERVIDWLKETPTLGASALKVKLEKKYKFTIGYDKVFRGKEKALEKIFGKWEDSFALLPTFREELLKAQPGSIVDIDTEIHEDQVCFRRLFIALKPCIDGFLQGCRPYIAMDSTHLTGKHRGQLAAAVAIDGNNWLFPVAFGVIEAETTESWTWFVQNLKNAIGNPPGLAISTDAGKGLERAVSDVYPTAEHRECMRHLWKNFKKQYHGPLFGENMWPAAKCYTSQQYNYHMNKIAEKSPEAIAYLKTNHPFFWSRSKFSELSKVDYINNNLSESFNNWVMKIKELHIVDLFDTLRQMIIDKFHLRSQLASKMEGRIIPSIIKTLNEQSKNLKDYNVVRSNCDDLAEVSVVSNKGVVWRHAVNLKAHTCSCRAWQVSGKPCNHALAFIGSLRFPDMNGYVDECYSVQRLRQTYAGIWNPMTSKNMWTFVDPGFKLMRPKLRRKPGRPRTHRIKASDESGCRKKRTCPECGDKGHFAKTCQGGPIASKSGNANDVSTRPPRARGKGKEKKGSVAASI

SEQ ID NO: 176294 - protein, 80 aa, Oryza sativa
  Clone ID: PAT_MRT4530_74056C.1.pep
MHIYITRELSVTSQIKMGTCDQPNKLDKEAAVLHTHTATGVGVNGGGVVGGGFSVGVGEEESLPGVAASVAGGRKEERRS

SEQ ID NO: 176295 - protein, 472 aa, Oryza sativa
  Clone ID: PAT_MRT4530_74057C.1.pep
MSWLKEQGCKWRFHASTIITLLYVQVKVNRPAHSCCSINKTGAAMATNSWVAERVIDWLKEIPTLGASALKVKLEKKYKFTIGYDKVFRGKEKALEKIFGKWEDSFALLPTFREELLKAQPGSIVDIDTEIHEDQVCFRRLFIALKPCIDGFLQGCRPYIAMDSTHLTGKHRGQLAAAVAIDGNNWLFPVAFGVIEAKTTESWTWFVQNLKNAIGNPPGLAISTDAGKGLERAVSDVYPTAEHRECMRHLWKNFKKQYHGPLFGENMWHAAKCYTSQQYNYHMNKIAEKSPEAIAYLKTNHPFFWSRSKFSELSKVDYINNNLSESFNNWVMKIKELHIVDLFDTLRQMIIDKFHLSQLASKMEGRIIPSIIKTLNEQSKNLKDYNVVRSNCDDLAEVSMVSNKGVVWRHAVNLKAHTCFKLMRPKLRRKPGRPRTHRIKASDEPGCRKKRTCPECGDKGHFAKTCKQSRAA

SEQ ID NO: 176296 - protein, 895 aa, Oryza sativa
  Clone ID: PAT_MRT4530_74058C.1.pep
MERNDQGFLTAIIKVESYFTTSLLSQRTYVKGNNVKISIERDRYSMLALVDDVGENFNWGPNQYISFWKLGDVSTQSKVEITTDSQLLDWLDKGNQHGVVNIHAIVNDFGGPLQVEPSPTKRRCHPSVRYSIPCTPPLFTDLLVDATPLTLPESYNHLENSIQPVPSTQNESTTHPESTSHPDDEATSPIKKSAKKVVKKCAKRRSQADDDDEEVRDDEKEENEEEEPQLCPNCDPLEVDSDSSYDSDAAASSDSEYDCDDLDDQIHDDDDNDSDLEHVFAYDFDNPCIDEGEVFADTTTCKEAVTHHAIIHDYSFETEKKGKHRFRAFCKKKEQGCKWRFHASTSKKYYGCKVKVNRPAHNCCSINKTGAAMATNSWVAERVIDWLKETPTLGASALKVKLEKKYKFTIGYDKVFRGKEKALEKIFGKWEDSFALLPTFREELLKAQPGSIVDIDTEIHEDQVCFRRLFIALKPCIDGFLQGCRPYIAMDSTHLTGKHRGQLAAAVAIDGNNWLFPVAFGVIEAETTESWTWFVQNLKNAIGNPPGLAISTDAGKGLERAVSDVYPTAEHRECMRHLWKNFKKQYHGPLFGENMWPAAKCYTSQQYNYHMNKIAEKSPEAIAYLKTNHPFFWSRSKFSELSKVDYINNNLSESFNNWVMKIKELHIVDLFDTLRQMIIDKFHLRSQLASKMEGRIIPSIIKTLNEQSKNLKDYNVVRSNCDDLAEVSVVSNKGVVWRHAVNLKAHTCSCRAWQVSGKPCNHALAFIGSLRFPDMNGYVDECYSVQRLRQTYAGIWNPMTSKNMWTFVDPGFKLMRPKLRRKPGRPRTHRIKASDESGCRKKRTCPECGDKGHFAKTCQGGPIASKSGNANDVSTRPPRARGKGKEKKGSVAASI

SEQ ID NO: 176297 - protein, 310 aa, Oryza sativa
  Clone ID: PAT_MRT4530_74059C.1.pep
MAAAAAGGGGGGAPRALSQREQDIQMMLAADVHLGTKNCDFQMERYVYKRRSDGIFIINLGKTWEKLQLAARVIVAIENPQDIIVQSARPYGQRAVLKFAQYTGAHAIAGRHTPGTFTNQLQTSFSEPRLLILTDPRTDHQPIKESALGNIPTIAFCDTDSPMRYVDIGIPANNKGKQSIGCLFWLLARMVLQMRGTILPGHKWDVMVDLFFYRDPEEAKEQEEEEAALVAPDYGAVAEYAAPAADTWGGEWGTDAAAQPAAIPAQAGADWTAAPAPAAGGWDTAAAPAPGWEQGSAPVPAAAPTPNWGE

SEQ ID NO: 176298 - protein, 74 aa, Oryza sativa
  unsure (1)..(74): unsure at all Xaa locations
  Clone ID: PAT_MRT4530_7405C.1.pep
IPQPPVVLKEPAPPVSQYISFKAHAXSLVSPLAGKNSFFRAMPVDVFANASPISRGRAQNLXTHRGEELGAFFP

SEQ ID NO: 176299 - protein, 251 aa, Oryza sativa
  Clone ID: PAT_MRT4530_74060C.1.pep
MAAAATSPSAASSSGDSFCYKCICQWVKIVSTKHAEPLSSVQCPLCKTVNVSIIHGFNGESFERHYINQDPRKRHLSDAHDLITQFYSIRDIIGNTSSVQQFWKQRKYLRKNIWLQTWLRQEIQALTRDENVDAIIYHIHGVIESFMKRQEKGHASKMAPPEKRREEFKSLLMEAARPFLLGQTERFVAEVELFLVSHLNIDAYSRLRVQRLKESTSHVSREQDVLPQDRSLEDHYLYFLGDETDCNDEIW

SEQ ID NO: 176300 - protein, 196 aa, Oryza sativa
  Clone ID: PAT_MRT4530_74061C.1.pep
MTTTNHLVSPALLLLLALLGASVRRAGATTFEVGGEHGWAVPPAKDAGVYNDWASKNRFLVGDSVHFKYAKDSVMVVTEDDYNKCKAEHPIFFSNNGDTEVGLDRQGLFYFISGVAGHCERGQRMVIKVIGHDAPPPASPPPPPSNAPPYTASPQRRRLRARRRRTRRRGHAAAGLRVRCLMVTVAACTCVHARSN

SEQ ID NO: 176301 - protein, 46 aa, Oryza sativa
  Clone ID: PAT_MRT4530_74062C.1.pep
MARHPETRRYRARIDVAERALGETPSGRVEIASQVLSHVQLAVETN

SEQ ID NO: 176302 - protein, 123 aa, Oryza sativa
  Clone ID: PAT_MRT4530_74063C.1.pep
AYATTTTSTSTSTSGTSSTSTGTSTSSTSGSTTSGTTGTTGTTGSTVTTGGSTTGSSGAIQCTKDISQQCLDECAPQFVDYCRCNITTNTLVYVCKDSFSAAMSFGTPAYWIALILGLVALLQ

SEQ ID NO: 176303 - protein, 68 aa, Oryza sativa
  Clone ID: PAT_MRT4530_74064C.1.pep
IFRLFVLPLCYLKTLFFPNLFCFTTFLSSSPGILINNPHLFALHKQLALLYFICPPPSDRNLIRVFFV

SEQ ID NO: 176304 - protein, 66 aa, Oryza sativa
  Clone ID: PAT_MRT4530_74065C.1.pep
PPKERRKCQPPQVIPLCHLATDDSFETAGTLHCTPRSVIMWSLNYKTPEGCVCATCPPGLIPTVFL

SEQ ID NO: 176305 - protein, 323 aa, Oryza sativa
  Clone ID: PAT_MRT4530_74066C.1.pep
MAFINTISLLQRIEECTTYISEASRVLPTTKKPSIGKNPVPKNSTTNFLFRPEAQDTNFLVIYSTPATAALPRARGQWRCGEEAINGGERPRRRAAVGIGRRRCGLRRRVRPPRAVLAGTVSVQQPTSIHVDARAVHAIIVVLVVKRPLRRRRRRTRFGGGDALRCGLRFGELPGPGRRRREEAKLLLAVAVAAADDELTVAVPPRDGSRRPALPHGTRHRTRSQTCGERRANESDENFLHSDLTPSLQNTTEPVSSDSQPPAGLQHGDGWVRRPRHEEGPSGPRPAATSRGEGPGGWRRPRADRDLGGDLAWRWTPTVTFVD

SEQ ID NO: 176306 - protein, 667 aa, Oryza sativa
  Clone ID: PAT_MRT4530_74067C.1.pep
MMMRVLGFMGDGGGGGMMTAQAAAEAAVGAIGCGYDLTSDLRLSRVKAGGRLVDIDGASGAARRELVLPWGAVVGGVPVGIVADKGERTRFRSDVLSFAQMAEQVNQTMSVAGKIPSGAFNAMFDYHGCWHKDAAATGSLCFDGRFIELYAVEAPRAHLALLDRVKRDVPPFWDPAALAESVRLPPSRAARPAFVAFAATPVATDSSVLTWSLPNFLFRFIDKYGTHVIAGVKMGGKDVVCIKQLKGSNLTQSDVQSRLKKLSDDKLAQDSPESLTARDDKFLLGLNGSLLLGPGSAAWRSFRPSVVSHKDDILSIHIRRGGVDNGQGHSNWLSTISGSPDVISMAFVPITSLLTGVRGCGFLNHAVNLYLRYKPPIEELHQFLEFQVPRQWAPEFGELPLALGPRKKKNSLPSLQFTLMGPKLHVTTAKADSGNRPVTGIRLFLEGKKNNRLGVHLQHLSATPGTITIAGEVASAEDATVRERDYIEPIKSPLLSHVCTAPVQYNGARIDDCAAIVTRAWLEVQETCLKKVLFLRLGFSGVASTKIRRSEWDGPFVVSRKSGSLSALFSARLSAAGAGGSAQMMQQQQPVGEKVEVNSAIFPKGPPVPLPVQRMARYVDTTEVMRGPADLPGYWVVTGAKLCIEGGKVALKVKYSLLIAEVLDYPE

SEQ ID NO: 176307 - protein, 192 aa, Oryza sativa
  Clone ID: PAT_MRT4530_74068C.1.pep
MEPEREASSEWGDGVGALGFRVKASSREPAAQKAANVLEPDLRSHWSTATNTKEWILLELSEPCLLSHIRIYNKSVLEWEITAGLRYNKPDTFVKVRPRCEAPKRDILYPANHTPCRYVRISCMRGNPIAIFFIQLIGIPIPGLEPDLQPLVNYLLPHITAHKQSSQNIHLQLLKDIASRLPPFLPQIEGFY

SEQ ID NO: 176308 - protein, 132 aa, Oryza sativa
  unsure (1)..(132): unsure at all Xaa locations
  Clone ID: PAT_MRT4530_74069C.1.pep
IYIYIYIYIYIYIYIYIYVYIYIYVYICIYMYICIYMYIYIYIYIYIYIYIYIYIYMYIYIYIYIYIYIYIYVCVCVYIYVYIYIYMYSIYMHXYIYVYIYIYICVYIYIYVYIYIYIYIYTTMTGDSATAA

SEQ ID NO: 176309 - protein, 231 aa, Oryza sativa
  unsure (1)..(231): unsure at all Xaa locations
  Clone ID: PAT_MRT4530_7406C.1.pep
LPYCLLNVSFKFYTKVATNKITEVAQNVFSPTQTTFIPGRNIMEGLVILHXEMHRKKKSGVIFKIDFEKAYDKIKWSFVQQTLRMKGFSHKWYEWIASFIXGGHVAIKVNDQVGSNFXTYKGLKQGDPMSPVLFNIVVDMLAILISGVVPHLVDDGLSILQYANDTLIFLEHDLEKAKNMKLLLSAFEKLPGLKINFYKKNLVTMIRKQLSKELKKKNLVVGNVNICLYGE

SEQ ID NO: 176310 - protein, 78 aa, Oryza sativa
  Clone ID: PAT_MRT4530_74070C.1.pep
VGSSWLKITFRFEINGNPSDFLLHPQPCQLVNQQRRKPSRLCHVSHLCIYSRPDVSSSSTDLALPRKIYISEFVDPVI

SEQ ID NO: 176311 - protein, 73 aa, Oryza sativa
  Clone ID: PAT_MRT4530_74071C.1.pep
TVCFINWSLAITSKMINHLAKSFHKSYIYIGENPLYATDFVTHLQFTIDFVTLYNTPSTFDYPLRFTIAVRLE

SEQ ID NO: 176312 - protein, 126 aa, Oryza sativa
  Clone ID: PAT_MRT4530_74072C.1.pep
MAPPEVVAGAIPLRSRVSFARERQLNFAIALSYSDFATLSHFPGANIGGIALVYFHKSFAIRGGVSGGLEKIMWEEEEGGAGDRRAGRGRGGDQGGIGCEETEEEEEIRIQLRLMRLHENKINLRL

SEQ ID NO: 176313 - protein, 83 aa, Oryza sativa
  Clone ID: PAT_MRT4530_74073C.1.pep
MPPCKEGSLRRGRVGREVDRWRRRRFVVFCSHGNRRPPPRRAWPSPTKTSQAAKLTRAGPTDEKPAQPTLETVRRTKRRVTSR

SEQ ID NO: 176314 - protein, 224 aa, Oryza sativa
  Clone ID: PAT_MRT4530_74074C.1.pep
MRFTASPVVELPVGGAVLTFEQDNDSFEVGTSVWPSSLVLVKFAERCLRDPALPFADVLRFPGTRAVELGSGCGPAGLGLSRLGLADLVLTDIAAVLPALRRNLRRNRRHLPRAPRLAQLHWNCPAHLASLASPRRFDLVVAADVVYVPESVPHLVAAMDVLADADRGVVLLGYQVRSPEAHQAFWDAVPAAFPVIEKIPREHLDPDYAYEESDVFVLRRRPRQ

SEQ ID NO: 176315 - protein, 89 aa, Oryza sativa
  unsure (1)..(89): unsure at all Xaa locations
  Clone ID: PAT_MRT4530_74075C.1.pep
ITSGLSPYRPNNHSIPFIGHKLSSQXLFCTLCPHSCAPGKNLPVCHLSQITPDQVRLTSXFFEDQLPEKKLQPVDMSILLILLSPGPGC

SEQ ID NO: 176316 - protein, 98 aa, Oryza sativa
  Clone ID: PAT_MRT4530_74076C.1.pep
WSPVSLVSNPLRLVTPTPSSQTSPLRSKFQEYRHEFRRKRYHARRCIMSLPASLGLRYRCTSVVGPDPSCWAYGIGRLQQQHRCSAAPRGHRMAPAPG

SEQ ID NO: 176317 - protein, 523 aa, Oryza sativa
  Clone ID: PAT_MRT4530_74077C.1.pep
MRHRVGPAAAAAAALRRFSHLRPPAPPDPRLAFLRSEFDGREPGRQPPSPETREEPKGGERARSPVAVDIAHPWPEWVALMELLLQRGHLDASVFAGGAAGSPSKDSNVIRTACLRFGRERPELIRHLSRWDIQVALRYGCPSIDRKVVNSGKRLRAHVGLDEGEVCSQCNLRGGCERAYVKARKEEIGRTVDVMRILLTYGLDTVTGNVENRACLNKTVKESIKSLLNEIVGFDSMGPGSSTEKPTHRMPKGQSSIPMKQGDWNCPKCNFLNFAKNIKCLRCNGEFEERYQLLHENQEHLPLKKGDWICKRCNFLNFAKNTRCLQCHEKPTNRQLNPGEWECVSCNYLNFKRNAFCLKCGWKRPKSLNNQDSIESQRDLDDNKHSAISFIQDGIQSRRQILQNKAPLSDEDSDFWSSEEEGAYHSDKNIPPIKKDYKFLESFPIIGGRTAMSQDPLEREKWKDEMSRRNKGLLTEVSEESNRPSCPVRIPRSIEQIESGDDDDDDISSWFSGGTSNINMKKA

SEQ ID NO: 176318 - protein, 460 aa, Oryza sativa
  Clone ID: PAT_MRT4530_74078C.1.pep
MDHNQRLREILTYLPPPPASSNTAAAPPDGAGAGAVFTTSSSSHARGGDRISQLPAELLQDVVSRLPAADGARTTALSRPWARIWGSVPLVLDDALFVIPTTPQAGAGAVTGRISSRSHHAAVVVDKVSRAIDSHPGPFRSIRLTSTNFHRHDRLGHWIRAMGRKGGVEDLVLVHPGGVARAVTLPPEVLTCTSMVRLAVARCGLPPYTDVDLPRLRELVLCEGHFRAANKLGRMLAGCPKLESLTLINPNDMPYSAMEVVSSTMKILVLCIFHTKVLDLLDAPSLERLIIWRPMLVMSLYMFMIKITRAPILRAIGYLDTILHVVQIGGTIIEAGTKISPSLTIPSVETLAIKLSFGSKEQENRLLSFLKIFPNVKTLYVMSHPPCTSSCVFHDERDVDFWMKNLGSILCVHSQLTKFTFYNLHGVVLGDLPFIRAVMGTARLLKEMRLFPCDKIFFNR

SEQ ID NO: 176319 - protein, 135 aa, Oryza sativa
  Clone ID: PAT_MRT4530_74079C.1.pep
RARLGYPKTPTRRGRRRELTGAKNNDERRQTTAGDEVPRRHGLAQRRRRRSGGLRRLQRGGRGAPPPHEPDGGDGRRRRRPQQRRGVAEATTTTAAARATRWRRYGQRGGGGQGDGHDKASRRRRRVRQRWRELL

SEQ ID NO: 176320 - protein, 93 aa, Oryza sativa
  Clone ID: PAT_MRT4530_7407C.1.pep
ESNNRNWVTSTIPLSWFFVDLVFFPYDNCNGLFLDLHKHVPFLRNKVKKMACFAYYILMQQITNNKFSKINLKTTQKLDWEKIWTFIVYTFAI

SEQ ID NO: 176321 - protein, 64 aa, Oryza sativa
  Clone ID: PAT_MRT4530_74080C.1.pep
KQMGPPYTLKSHIVINYLRFQRCKFHIIENSFRGVLYRKCQHLPKMCKNTNLAFKRNLTVQVFG

SEQ ID NO: 176322 - protein, 156 aa, Oryza sativa
  unsure (1)..(156): unsure at all Xaa locations
  Clone ID: PAT_MRT4530_74081C.1.pep
DPTVWQQMNWLELRNIVGRGFLAALEAKPTXLLDQIREAQKNDPDMHGLLKNMKQGKAAGFTEDEHGTLWNGKRVCVPDSRELKQVILXEAHESSYFIHPGSTKMYLDLKEKYWWVNMKREIAEFVGLCDVCQRXKAKHQRPGRTFQPFQWRNGNA

SEQ ID NO: 176323 - protein, 407 aa, Oryza sativa
  Clone ID: PAT_MRT4530_74082C.1.pep
MLSHSIDSCKEDQEHLALLDPKLAPVLLLVAYRIIDTDDKGNTDDEYCPIDDEEEELDHGDENSHDEDIVDNDKDDCDLGDEDDNHTCERDYDGSDDAGTEESDDSDDQEEDDTLFFYSIAKRELLSKRVDEFGIHLYWITAQGWLLMVHLELYEIFLWSPITNQKINLPFDEDNFLANNNVVKCFLSHKPSDPNCIVLVVNCRDTMFWYCHPKGDVWFRHEYQSSMISTGEDRENVIATVKHLTAVGGRFHAYLNQDKAILTLEFLPKPTFTTTPVKDAPDPSYWCTFSTCFLLESGGELFTLSFKHPIECVDKVMQIEVHKLNLSQRIWMKVSTIDNKAFLVDCTGFGASLNAEDVGLKRNCIYFVRPKDKGLYVYNMERGTTTIHNPGEDLPDNIALEIVMPPS

SEQ ID NO: 176324 - protein, 79 aa, Oryza sativa
  Clone ID: PAT_MRT4530_74083C.1.pep
LEVVVALDGGRLSALDRARRLAVLYSWFVVAAAGGVAGEGRLAAPGERGEEGAGRIVLTTTRGCRRERRDGASLPRAPR

SEQ ID NO: 176325 - protein, 233 aa, Oryza sativa
  Clone ID: PAT_MRT4530_74084C.1.pep
MADPVSSLKHITQMALKIKEAVDTVRRNKEDCLQIRRRVVRVSDILSQLQETGNIMSNPAMSAALEDLSETLRHAHTLVVSCQEKSVMCLLCAATALSKKLRRVNDDISDQMMVGIFVTTVHTTIALSQIQGDAQHDVIYALPRTEITDDIEATLPKKEEPKPPSPPREAEPEPEPPLPPPEEPTPLVRNEPSPAPTPEKPEATQIGEVRAEDSGFHYRTARSDVHNTFFSSM

SEQ ID NO: 176326 - protein, 105 aa, Oryza sativa
  Clone ID: PAT_MRT4530_74085C.1.pep
MPEIQDMCELRKEGIGTSYHRISWASNLTLLGFTSLIRDAAGFVLTTSFRDGVSTSRTKARYPAPACFSAIYNDAMAVDVERYSLQPYSLQALEGSSITHGVQAN

SEQ ID NO: 176327 - protein, 92 aa, Oryza sativa
  unsure (1)..(92): unsure at all Xaa locations
  Clone ID: PAT_MRT4530_74086C.1.pep
PKRLASTAPDEIGHDGELLDGIVAVGLGQEEDMALAIGLVELHLAVPPALFDPLRVRARPFHEPTVLRRSDQDAGGPELASLLRXASGLTHG

SEQ ID NO: 176328 - protein, 39 aa, Oryza sativa
  Clone ID: PAT_MRT4530_74087C.1.pep
ITMHAKHMHRRLFIETDAPFCLLHLCSVITTHRIETGIG

SEQ ID NO: 176329 - protein, 905 aa, Oryza sativa
  Clone ID: PAT_MRT4530_74088C.1.pep
MAVGDALRRLCEEVGWSYAVFWKAIGAADPVHLVWEDGYCGHASCPAGSDPSEALPTDVGCAAAADTMTMCSLVNKVMASQVHVVGEGTVGRAAFTGNHQWIIHGTANDHGIPSEVAAEMSYQFRVGIQTIAIIPVLPRGVLQLGSTGVIISKPIFHAIVNSECAGAKLWQLPVISSSEKQIKNSSSQQGRSRPLHGASNVQSTENRSKLFSQFPVTCEQYNHPEGMAVSGSTSLNACMNGSLLKIAQLNGQAVREHIVYSKPDVRFIQQVYRDGQLGSNAQSIAMSSDLISSSLRSVQKQPLLMNNISQLEYGDGAETSADLRKNVLLKPPVCLDPFIHDRNINISHGITEVSNVINDHGNFDFLSGGARVVRANLCTSATSQVLDRRSHSVSGMLLHREPIVSCEVPQSSEFSTKMGSLERGSFQISSAPSSESDVQISNGLNTSISRENQLSVSNHICQDQKINGVNDLSATLSTERMNNMDGCKPPGLSLERTSPLFMEQSVENDLFDILGPQFHHLCHNAGADLVPWTDAKPESSDRDVPESSIHADSAPLFSSRDNELYSGIFSLTDTDQLLDAVISNVNPAGKQSSDDSASCKTSLTDIPATSYLCSKEMKQCGSSGVPSVLIKNESAQFIKQPCLAENAEDGCLSQNNGMHKSQIRLWIESGQSMKCESASASNSKGLDTPSKANRKRSRPGESPKPRPKDRQLIQDRIKELREMVPNGAKCSIDALLEKTVKHMLFLQSVTKHADKLKDSTESKILGNENGPVWKDYFEGGATWAFDVGSQSMTCPIIVEDLDRPRQMLVEMICEDRGIFLEIADFIKGLGLTILRGAMEARKSKIWARFTVEANRDVTRMEIFLSLVRLLEPNCDSSGAAENANNVNMPLGLVHQPVIPATGRIQ

SEQ ID NO: 176330 - protein, 113 aa, Oryza sativa
  Clone ID: PAT_MRT4530_74089C.1.pep
EHAEDRGVNHLLLLVLVVQPPLHGSLSLAHVTLAFSPLTFEAHWHELLSAGIVLPAPSPQERSAHRWHGAAEPPPALPLDQAFCPVDLTLTRVLQHRLSVRVQYCVLSLPRAQ

SEQ ID NO: 176331 - protein, 151 aa, Oryza sativa
  Clone ID: PAT_MRT4530_7408C.1.pep
MPGHKPSQGGSAGAPMCAGAAIMGYRRQPLWRPKKNHFRFKFFQGSICKISFQKGPKCKNFRYVLHFYANLEVFRPSSALRFLLLWNEGYTQTYPPSSQPPLGYQNYFGKEQHPPLYYLPSHEIKMEAKLESQYTAYDIFHVNACLEYIIL

SEQ ID NO: 176332 - protein, 36 aa, Oryza sativa
  Clone ID: PAT_MRT4530_74090C.1.pep
GGSAREGRFAKAQAMQPIRSARAQASTTEFFEVTNE

SEQ ID NO: 176333 - protein, 549 aa, Oryza sativa
  Clone ID: PAT_MRT4530_74091C.1.pep
MAMVIESRNKKRKRVARREGITYGPIDERDRKRFDYLNDKIWKNDTICVNMLRLKRAPFFCFCKLFRDRGMLVDTIHMPVEEQVAMFLHTIGHNDRNRVVATNFYRSSETVSRYFNLVLHAVGELRKELIRPPSITTPSKILGNPRWDPYFKDCIGAIDGTHVRVSVTKDMEPSFRGRKDHATQNVMAAIDFDLKFTYVLAGWEGTAQDAVVLRDAIERTDGLRVPQGKFYLVDAGYGAKPRFLPPFRGVRYHLNEWGTNPVQNEKELFNLRHSSLRVTVERAFGSLKRRWKILDDATPFFLYPTQVDIVWLLKFIYQITNHIRTWKRKYSKIADLRKLSAALWDDDNFIISLDHKHYADHINDHKADAEYLNKPIHNYGKMLVIFGNSLATEKYAKGSGDPLAIESIPIDDDEEEEIGIGSAAATGSASRVHALNEENGASSSAPKPKKTKTAAAIEEEGLIGAFKSVGDKLAGAIVEAGKEAAKSNKELPDNLYESVHSIPGFEDTYLAHYHAHLVDNPPTARVFVTLEFAHKVTWVARYIATTFNG

SEQ ID NO: 176334 - protein, 80 aa, Oryza sativa
  Clone ID: PAT_MRT4530_74092C.1.pep
MEAKKPVGGSQVNREGEIISRRKHNHPLATAEMSGSMKQSCCRCFTWRRVDVVVQLVQTEIFVEVECLFRSKDEDNDSWS

SEQ ID NO: 176335 - protein, 130 aa, Oryza sativa
  Clone ID: PAT_MRT4530_74093C.1.pep
MAWDLHDGEVARRKLGEEQQKPPAHPSLLLCDEPSAAASIQPSVAAIVHASRSPLPNATSSPTSRIGFFVQCGHSVIRQRRRHRLDLAGGNGTTTRYNRCQRGSELGGGDTAAAMAVAASTSQGDTPSDG

SEQ ID NO: 176336 - protein, 47 aa, Oryza sativa
  Clone ID: PAT_MRT4530_74094C.1.pep
LIVHTYRTLELGSLCREHNIHGIASTYTGDIYTTHNALLEDAWQNKM

SEQ ID NO: 176337 - protein, 669 aa, Oryza sativa
  Clone ID: PAT_MRT4530_74095C.1.pep
MEGGTKKVFTVQVEDGKPRKDGRPAVGPVFRSALSKDGFPPLEPDMKTSWDVFRVAAGKYPDNRMLGWRPVKDGVIGPYIWKSYREVYEEVLQVGSALQQLGVKPGSRIGIYGSNCPQWIVAMQACNGYSLICVPLYDTLGAGAVDFIIDHAEIDVIFVQDKKIKEILSANCKSAKRVKGLVAFTSGTSEEITSADQIGMKLYSWKDFLKMGKENPAQPCAPKPNDTCTIMYTSGTSGEPKGVMLSHESHAIYVKGVDLFMEQFDDKMTTDDVFLSFLPLAHILDRMIEEFFFHKGASVGYYHGDLNALRDDLMELKPTLLVGVPRVYEKIYEGILKALSELRPLRRLIFNALYNRKLANMKAGCTHKTASPFADMLAFRKVKARLGGRLRLLISGGAPLSNEIEEFLRVTSCAYFIQGYGLTETLGPSTVCYPDDMSLVGTVGVAATYTELRLEEVPEMGYNPLGTPSRGEICVRGNFFTGYYKNPELTNEVMADGWFHTGDIGEMNSDGILKVIDRKKNIFKLSQGEYVAVEYLEKVYVFPPTVEDVWVYGDSFRSMLVAVVNPHEENTMKWAESNGCKGSFAEICKSEGLKEHILKELQSVAAKNKLRGFEYVKGVILDPIPFDLERDLVTATMKKKRNNMLKYYKPEIEKVYQKLEEQRVAAKSK

SEQ ID NO: 176338 - protein, 280 aa, Oryza sativa
  Clone ID: PAT_MRT4530_74096C.1.pep
MVTKFMLVKENFKPRHDDVILVTHPKSSTTWLKALAFAIVNRSSFESIDASHHPLLTQNPQHLVPFVGAQGGNLDYLETLPSPRLLTTHLPLSLLPSTVTTMGCHIIYLCREPKDAFISRWHFDNKIAQGAKINIDTTFTMFLEGCSPFGPFWDHYLQYWKESLKRPRDVLFLRYEEIVFDPLKVVRDLAGFIGVPFTEEEVKSGVDQEVVRLCSFKALSDLDINRNGGVERAEGKIFIAYSVLFRQGKTGDWVNHMSKDMGEKLDQLVEDKFKGSGLKF

SEQ ID NO: 176339 - protein, 79 aa, Oryza sativa
  Clone ID: PAT_MRT4530_74097C.1.pep
MAIHLLCFFCAKWWLLPLLLLDHTLSSSSLPTSWGVWANLGSINTWEKCVYGDSEIKSTRNGKVQLGIEHMNLLGKVTL

SEQ ID NO: 176340 - protein, 87 aa, Oryza sativa
  unsure (1)..(87): unsure at all Xaa locations
  Clone ID: PAT_MRT4530_74098C.1.pep
HERHEEKWVRGDFNEPVWXTAGAHIFSXGXLYYLCNPNLVHAHIILAVLGFQVVLMGLVXGYRINGLPGVGDGNDLYPGXQYFYPLG

SEQ ID NO: 176341 - protein, 104 aa, Oryza sativa
  unsure (1)..(104): unsure at all Xaa locations
  Clone ID: PAT_MRT4530_74099C.1.pep
GPIITVILSLRELYIQVPILDXYIATCKEHNKSQGKPGSPRLQGTNSMLRAQSKSDASILQSSSEARKKNFNSLFFATIVLSPGGPSKPPEDSLPQFVLFSNHR

SEQ ID NO: 176342 - protein, 494 aa, Oryza sativa
  Clone ID: PAT_MRT4530_7409C.1.pep
MQSPENAAPRVYFIPFPTPGHALPMCDLARLFASRGADATLVLTRANAARLGGAVARAAAAGSRIRVHALALPAEAAGLTGGHESADDLPSRELAGPFAVAVDLLAPLFADLLRRRPADAVVFDGVLPWAATAAAELRVPRYAFTGTGCFALSVQRALLLHAPQDGVASDDEPFLVPGLPDAVRLTKSRLAEATLPGAHSREFLNRMFDGERATTGWVVNSFADLEQRYIEHYEKETGKPVFAVGPVCLVNGDGDDVMERGRGGEPCAATDAARALAWLDAKPARSVVYVCFGSLTRFPDEQVAELGAGLAGSGVNFVWVVGGKNASAAPLLPDVVHAAVSSGRGHVIAGWAPQVAVLRHAAVGAFVTHCGWGAVTEAAAAGVPVLAWPVFAEQFYNEALVVGLAGTGAGVGAERGYVWGGEESGGVVVCREKVAERVRAAMADEAMRRRAEEVGERARRAVEVGGSSYDAVGALLEDVRRREMAADPRNVKEV

SEQ ID NO: 176343 - protein, 147 aa, Oryza sativa
  Clone ID: PAT_MRT4530_740C.1.pep
MGQEEAAAAPATVMFSWEQELGVPKQKMASDDDMPESPRKAPPPPARRLSVPPPPGRMLMAGSKSFSKARAVRPEDDPFLAAYLACTKSSNGGGGGVARESKGQRRSRWAGLGLGLGLGLSCKSSNGVVEDSMVKMAKLPEVHPRDA

SEQ ID NO: 176344 - protein, 213 aa, Oryza sativa
  Clone ID: PAT_MRT4530_74100C.1.pep
MVAVSAARVGIGGRSGGGPMMDLASAVAGVVTAGEAASSVGIGGRSGGSRNGSGDVAAMDSSSASAFTAFGRVEDGASGFAEAMGKTYAKFSSQQENQDEHDEVTTHIRIPDIPRGNRCYVDAAWVDGHAGIGVFFHIPSTHNALFLKATILVARSSLQGELMALQMAMEVAKFLDFACTIFLTGNETIANTKYLSQIQTNLNLKMSQEPGHV

SEQ ID NO: 176345 - protein, 340 aa, Oryza sativa
  unsure (1)..(340): unsure at all Xaa locations
  Clone ID: PAT_MRT4530_74101C.1.pep
PLPLPTGVASPSPPLPPDSPARPHPSPPACCRRCCLPPPPPRRPRRPRRAGAPSRRTTTSARTRSPAPPPGRCRRSGSRRRRRPCRSRRRSRSRPKPSPPGEAPPARPPTASSPPCLGDGEPPPPGAVLASPPPPTTTTTTTTAAGSRTPASARTRSPRSPAHPSPYTLPSLPFSLPPPPNSSLPNPPPPTAXPRFSPLLSKPNQIPPMPSPPPPPPPPPTPXPPPPXMPRMSKPAXPPPRPSRGGGPPLPRPPPPGRRPRPPRMPRSPISTPVTPPPRGAGASGSSCRPRRPGPGRGPPWRPPRXEAPPGDRAARPGAIGMQPSYSEKFTCDILKNRFR

SEQ ID NO: 176346 - protein, 110 aa, Oryza sativa
  Clone ID: PAT_MRT4530_74102C.1.pep
VHNKFFFSCFKAKVKVRGATPHMGRKNFFFGGKKKILKPRVQGGGKNNFPTGTPWGAKIFQNKKFPEKKKKGYCQKKKTFGGGIIRRLLGLLKNPLLLLLGPPKEVKKRA

SEQ ID NO: 176347 - protein, 93 aa, Oryza sativa
  unsure (1)..(93): unsure at all Xaa locations
  Clone ID: PAT_MRT4530_74103C.1.pep
MEIQYELNSDRDPNRSPTGLGGPSDGFYIFVRGVTSGGIASRWEYREKSTRGGEGRAGAIDYFLYIDAHYFARIPSTSXRLLPLRSASSDNDL

SEQ ID NO: 176348 - protein, 214 aa, Oryza sativa
  unsure (1)..(214): unsure at all Xaa locations
  Clone ID: PAT_MRT4530_74104C.1.pep
MLSVGVTCYMTANLLATAHVLXELKIRFVILEAGPGEKKKRKSERGGILLRFLLLLPPPRAPPIRSVKRGTALARGERWPVPSRPLVSPQEERLPGSSLPPRAARKSAPTTGGVKKPHRYXPWNCCPPXIRKYQKSTELLIRKLPFQRLVREIAQDFKTDLRFQSHAVLALQEAAEAYLVGLFEDTNLCAIHAKRVTIMPKDIQLARRIRGERA

SEQ ID NO: 176349 - protein, 175 aa, Oryza sativa
  unsure (1)..(175): unsure at all Xaa locations
  Clone ID: PAT_MRT4530_74105C.1.pep
MRFHGVQVDLVYAGVCLPWCPTTWXQRDRSMLRGLDDHATARSLNGVRVADEILRLVSGTAAFRTMLWCVKHWAKARGXVYSNVAGFLGGVGSAILVARVCQFYPNASPACCSRASSASSRGGSGPARXCCAPLSTTTASSALNATLRVITEQLAVGNAICQEIIKAGAMWVVIS

SEQ ID NO: 176350 - protein, 147 aa, Oryza sativa
  Clone ID: PAT_MRT4530_74106C.1.pep
MARTKQTARKSTGGKAPRKQLATKSDFDRWSYITISVQAARKSAPTTGGVKKPHRYRPGTVALREIRKYQKSTELLIRKLPFQRLVREIAQDFKTDLRFQSHAVLALQEAAEAYLVGLFEDTNLCAIHAKRVTIMPKDIQLARRIPW

SEQ ID NO: 176351 - protein, 123 aa, Oryza sativa
  unsure (1)..(123): unsure at all Xaa locations
  Clone ID: PAT_MRT4530_74107C.1.pep
LESNPPHGTLLSPPPTTMAMATQASXAKCHLLXAWAPAXXLIHPLHAHLEGTHLPQSGGXGSARRGATEEKKPXPRVRXAELDPNTPSRSSRETXGLSGSEVEESTYTWTWPRRSFEXQGGGI

SEQ ID NO: 176352 - protein, 197 aa, Oryza sativa
  Clone ID: PAT_MRT4530_74108C.1.pep
LAYYAAVLGIYVFTDRLAFTAADWCLRLHGWPIMPPLLGIYVFTDRLVFAAADWCHRLHGWPIMPPLLGIYAFTDRLAFTAADCCLRLHGWPIMPPLLGVYVFTDRLAFTAADWCLRLQGWSIMPPLLDVHIITDRPPCMTPTGAIAFTAGRVAATANRRHHLQHKLSTSATDWILHFHGCMILILLIGLIIFTAGH

SEQ ID NO: 176353 - protein, 337 aa, Oryza sativa
  Clone ID: PAT_MRT4530_74109C.1.pep
MESGQSGDGASHGHTSTVVETAKEEALAGGYDEEEEDCTPLPNGLICSRQNWETMYGKFGAFEDETDASPMRNTDRPVPPYYLPISMMQFFSVKVIEIMGGLQWPLHVYGIVATRDSQDNKRNFLFRCDREHCQTLASPQDSCLRLTRPSRAIVIVNPVVVEVDLKVKGSRGPPSEDKVLSEHAFVHNHTGHRIKPGFPHRQLESTEDSTMEFVFAHLQSAVEATITVGVVEGSPDFRARFTARTAGIDEDVLLLDFQDGPKVVVDDDGFVVLRRRVVSVEGTGKLILRMEATDHGGDDTAVVKEEIFCARKTSRSQSYFMLGFCKLSIIIAWSLLP

SEQ ID NO: 176354 - protein, 172 aa, Oryza sativa
  Clone ID: PAT_MRT4530_7410C.1.pep
CCNLGFIKSAMDSVVLECGDISASQEELLAHSSFLNGGDDGEVFSTPPTTQEDAITMCTLPFTQSQSPAPAPLPSPAAVSRTTPGCSSSEDNRDDEMSDIVKQRRRPRVCTRKVRWGAKIRTPTPSPDRTTSEVENKDGDPLYKAVLMIPTRDSTPAIPMDLIALARQRGLF

SEQ ID NO: 176355 - protein, 111 aa, Oryza sativa
  unsure (1)..(111): unsure at all Xaa locations
  Clone ID: PAT_MRT4530_74110C.1.pep
FNKRWTTHKHSISYSLFLLLLLITLPDPTKKLQVNSDDITNHLVDPPKVEENIGGVSHSLSTDSMVFHMEADSISRKTLKNLNEKFXFQAYVFRLIDIIINLLYSNKDIFL

SEQ ID NO: 176356 - protein, 60 aa, Oryza sativa
  Clone ID: PAT_MRT4530_74111C.1.pep
ASGTQRGQSNTTAIPPHHGENHLPFFYYFFSFPLFYIFSLPLQKQLSFLMVHHSLIWAFP

SEQ ID NO: 176357 - protein, 217 aa, Oryza sativa
  Clone ID: PAT_MRT4530_74112C.1.pep
MLGELISKVLLVLFGYAMPAFECFKTLETRPDDAHMLRFWCQYWIIVSMVIACESFVSWMPMYGEIKLAFFVYLWYPKTKGSDVVYDSFIRPTVMQYEPNIEQRLEHLRANSGQLIAFYIKNFADKGTAFFMDFLRYVVSERPEAAANSEPQRSSWSSWNPFASRRQEPSPPPSAPPRERRFSGADPDDEPPAIADVFRASLGGGAMNRRPHNNNNN

SEQ ID NO: 176358 - protein, 308 aa, Oryza sativa
  Clone ID: PAT_MRT4530_74113C.1.pep
SARTRSGSSDGDPNEETSPDAWGIPHKMLVKLVDAFANWLKSGQETLKQIGSLPPPPAPDPANLDLKERFKDLRAQKSLNTISPSSEEARAYFQREEFLRYSIPDRAFCYTAADGEKSIVAPLRRGGGKPTAKARGHPMLLPDRPPHVTILCLVRDAAARLPARTGTRADVCTLLKDSQYLNHEESNKEAAVNQVVSGALDRLHYERDPCVLYDNDKKLWTYLHRGREEEDFEDDGTSSTKKWKRPRKESDPADPGNDDLEDDGTPTASDAKKQKTDSTASGEDKDSEDPAIQDPSAGDLEGDPDPDH

SEQ ID NO: 176359 - protein, 758 aa, Oryza sativa
  Clone ID: PAT_MRT4530_74114C.1.pep
MTQSDEPQSKASVYKIEEPLTIEPHSEPSCSASSIEEKVPEQPSVENEEIQTLDRAAILFRDDSEAILDFHIFQIQDFDILIGLPIEQLLIDTPRLDSLKITLGGNGFSVPFSRARIALTNTLLEIESTEEVIAVPPHESPEALLEDEVSDFIKEEAKPGLVGGSHDIPPTSPSQARTQPSPFAMAPRKLNPASVTGPYPGRIYDDTTTYLGASLMDEEELAKLVASNVLLEKQAFAPGKAIVPKPGDNRTVVFAVFFEAGLRFPCNELLPEILRLFQVELPQLSLSALVRIAIFDWACRTSRFEPSTELFGAIFYATVNSKTVVTPAGTKKIAFRSVNFNVRPECSDLWPVNAAMSKWDCQWMSKWFYHSIPFEAGSDAAKALRWRRRAIAPSRKPKVAVDGAMEARFALLRKVCSRLSCRDLVEEFCMLRIFPLSQSWQVEMNQDEEVDGLPKLVMPEGANMLTLAQADTEARRMIDDVSVTEYSQLLTRQAAGRANRVYDGDRPPRAKPFKADGNEGMSRKRMRGQVKLAPRKRRAPTSSDFDADDEDNIEDHDGEEEGEDEGEAEVAAEKAADEVVDNRTETHGYTTQNISLRILAAHCSIERTMRARLDGLKNRLRGKDDELGRKSLEMEGLANTLKETKAENKRLQAELEKGSEANAEIERLKAELQKEKDQSAALAEYYNLTEPKMEALRQKALKAEVSAEKEAERFAQEMAKATVSAKTACRTLRLALTDMGARVRGVPGEDASAFDFSE

SEQ ID NO: 176360 - protein, 36 aa, Oryza sativa
  Clone ID: PAT_MRT4530_74115C.1.pep
MHNPRLHACLHDTSQSSCIYATCHYLIMQVICNLIA

SEQ ID NO: 176361 - protein, 51 aa, Oryza sativa
  Clone ID: PAT_MRT4530_74116C.1.pep
MGAKFLSGDNLSKLVQVLRRHETVLQKQMVVDCSHTIQPPLDMEIELPGLK

SEQ ID NO: 176362 - protein, 495 aa, Oryza sativa
  unsure (1)..(495): unsure at all Xaa locations
  Clone ID: PAT_MRT4530_74117C.1.pep
MEHKPIYQLSAPRGEFYEPPPSPKPILTSGYEIRPKIINMIRVKSFSGLDQENPYHHLREFEELCSCLMIQDMTQEIIRXHILSFRQIEKESINXAWARFTLLVQSTPNLSIPDYVLLQHFHTGLDKESAFHLNITAGESFFHNTPSEGTEILDRILENTSFVEKYSEPLQKASVSSREDPSLVEPESDLSISVDSIKESSPKPSTPESKEIRTPGCAPDFRDDFHEDYGNTLNYFNKKKPHILTPPPDPIEDEYLGVTVGELTTIMSNEWLKEKEGLSKGIRDHQPPESLLEYDVPDFIQEEESGETFELSSLEPPPPRPMIEIKHLPQGLRYAFLHGNKEAPVIISDKLSEDETIRLVTVLEKHHSIMSCSLQDLKGISPALCTHCIPIELESSLSREPQRWLNNAMREVIKKEVLKLLCAWIIYPIQCSEWMSFNKMIETQLAQLAALVPAKEAGRILGQPKPSLENVKAITTRGGKSTRDVTPGKIPFPKR

SEQ ID NO: 176363 - protein, 101 aa, Oryza sativa
  unsure (1)..(101): unsure at all Xaa locations
  Clone ID: PAT_MRT4530_74118C.1.pep
MAALAPSKMLGTRLNFAGSSRYATAAPTTGAQKIDSLFSKKAVLXPKPTVETSSSPGIRDXLVKKFEPSRKMNLPEGILDLSEVPDYSHGEGPGDYGYDPF

SEQ ID NO: 176364 - protein, 84 aa, Oryza sativa
  Clone ID: PAT_MRT4530_74119C.1.pep
MRNKGVILSLFSKAPKNSDSRSAKPGSQCSSCRCEAALPVMVVLSASDFCFKNCNLHKASRVLMIPVLYQLLQDEARTYKTGYI

SEQ ID NO: 176365 - protein, 42 aa, Oryza sativa
  Clone ID: PAT_MRT4530_7411C.1.pep
LECCLLRCFDPRSLHLYSMWCLVICVCDSSCISMKETATECN

SEQ ID NO: 176366 - protein, 66 aa, Oryza sativa
  Clone ID: PAT_MRT4530_74120C.1.pep
TTRKPCKQHWCNMGWRLSSFFSTRQDHQMRYSLQLQLMHSWPQLFSVAAPSQEGSPQIMAQSHLEQ

SEQ ID NO: 176367 - protein, 89 aa, Oryza sativa
  unsure (1)..(89): unsure at all Xaa locations
  Clone ID: PAT_MRT4530_74121C.1.pep
SPSIYXSXHMIFSVLLFIFRDGGHCSSCCCCVAALSSRCAGLNSFSDDSSLDCIHVILLVSFALRESGQDRRNTVTMSPMYASSSQVII

SEQ ID NO: 176368 - protein, 90 aa, Oryza sativa
  Clone ID: PAT_MRT4530_74122C.1.pep
KNVFGKKPQKLSFNGPRNFQFRGKILLKFPGPFPFRKMNGNIEKTPSARQNPIFSQKTHGRIFQTKKKTFCWGTFKKARQIVFFFQFQKM

SEQ ID NO: 176369 - protein, 736 aa, Oryza sativa
  Clone ID: PAT_MRT4530_74123C.1.pep
MCSVKPETVGSVDKRRIEHDNQITQKRQKHTAHAIRAEHTQVGCLDGAIHAEEAQPEPVDQANHGEEGCIQVIDKTTARGDSWKSGCSVRHNTVSAGKRKTSTADQVTKQTQTNQSYANDAEHAQIEHPDQEIHVDFDPQSKHIGRKGKPKTGTGVDSNLTLKNQDLLVSPNQLSHINQKHMPPNHEAQKKHINVENCKQPSSQAREKNRKGLMASSNSSLHLRRSKRLAKDSVAVVENEPVENDPVDLQVSSPNCQVSAVAMSSEPIEQEPILHQSPSPNCEVLVSTTDAESVESEHHEHCAFSPHQSMSDPPDIDRIIAGLCPSTSSVHEKPREISSEPDDPDLATTPSNPDMSDPERFAQHYCQVFPLEVRRALSKKRSNSLLNHLVSEECSDEEFVHDFPDAEQARDCQKPSGQNIGSKRKKGHRRGPTLCVKVWTLPEGVRLPVSLNNSGFPIGKNAAMFGNFLGTLARDGILAPLTYKKWKSIPKENKDVMWHIIKLKFYVAPSSESLLLKCIRTKWRNWRCNLKRKHYDSHITEEERLADCDPRVLKEQWRFLVAFWNTEEAQAASARCKASRAKSTYISSTGSKSFARILDEESCSRDKARKRSDDVTAMGEKRRGRMHNHEPGASPSGLKEKAALKASFKEAVDAKEIAENEAATLRKKMMVMEESQKKLQEDLANMRNTVSAMQKMMSNGGLPDGLMGASTAPPSFPQVEPGWWMLEYTVEVLLTS

SEQ ID NO: 176370 - protein, 102 aa, Oryza sativa
  Clone ID: PAT_MRT4530_74124C.1.pep
GDYIYSLKLRYKKRDCCFEDADTVTPTHTNTYCCFQISNMPSARLEVKWNTVEDQPHYSPNYSPNNSKKDQRKLLSCVTNQLNGKRRCSISEILATPARSAC

SEQ ID NO: 176371 - protein, 106 aa, Oryza sativa
  Clone ID: PAT_MRT4530_74125C.1.pep
MEQFEALSSTGSTGKCLLQKSCSDSVTLEKAKQWREESLAVGLLSSVRAHTLKCSSDFRPGKGFRHQLIKELMESWTVARHVMDISRWLAAVNSLVAAEKTSEESI

SEQ ID NO: 176372 - protein, 382 aa, Oryza sativa
  Clone ID: PAT_MRT4530_74126C.1.pep
MAAASFCSKRSLPCLLLILAVFFLGCSSPATARRVTEGEPATTTTMVERFRRWKAEYNRSYATAGEERRRLRVYARNVRYIEATNAAAGLAYELGETAYTDLTNDEFIAMYTAPPPLRSSDGDDDDAATTIITTRAGPVDEHNLQPEVYFNESAGAPASVDWRASGAVTEVKDQGRCGSCWAFSTVAVVEGIQKIKKGKLVSLSEQELVDCDTLDSGCDGGVSYRALEWITANGGITTRDDYPYTAAASAACDRAKLGHHAATIAGLRRVATRSEASLANAAAAQPVAVSIEAGGDNFQHYRKGVYDGPCGTRLNHGVTVVGYGQEEAAADGGAAGGDKYWIIKNSWGKNWGDQGYIKMKKDVAGKPEGLCGIAIRPSFPLM

SEQ ID NO: 176373 - protein, 123 aa, Oryza sativa
  Clone ID: PAT_MRT4530_74127C.1.pep
RTHIKPNVLSSPPHPHSRNTFIIPPFLTVGSRRRRTAWRRRSPRRPPGRRPRVAAALVGGRGGRLDGEGHGGRGSDKDGAGNLLHLHDPEKGTVEEAAARDEEERKGFIGRIGLGLMLPFPRA

SEQ ID NO: 176374 - protein, 546 aa, Oryza sativa
  Clone ID: PAT_MRT4530_74128C.1.pep
MATVVSYITLTRIPFYSSTEALAGAGAATPISIPDHHFFSGELASGDESAAPEAENRMLLPPVKGTIQEPSPPRMDDAEANILASLGRVRLCDLAAADGLPSDGYKMCVSALMQSLAQYSAAVVELPPADGALLRSGLDSARLFFHQRGYGSGEAGGGGGGGGSGDAREWCKTSGYYADPQMWLEMYDFRPGITPVEPNGVAELPPSGLPDMFSVLGKVSREVLDAISFSLNLRSSTFTELLDNIPLRSQEVSSSVLSACCHSRPSMEGAQQHSVASQDDEQLLMFSDQENQIDKTLLTLVKSDRSGLYIKDLQGRWILVDGDLGPLDIVVYPGLALYRETAGYVNPAVHKTEVGNLQECMFGRCSLVFKLMPRSVARLSGEEMRAAGHGVDAQFQVPILVNDFMQTEHSANQLFPKNNEPSPHVEQEASYNFVMKRKKEGRKTKALPPSKRLRLEAQRVLKERVQDIADKKGIKLRFCSLRDCESHIKSLDRPCENIRTEIGWPPGVPFVHPHDLPNKAKLMFLEAYEPGWTASQQDLELSFTEP

SEQ ID NO: 176375 - protein, 218 aa, Oryza sativa
  Clone ID: PAT_MRT4530_74129C.1.pep
CARGPVAATHSDVVIVKWPSAAISSLLFLLLSCIAATVACQHSVSSYNPQQKDFPNERLYRAYLVIQRCKNTITRDPKNITLTWNGHDICGRTTYLGFYCGKPRQAKELTVMAVVLNGFGLRAPKLQGFVDQLPDLALFHAASNDFGGDIPRLAGLEYMYELNVGDDVPAHTTSTKLGAYVRGGGDFVYPCVTAHIRVTFRFGVGNGKDGGILPTGVT

SEQ ID NO: 176376 - protein, 94 aa, Oryza sativa
  unsure (1)..(94): unsure at all Xaa locations
  Clone ID: PAT_MRT4530_7412C.1.pep
TRRSDIEGIGVRWYEDLCNTTSSKQEIGIILVIALIQLVWDYIMETTYYKGXVELDDTDETVVEQAVVVVLAMRFDALGPPGGPFYIAGQLISK

SEQ ID NO: 176377 - protein, 297 aa, Oryza sativa
  unsure (1)..(297): unsure at all Xaa locations
  Clone ID: PAT_MRT4530_74130C.1.pep
LPLTEHTQNPRVGSERERERERERPHPWSAPTSPSCSASSPSPPGSRPQRRPPPWRERRRPRRRRRASPPSSPPRSRSSARPTCPPRSAASRWWPPSTSAAAYPASAASPPSRSSSSPASTPPTSSRCTPPAEASALEALASPPPVKVPPXPASIVTAPPPPVAFRRKPPAREAPPPPPAAEKLSPPXSSTTTPTTTSASAHSREALLPRMPSPSRSAPPPLPRHHAPAPPRRSRRPSPPPPPSLPSPSSPPPSTEDTPPPAPAPQSHDSFAVFFILFFCFSLGLPMYMSLEDDDLI

SEQ ID NO: 176378 - protein, 34 aa, Oryza sativa
  Clone ID: PAT_MRT4530_74131C.1.pep
RVEFSHSTSWKDGFVGWGILITSLNHQKKKEGGH

SEQ ID NO: 176379 - protein, 82 aa, Oryza sativa
  Clone ID: PAT_MRT4530_74132C.1.pep
MGRRCGHKTVMGTPLGAVLSSQLKTGFAASGSFGAVTRDSRRVVLENDVGRCAWGRKWLAASSSRQPRFFPAASASRFLGPF

SEQ ID NO: 176380 - protein, 82 aa, Oryza sativa
  Clone ID: PAT_MRT4530_74133C.1.pep
VASFGRRSIGRRSMAVLRNVITGVGRRLVLLVLTLLVLAALDDQAPPMIMASAARVLLQQYPPTYGPPRCYPPYCAPRHARR

SEQ ID NO: 176381 - protein, 95 aa, Oryza sativa
  Clone ID: PAT_MRT4530_74134C.1.pep
WAAQATSNWSAFGQRPGDDVRAAARRSSSCRRAGVHSARASRREEAMATAAGRSSRRGQPSQAMVPAPASGRRRQAGVGHAHRLWLVSRRALCAG

SEQ ID NO: 176382 - protein, 145 aa, Oryza sativa
  Clone ID: PAT_MRT4530_74135C.1.pep
PARHLPPAVVADGQGESTAAVVADAARKMRSREGDDGEGRRGKATQRPRTHPRASAHTGERACAGVVDFRFSGEGVRRLGFSPAAGRDGVCPSDVTARSSDRNPKIGRPALAGQNLAQVEAHVGLLPRPRPRLQPGEVGSARTCT

SEQ ID NO: 176383 - protein, 649 aa, Oryza sativa
  unsure (1)..(649): unsure at all Xaa locations
  Clone ID: PAT_MRT4530_74136C.1.pep
MADKTLRGFAAPSAYNVAIGPQSNMGDVDFDLKSSLVTMAQASPFYSKPNEDANAHLQQFLEICSTFHQKRDEYIPEAWERLQEYVAACPHHGMDDWLILQNFYNGLTPMSRDHLNAAAGGAFFSKTEMELLVAKLDLLMKRLDDHDKRPQGTVMALDSHVTCEVYGNTGHSGNDCPETREEAMNVGNNNNGYHPQGGQGWNQPRPYYQGGNNNGNFSNKPSLKDLVFAQAKTTDALSKKLAANDKILENINLSFNKMIETQLAQLTSYVPANETGRIPGQPDSSVENVKAITTRGDKSTRDPPYPNPAETNGIAREVPSSNSADKEVRPEKTVLQEYCDTQLLSFPQRGRKPSVDEQFARFVEVIQKIHINVPLLDAMQVRTYVHYLKYILNNKRPLPTTEVVKLTKQCSKVILHKLLEKKKDPGCPTITCSIGAQQFDQALCDLGASVSVMPKDVFDKLNFTVLAPTPMRLQLADSSVRYLAGIAEDVRLKIRDFFIPVHFVVLEMDTGKETPLILGRPFLSTAGANIDVGTGSIHFHINGKEEKFEFQLRTEQCSMVRIKYGPNPQNIQVVEVEPPKTDSLVRFMQNFLEKETTMPRNRYWKKPVKSSXPAKRPEQTAQRKPPSAPKPKKVWKEKPKTPAPSPPEI

SEQ ID NO: 176384 - protein, 802 aa, Oryza sativa
  Clone ID: PAT_MRT4530_74137C.1.pep
MAPRDQSCGDGGEVDPEGGIEAPLLSSGSSFFQDPAHEDGDGDEEARRRRRRFLLAGRSQSNTTSQVALVGVGVCPIESLDYELIENEVFKQDWRARGRGHILRYVALKWALCFLVGVLSAAAGFVANLGVENVAGAKFVVTSNLMLAGRYGTAFAVFLVSNFALTMLATVLTVYVAPAAAGSGIPEVKAYLNGVDAPDIFSLKTLVVKIVGCIAAVSSSLHVGKAGPLVHTGACIASILGQGGSSKYHLTCKWLRYFKNDRDRRDLVTCGAGAGIAAAFRAPVGGVLFALEAVSSWWRSALLWRAFFTTAMVAVVLRALIDFCKSDKCGLFGKGGLIMFDVTSDYITYHLVDLPPVITLGVLGGVLGSLHNFFLDKLTFRKGQKYKLLLAAVVTICTSCCLFGLPWIASCKPCPSDTEEACPSIGRSGNFKKYQCAMNEYNDLASLFFNTNDDTIRNLYSAGTDDEFHISSILVFFFTSYFLGIFSYGLALPSGLFVPVILTGATYGRLVGMLIGSQSTLDHGLFAVLGSAALLGGSMRMTVSVCVVILELTNNLLMLPLVMLVLLISKTVADAFNANIYDLLVKLKGFPYLEGHVEPYMRQLSVSDVVTGPLQAFNGIEKVGHIVHVLRTTGHNGFPVVDEPPFSDSPVLFGLVLRAHLLVLLRKKDFIPNCSASALDASKQFLPHDFAKPGSGKHDRIEEIQFSAEELEMFVDLHPFTNTSPYTVVETMSLAKAHVLFREVGLRHLLVLPKSSKRAPVVGILTRHDFMPEHILGLHPFLFKTRWKKVRFGKSAFTNLVF

SEQ ID NO: 176385 - protein, 824 aa, Oryza sativa
  Clone ID: PAT_MRT4530_74138C.1.pep
MGAGRAADFGAHDGREVAGDARAAGGAVAGGPRGGRGGGRRRPARRERPWPAAHAEGGAVAGSPRGGATPAQWEGGGRRPARRDGGWTTARGRRAAGGCVDGAHGRTTPGRRLAWREGGGTAAQWPEGGGTAAQDCSPAARRGRSRGEMREKERGSKLVRVGRGILVFPKNTDNTTHGLINISNGNLTGGAWEESKRNFKGRDWVKFEGIERISRNFTNQAGMALLLPEFDPADVRAGRDLIHRLTADAAGIQRGVLREILSRNSGTEYLRRFLGGAAGDDDDVRDAFKRRVPVSGYEDVKPYVDRVASGGEPSSALLCSDPITCLSRSSGTSGGQQKLLPSTAEELDRKVFFYAVQALVRNMSLHTDHGEDDDGGGGEGMYLMFAFHGDRTLSGLPIQSALTTYYHSRQFQECDIGGFDKCTSPLEAILCPYGEQSMYCQLLCGLLHRCRVDRVGASFAAGLVRGIKFLENHWEEMCFNIRSGQLSDWITHTPLRDAVTGQYLQGSNPALADEIASECARKPWDGIVRRLWPRARYIRTIVTGSMSQYIPILEVYGGGLPLVSPIYASTECAAGINLRPLDPPSHVSYALLPNIAYFEFLEVMDENGEKVQGTTRLDDNLGEFSPMLGLYRYRVGDLFTVSGFYNATPLFHFSGRHDVILSIDYEKISEEDLLNAIAETDKFHLRPLGYMLVGSTAYADISTLPGHYILFWELTNTCDSNVAIDIDQTAMEKCCLAVEDHFDEMYRKIRHRGSISALEIRILSHGAFDALMDFFVSRGTSASQYKTPTAIRSKEAMMVLEERVVGRFFSQATPSCRSAEFERR

SEQ ID NO: 176386 - protein, 578 aa, Oryza sativa
  Clone ID: PAT_MRT4530_74139C.1.pep
MGCCGSSLQAGTHPEKPPGMAAPPQRPSFSLNQHQAPGSAAAQGVVRGVVPAFAWFSLAELRAATGGFAAENIVSESGEKAPNFVYRGRLQRTRRAIAVKKFPKMAWPDPKQFEEEAKGVGKLRHRRLANLIGYCCDGDERLLVAEFMPNDTLAKHVFHWENQTIEWAMRLRVAHHIAEALDYCSSNERPLYHDLNAYRVLFDENGDPRLSCFGLMKNSRDGKSYSTNLAYTPPEYLRNGRVTPESVIFSFGTVLLDLLSGKRIPPSHYEPRDRPNTGKLVSILDPLQTKLEVPSYEMLGIPKHEEEAPPAPAPAPAPQPQHPLSPMGEACSRMDMTAIHQILVATHYRDDEGTNELSFQEWTQQMRDMLDARKRGDFAFRDKDFKTAIELLPLAGATLLIAAAGGASGQQAGVGSIITRAMFESMLSHRGDQGCQGAFYTYDAFIKAAGDFPRFGTTGNDETRRRELAAFFGQTSHETTGGWATAPDGPFAWGYCRVNEITPSDPPYYGRGPIQLTHKYNYQLAGDALGLDLVNNPDLVSSDPVVGVQDAHLFLDDGAVTQAVVPGCNHQPVDPFRR

SEQ ID NO: 176387 - protein, 408 aa, Oryza sativa
  Clone ID: PAT_MRT4530_7413C.1.pep
MADDGGIIAALPEDVLLQVLSRVASVKSLFMLAATCRRWLRRFTDRAFLLDLWGGQRAGDLLGFFFHLQRIKVSTFGFLPVPSSPLRPLASSGSSNSVQPLAARRGVLLMRLPITRLLFLSNPVTGERHVVPRLEEYSDLGPYKVTSYAIVVSDDLAGKPQQPASSGRFTFSQLLVTTKHANSITMYVNSYSAAGGWAAPAEFLDLLRFSLAGRSTPSAVVHRGAAHWLCTDDVASATRGDRLYKLSVEVGVPAAATPRVSMTNLPVRAGGATATLLCVGGDGELTIACVFPMHVRIWKQQRRGDGDDDAAAWRRDVMWMTLPAPYPYCVPLMHGLDMGSVAMMYRSSGAVFVVDLDKKVIDRAMDCFLPLRIGREMDLPPVPYEMDLVEFFLLQLGGLCGGGSTSTG

SEQ ID NO: 176388 - protein, 77 aa, Oryza sativa
  unsure (1)..(77): unsure at all Xaa locations
  Clone ID: PAT_MRT4530_74140C.1.pep
AVPVYRRQDNGWYISENRSXHNHPLSETCGESKHWSSHKHIDIHTKELVRHLRSINNVNLSKVYCITASFFVSMRDV

SEQ ID NO: 176389 - protein, 180 aa, Oryza sativa
  unsure (1)..(180): unsure at all Xaa locations
  Clone ID: PAT_MRT4530_74141C.1.pep
MGKEKTHMSIVAIGHLDSGKSTTTAHLIYKLGGIDKRAIDRFEKEAXAEMNKRGFKHSWVLDKLKAXRDRGITIYITLCKIDTTKYYCTGIDAPGQRDFIKIMITGTSQADCATLIIDSTTXSFDAGISKDGQTSEHTLLAFTLGAKQMIXCXNKTDATTRKYSKARYDEIVNEVSSYLK

SEQ ID NO: 176390 - protein, 82 aa, Oryza sativa
  Clone ID: PAT_MRT4530_74142C.1.pep
MAKAGKPRQYSESKGILGEGISGELQRLRHDEFSIKEAPTGRSRSFRPVCRRPGPAYQPIKDLYVQMTLHTHVNVPFIRATM

SEQ ID NO: 176391 - protein, 607 aa, Oryza sativa
  Clone ID: PAT_MRT4530_74143C.1.pep
MTKATPVKASKNLQLQKQSPTNLKETNGHVCKKEVVNGECPVRDVKCISTWICKNLACKAVVTSEDSFCKRCSCCICHQFDDNKDPSLWLVCASENDDKNCCGSSCHIECALQHKRVGCFNLGNIIQLDGSYSCASCGKVSGILGYWKRQLVIAKDARRVDMLCHRIYLSYRLLGGTTRFKELHGIIEDAKAKLESEVGPLDGMSAKMARGIVSRLPAGSDLQKLCSLAIERADELLSSPDLHLQDSLPAACRFRFVEITSSSIVIILKETPLPSSDTIRGYKLWYWKSREEPSMEEPVVLSKDQRKVLVFNLAPCTQYSFRIISFTDDGILGHSESKCYTGSKELLFKRTTQNVAGADAHTHRREKTQAFKSTGFKIRDVGKILRQAWTEEGRFEGFCEDMHEASCDRSVTDVEQTENSEQGQLLSGACRKLQFSTFSVPDLNVEAPVPMDISPDKCYNSKIVPVRSNDSGGSETCAVGRSAEAEPPAVESRPEGCEQDGASTICREKQLARPRELDEDFEYCVQKIRMLECKGHIDNDFRMKFLTWFSLRSTENDRRVVTTFIKTLINEPSGLAEQLVDSFGEAINCKRQRNGFCNELWHDDKGQ

SEQ ID NO: 176392 - protein, 140 aa, Oryza sativa
  unsure (1)..(140): unsure at all Xaa locations
  Clone ID: PAT_MRT4530_74144C.1.pep
APFFWQPVVVALKVGTGIQFFKGGVYTGPLGPRLGHPFXFLGWGPRVFFGAKFWPPKNSWGPSWGEGGSIRFFPHLGGPPLFGVPPNFASPPLPLLKKSPTGIKKRPNFFFFLFPRLPFFSVSFFPPKVSPLHVLILGRA

SEQ ID NO: 176393 - protein, 81 aa, Oryza sativa
  Clone ID: PAT_MRT4530_74145C.1.pep
ERPTQFCRKSCFGLPLVCSMSCQVNVMTAALVLLYFANIAACAGPSYSMITVQHCIMIFSLVYRSAAFCIVDKIQDRNLYS

SEQ ID NO: 176394 - protein, 516 aa, Oryza sativa
  unsure (1)..(516): unsure at all Xaa locations
  Clone ID: PAT_MRT4530_74146C.1.pep
ISIHVSSPSYRHGEGRGPQLYLSLLNGRTARLLTSHYADNATMFIXPTKRDMRHLARIRHSLGKVMGLXTNMVKSQILRRRXDLQDISWIFPTNITSYPIKFLGLPLVISXFEKIHVQPLLDKCKTRLVPLQGRMITAEGRATLTKYVLTVXLIYYLTALKILDEILHSIDKMRRKFFWARRDDTSWGCAKQIGIKPAECRPKNLGGLGVLNLDQFARALRIRWLWYKWTKPDKPWNSTAIPCGQLDRNLFXGATIITLGLGKRQPSRTHTXLENKMPKEIAPVIFVASKRKTRTVHDALASKTWVRDINLXLRIKAADHLRQYAPRPTLRLRVGPMSEQRDTIYXKLMANAVCSAKSAYRLQFVGATETIYNXDYLKMXASPKCKFLSWLTIQNKXLQKRGWMNQQLCPPCHASTESALHLLAKRGLPKRIWAEIEIDNCGPLVTGVGLWEACSSIYGGLVVQNLIVTSVPHTLRKALKLIIILVAWELWCERNVRICVAXATMPTTIITKINEA

SEQ ID NO: 176395 - protein, 298 aa, Oryza sativa
  Clone ID: PAT_MRT4530_74147C.1.pep
VKKRSQYSAFKDELLVNPSEVTRRMEEMTISKGNRHNSEGTGVLPRAEIVHDEHPLSLGKTSVWNQFFQESETIEQIDRDVKRTHPEMQFFNGDSSDALSNQESLKRILTIFAKLNPGIRYVQGMNEVLAPLYYVFKNDPEENNAESAEPDAFFCFVELLSGFRDNFCKQLDNSVVGIRSTISKLSQLLKRHDEELWRHLEVVTKVNPQFYAFRWITLLLTQEFKFRDCIHIWDALLGDPEGPQATLLRICCAMLILVRRRLLAGDFTANLKLLQSYPPTNIDHLLHIANKLRGPIPY

SEQ ID NO: 176396 - protein, 137 aa, Oryza sativa
  Clone ID: PAT_MRT4530_74148C.1.pep
MAYTGENGGDNINGGNTNASTSSASFSGYNILTLFDFLLEREGKARGDEETYRYRREPADKLRGTASPGTTAPTGATFEERNPELYAELVKRLSDQKRNSRRMRLAGASAYCVVFVTLLYLGDREKRLFEKSFGVGK

SEQ ID NO: 176397 - protein, 167 aa, Oryza sativa
  Clone ID: PAT_MRT4530_74149C.1.pep
MSTSEEAGLPDPATAASSLVDCRLPGREGCEPLHSSSPLSSHLHVDPVVALFGSTTLLSTVFLTRSPCRSPPLGARMGRARAAAWAPKPRRRKAWAMAKYGDDGSKAQTMARKERKKGVKARLFSVQMGNEQRCQKEIEDTKHGLESGSITYDPAKLKFSDDIKDSR

SEQ ID NO: 176398 - protein, 132 aa, Oryza sativa
  Clone ID: PAT_MRT4530_7414C.1.pep
QVNSTESRHTFYPVGSTALKDERTGCNDTASKFSPTGRKGREKSSQQEKRGKRRHIHVFSLPRYFSCSNTCTEQDSKGGGGKTGINSELAACPDSSEYSLCVHLISIGRFPLLSQGDPGCFTCAYGLAQDGH

SEQ ID NO: 176399 - protein, 190 aa, Oryza sativa
  unsure (1)..(190): unsure at all Xaa locations
  Clone ID: PAT_MRT4530_74150C.1.pep
CSPARKAGLPDPATAASSLVDCRLPGREGCNDESGXKPLHXSPPLSSHLHGGFGRGPLRQYNAALHPLPPXFSTPLTSPRCQDGESKSSSLGTKAMTAXGMGYGKVWRRRQKGTDYGKVCECKGEANFIFQMEHASYVKLSSSAFFLGVQTGNEXRCQQEIEHTKHGLESGSITYDPAKLKFSDDIKDSR

SEQ ID NO: 176400 - protein, 184 aa, Oryza sativa
  Clone ID: PAT_MRT4530_74151C.1.pep
MSTSEEAGLPDPATAASSLVDCRLPGREGCEPLHSSSPLSSHLHGGSGRGPLRQYNATLHCLPHPFSMPLTSPRCQDGESKSSSLGTKATTAEGMGYGKVRRRRQQGTNYGKVCECKGEANFIFQMEHASHVKLSSSAFILGVQMGNEQRCQKEIEDTKHGLESGSITYDPAKLKFSDDIKDSR

SEQ ID NO: 176401 - protein, 197 aa, Oryza sativa
  Clone ID: PAT_MRT4530_74152C.1.pep
MKSRGVSGSQRLTTGELGPLVRRLFHDQEKAATPAKETYKGSLATAAGVVVFHKYEAPAGTPKTPQGERFKVFGVRNADGSYGKGLFWASTPHEKEEVAELGNSSPPHVNRHLSPPIIKEEARKFEGSNSPQPSVTKLAKRIKQLHRENEEHRERDAERRLEIADLRNEFSLLSSALCSKVKRTFREMEKEELYYAN

SEQ ID NO: 176402 - protein, 129 aa, Oryza sativa
  Clone ID: PAT_MRT4530_74153C.1.pep
YFTLALEYCSSRRWWRIFTPTTRKLVSDAIEKPLIHQSTTVVHNASSRNLNPRPMPIAATIINFDMLSAAIRLYLTCSLGLLFPFSPLNLRSTLIRPYSTMSLAPLLGLTKIQMNLAFGVPRSINSSAF

SEQ ID NO: 176403 - protein, 142 aa, Oryza sativa
  Clone ID: PAT_MRT4530_74154C.1.pep
PRVRQGAQLDDAVKAYMEMRKSRFNPDERSLEGVLNAYCIAGVIDESKEQFEELQSMVTVPSIIAYCMMLSLYARNDRWTDAYDLLEEMKTNRASSTHQVIASMIKGEYDDDSNWQMVEYVLDNSNLEGCDYSLRFFNALLD

SEQ ID NO: 176404 - protein, 1028 aa, Oryza sativa
  Clone ID: PAT_MRT4530_74155C.1.pep
MAAVNSSMGVMAPLLTKLAMLLSNKCKKLKGMRKNIEFLSHELTEMNAVLENLADMEKLDGQQKLWRNDIREMVYDIEDCIDVFMYHLGDGNNKDGLLRKTARKLRNLRARYQIADKIQELKARVMQVAERRDRYANLGVSTSSIPKVVEVDPRLPALYEDAKNLVGIDGPCMEITQWLMDEVENGSIQQLKVLSVVGFGGIGKTTLAKQVYNQLKKRFNFTSFVSVSQNPDMVKLLRNLLSGTGFQGYGILDDHQKLIDTLRGHLANKRYLIVVDDIWNTQAWSIIRCAFAQNNHGSRVIVTTRIEDVATKCCVDFHGMVYKMEPLNEFNSQKLFCKRIFDSDSIPEQYKNVSEDMLRKCKGVPLAIISIASLLSSEGMNVGKWKKIHNFMGSESETNPTLEWMRHVLNLSYLDLSHNLKTCFLYLGIYPEDHTIFKADLIRLWIAEGFIHEKPGLDLEETAESYFNELINRSMIKLDDYRSSEACHVHDLMLDLIISKCQEENFITIASKQPVKNVTKLPVRRLCHQLSYGNLAMERMKLSQVRSYNTFPAFGCSMQPPISMFEHLRVLELRAYSTSVFLDLSAVSNLFLLRHLSIRGFRLKLPQKIGRLQCLRTLDLLGSLLVTGFPSDVISLSSLCHLTVSGDAVLPNGIQKLVSLQTLLTFNSGGLPDIFTIVEKISRFNSSAIRLAKTRRFNNGGLRSTNGGLRSPPASLEFPSFDDGWPTESILDYLSQHLDTPASSHSDLFSPNLVACSPHILNFASLWLQQLIIRKNIRNVPSWLWFSLKLTMLELRVEELSCRDVQFLAGLPCLVDLDLTAQATPENIITKRVTTRLGRITHTDNFPKLQKFVLTCDLACLTFEPGAMPQLQILKLDDKKPSNLEEGHGTSGAAQHGKTPLIGIEHLPRLEEVQVTSHSSKVPAYRDAVQRHPRSTLVNRVISSKNSTKEWKDKVRELAYDIEDCIDIFLHQLHPREDKDRLVWKAVRKIKATMCLPAIKSPSKFKNSRHMSIYMIDVSTSGDRFIRI

SEQ ID NO: 176405 - protein, 105 aa, Oryza sativa
  unsure (1)..(105): unsure at all Xaa locations
  Clone ID: PAT_MRT4530_74156C.1.pep
YDEPHPQISDSTNPALPQQQPPAPPQTPPASPXTPPPQPPPPRSRHSPSLALLTLCASAPLKRRSRKQAPPPAPPXPPTPPPPPAPPPQPLCFWGLTANCLQEGL

SEQ ID NO: 176406 - protein, 272 aa, Oryza sativa
  Clone ID: PAT_MRT4530_74157C.1.pep
MTTPPWVLLECDAYIATNHGNATTATSRTRTGHPIEPTIIATEADLVLLRLALGPRDDSFKTSRQDYFIYHASSTAPKLDNRFIDKQVGILRCLDDGTYIVAALCSAFKRGDHLYRSGADAWTCHPLSIHGLVFDPSFSHVTSKVITVGGEAGTMGWVDINDGILFCDLLRDTAELRYLPLPPPLEHKDDMIVGCPGPLRDFALVQGRIKYIEMQVDLWDDQNAWVLAVDMKNKRLKDVAEFGAGRTLGISSAYISSRISDYLPTAPEILNL

SEQ ID NO: 176407 - protein, 449 aa, Oryza sativa
  Clone ID: PAT_MRT4530_74158C.1.pep
MGGDESDGWSDWEEKTIMDESLRPPTHVATAAMTTPPWVLLECDAYIATNHGNATTATSRTRTGHPIEPTIIATEADLVLLRLALGPRDDSFKTSRQDYFIYHASSTAPKLDNRFIDKQVGILRCLDDGTYIVAALCSAFKRGDHLYRSGADAWTCHPLSIHGLVFDPSFSHVTSKVITVGGEAGTMGWVDINDGILFCDLLRDTAELRYLPLPPPLEHKDDMIVGCPGPLRDFALVQGRIKYIEMQVHVRPGSAINGTYASQGWIAATWSAPPTNPWKQGWRQDCQISASHLAVDHNTMNFELLPELGTPQQTLERLHVGLPKLSLHSDDIVCFMAKVDLWDDQNAWVLAVDMKNKRLKDVAEFGAGRTLGISSAYISSRISDYLPTAPGLKGNLKRQGVVLTVPSHKKQTRVVLSNPSWKGGDQQNSGTSMDDKEDNMDLDLDMFFG

SEQ ID NO: 176408 - protein, 94 aa, Oryza sativa
  Clone ID: PAT_MRT4530_74159C.1.pep
SSPVIYRLVSRFSPGPFVGPPVPPFFPPQVCFFSPQIFPFCGVFVFLCPVCLPCSVQFILLFLNLSLHFLEKNQKIHSKKKKKKKKTQKKKNPK

SEQ ID NO: 176409 - protein, 395 aa, Oryza sativa
  Clone ID: PAT_MRT4530_7415C.1.pep
MQLRRLLALSGEVSGRLRRRSHSTFASPSRPAWAMVVSEPQEEAPELRATFRLAEPPRASQLLVPYDAIRPRGSQGPLCAAAEEATSEDGLLLLRAIVAHGACACAHATAPNLPASSRPPGQRSVARVVCNPLTGQLLRLPDIDGASSEVSPGLMGYAGLLTQADGGDGPPDRYAVAEVSCDDFVMHRFLSETGRWDAMPGFLSPLPAARPIVVDQPVVAFGGRLWWIDLAWGAVSVDPFADEPDFRFVELPRGRVLPSSNEMSFERRRRKKVLSTHRRVGVSEGTLRYVEVSGVEQFVVRSYVLDDDGSSWTMEQSTALRAQGAPFPGMPGIACIDPVNADVVYIMVGSGLVLGVDMERGMGFGLSVLDEPAWPTPCVLPPWLESTRIPSSTGV

SEQ ID NO: 176410 - protein, 42 aa, Oryza sativa
  Clone ID: PAT_MRT4530_74160C.1.pep
SLPQSLSGEGGKVLAGDVRLTGKYKSFKGAQSSGPLPQSLVL

SEQ ID NO: 176411 - protein, 101 aa, Oryza sativa
  Clone ID: PAT_MRT4530_74161C.1.pep
MGFTMGPQVAKGHFKPYNFFGSVAKTVERSVPRISDKQLRSSAEKVSQESSISKPLRAVIGGSRARPAYMAKQGAGKKLLRHKHDIDLDLSLVTCVYASPV

SEQ ID NO: 176412 - protein, 107 aa, Oryza sativa
  Clone ID: PAT_MRT4530_74162C.1.pep
MTDDRVRVSADCQCDISPNTSAASLPAVFAHFMAHTTRPAAGSSSIAEVLHSIEYQYHQGARPHRSPPAMLPLVLAGGGAHPTGGKTEARFQPIQTKPFKAEGPPQF

SEQ ID NO: 176413 - protein, 121 aa, Oryza sativa
  Clone ID: PAT_MRT4530_74163C.1.pep
LARVIMSINTYMVARHDQARCEMRSSSIASKLYMVRVRSGTVGACSRTAAGDDVLRRRRRLGRLWFCDAAVARHAEAAAAVVVVVLVVVLGAVLLRRRLVVVVEQEVSSPRLLHHVHFAFE

SEQ ID NO: 176414 - protein, 107 aa, Oryza sativa
  Clone ID: PAT_MRT4530_74164C.1.pep
MEVGFEEVGRAGEVVFRAGDGEETGMQVAWSARDAADKWPMVWVPVRVAAGWARGSSWERDRDREDHGEFVALHPMRDRRMGLSLTSRHKNDGLELVMPQGDATFRV

SEQ ID NO: 176415 - protein, 60 aa, Oryza sativa
  Clone ID: PAT_MRT4530_74165C.1.pep
RWCTWSSIIIPHQHRVQWSAKHVFFQAQVERRQGVGKAVYNGEAILIDRIYSVKRQSGRV

SEQ ID NO: 176416 - protein, 138 aa, Oryza sativa
  unsure (1)..(138): unsure at all Xaa locations
  Clone ID: PAT_MRT4530_74166C.1.pep
KENFLPYSTTHPNNNNNNNNNNNNNNNNNNNNNNNNNNNNNNNNNNNNNNNNNNNNNNNNNNNIYHAXRTFNNKSSHNKINNNYIYFFNKTNGQIYLKKSTTLYIKTGERVCGRHRDIIILSFSLFSNRLNLRKIITK

SEQ ID NO: 176417 - protein, 372 aa, Oryza sativa
  unsure (1)..(372): unsure at all Xaa locations
  Clone ID: PAT_MRT4530_74167C.1.pep
MVESWLGVCGWWCAAARRSGGGYRLSWSGLLKWSLSYADGTRPCRAISEEERRWLAEAVERHMMVDVVSRMREIALLMSTPISVLGGAXASVIKYLRNSNARIRARAADVVTTVVQNIPIGRLLYMEPNDFYPLIXKFKSDPDLTARIKALGALSSLIRNNKPGVSAFFILXGGLVPVIKYLRNSNARIRARAADVVXYSLVKAIPVAPVFAQLGFPRLMMHLVSSDDLGVXEAALGGLLELARDTTLGSRSLLADHARLLRLPQARIERIRMMAPEDLDAAREERQLVDSLWITCYHEPSTLHVEGLLVLPGEECFEQPPDVAGRFFEPLRRSSARRAPSNERSDPGDGTGGGMMLLLGPSPGSRSNSGSN

SEQ ID NO: 176418 - protein, 278 aa, Oryza sativa
  unsure (1)..(278): unsure at all Xaa locations
  Clone ID: PAT_MRT4530_74168C.1.pep
ARGKRRPRQGXREGGKEAAVRGSPXIDGDDEKGGRSGGRRRRGSGRRGRRRSGGRRARRGGERGRRRCDEAEGGDAGAGNGPGRRRWRTGARRXRRRERATSRARIWRGGRAARGGNGRRRCGEGLNKVGRGRXRPGRKETSAAFSGSINGAGXLGEGFQTNPRERGRENWGERERESLGVFPPTLLHPSARVAGGIXGRNGARVRTGERERKEAEREEDDDPGWDPRGQARCQRTHVRGTGGRAPLGLGPEAAQEERRERQPGREREEEGAGPRGRS

SEQ ID NO: 176419 - protein, 219 aa, Oryza sativa
  Clone ID: PAT_MRT4530_74169C.1.pep
MVGDKDAAALAGELTGDAGASLNGFFDHTGLESAVVGEGQGEGEEEEELEWLSNKDAFPSVDTMAAEVESAAPGAPARAAVGPRTKGLRRRRRVTAPWSLAPLLSRPRQAAAAAADAGAPRRRCTHCAVDETPQWRLGPDGPRTLCNACGVRFKSGRLFPEYRPANSPTFSPLLHSNSHRRVMEMRLQSEEDASAASRVNAKARRAERAAARLAGKDKK

SEQ ID NO: 176420 - protein, 198 aa, Oryza sativa
  Clone ID: PAT_MRT4530_7416C.1.pep
MRKNFRKRNLEADAAADHSDDDDARRLRYVENELLKKRGKKVDVKDKEEKDQVDELYTVPDHLKVRKKNSEESSTQWTTGIAEVQLPIEYKLRNIEETEAAKKMLQEKRLAGKTKSDANIPSSYNADFFHRGKDYTEKLRREHPELYKDQGSQANGTGGKSMGGNHPDGAGAGRREAATDELLLERFRKREKFRVMRR

SEQ ID NO: 176421 - protein, 48 aa, Oryza sativa
  Clone ID: PAT_MRT4530_74170C.1.pep
SLGVLFFSPEKIKKCIKKLKYKKKIKKKKKKKKKKKKKKKKKKKKKTK

SEQ ID NO: 176422 - protein, 127 aa, Oryza sativa
  Clone ID: PAT_MRT4530_74171C.1.pep
MSPKRLQVGALCPFSPPATAHRPAASAAAETAQAHGPHSSSLFLSRFSNATQREKNATTLATFLTTPTSSTSPTVRRSRMGSEDTKDMLKNVDWKTVGGSRTVPLSGKWANDLIATSEEFSLLVFSC

SEQ ID NO: 176423 - protein, 293 aa, Oryza sativa
  unsure (1)..(293): unsure at all Xaa locations
  Clone ID: PAT_MRT4530_74172C.1.pep
MEICQEKISFLGHEIGEGKIHLQEHIAKKFLQFPDAMNDKKELQQFLGIVNYARNHIQNLAKLAGPLYAILRKNGMKKSMNYNGVEFFTFGEDNKLRIFPPNSYKFKPKDHIIIYEVQECILDNFWYQYNNMKGYILSILNSLAEYFHLINELMPVAKNIEAIQQKPIYVVFEGRVPGVYISFEEIISQKIDAKLTVGISWKKYKDIEEPLGQARKILGINYYLEPAAKEYIQKCKXARNKKNPEPPHYTNIKEEGSSRKLTYKECLTKGLDPLDSEYIDLKINEKIAEVSTQ

SEQ ID NO: 176424 - protein, 47 aa, Oryza sativa
  Clone ID: PAT_MRT4530_74173C.1.pep
MAVVEPDSGRAHGYDNGSVEVSGGTAEAENSTRGSAGRRRRPAANGR

SEQ ID NO: 176425 - protein, 82 aa, Oryza sativa
  unsure (1)..(82): unsure at all Xaa locations
  Clone ID: PAT_MRT4530_74174C.1.pep
VLKIGLKRTKGEEKQKAPKDIRGKERGTLKQENIYKGTTKKXYPHPFQRKTFGTLGGVKTFEYHGAEQKTPKLKLWGGKFCP

SEQ ID NO: 176426 - protein, 132 aa, Oryza sativa
  Clone ID: PAT_MRT4530_74175C.1.pep
NGKLASHLSLSLSLSACLMALLTEFKVLVMPFLPPAVLTLFLHSSPYKLPLMMHISPVMKVSEAQEKFKKAVERHGMDLKRSIEICRLYLHIQCTLQHLSMPSASLLILAISLYITKNQLLAQLGHASAPQP

SEQ ID NO: 176427 - protein, 75 aa, Oryza sativa
  Clone ID: PAT_MRT4530_74176C.1.pep
GWGFFFFFFFFFFFFFFFFFFLGFKTFHYSLFGLNTFSVHATQQRGDPPGGGGSQLSLVLAGGKNAALVGVNPGH

SEQ ID NO: 176428 - protein, 142 aa, Oryza sativa
  Clone ID: PAT_MRT4530_74177C.1.pep
MVVFFFAHPIHGRTHDNNFSTPGVATEGGWGGSSGGKSMMADAEIDRSRRRARRRPRRPEIADGYLDPSQASRLYSIGFGSNFPNQILEGKYTPICAFSQRAKVAREASRFSIAMVAMAIDDCAEQSWCFLVTKKHLLFFWI

SEQ ID NO: 176429 - protein, 95 aa, Oryza sativa
  unsure (1)..(95): unsure at all Xaa locations
  Clone ID: PAT_MRT4530_74178C.1.pep
WKGYGPAVGERGAKLSGGRKQGVAVARAIVRDPKILLLDKATSALDAESERVVQNALDRVMVNRTTVIVAHRLXLMNIKDGAYASLVALHSAASS

SEQ ID NO: 176430 - protein, 107 aa, Oryza sativa
  unsure (1)..(107): unsure at all Xaa locations
  Clone ID: PAT_MRT4530_74179C.1.pep
MRLSSPKSMVTLPSLXDEXXXKSHGIRCDYIRSATNVIMVTXTTXXLFXGKXGLXAXSANKKSTAGLXLEARXSRLXTRRVRPDLLPPSGINGASFVLPKSPGSAIH

SEQ ID NO: 176431 - protein, 137 aa, Oryza sativa
  Clone ID: PAT_MRT4530_7417C.1.pep
MRKNFRKRNLEADAAADHSDDDDARRVALEEIKYMQKLRERKLGIPAAAAAAGASSAASADGASPRGRGGGGGGLAAGGDAEKEDLVLQDTFAQETAVTIEDPNMLRYVENELLKKEGKKVDVKDKEEKDQVDELYT

SEQ ID NO: 176432 - protein, 274 aa, Oryza sativa
  Clone ID: PAT_MRT4530_74180C.1.pep
MGEFPTPSEKRKPLYTNGLDLLWEEPREFKVGLLPIAGRVRKADGGQSVGGGDRLSALSDGVIGHILSFLPANEAARAAVFSPRWHHTFTAVHTVYLVEPDAPVVDHDELAKYSPGWGPPSDPNPPPPLFTSAISAALLARHRRLAAVSLRALRISMFEPQKYSVLRGLFTCAVLRSLSLGSVRLTLPAAIALPSLETLLLADVTDHERNMQRLISGCPRLADLTLEACYEMAPLSVAGLALRCCHGLDTVVLDDMSSPSELLQAFELQATALR

SEQ ID NO: 176433 - protein, 76 aa, Oryza sativa
  unsure (1)..(76): unsure at all Xaa locations
  Clone ID: PAT_MRT4530_74181C.1.pep
IFIYVFILPSLNVDSHFVSYLFLFKIWLQECYVNYLFWKKIIFLFDLKKRRSLLIYSNLRSSTSKVKVAFGGMTXR

SEQ ID NO: 176434 - protein, 73 aa, Oryza sativa
  Clone ID: PAT_MRT4530_74182C.1.pep
FSEGGGFEQYDLGTGTWAPASDGDIFHKPPPSPHTLIHHIFTCCNRRYWNKGIMYCSKRQPIWLVKQELRFGA

SEQ ID NO: 176435 - protein, 108 aa, Oryza sativa
  Clone ID: PAT_MRT4530_74183C.1.pep
MQTATRWCTGMAADTAKLPSFLAAASPHPLPPPPPPLRVATCAALPRCCLASSAACRRGAVRVQRFGVKNIRFYGSGVWAADQAVMIAVTSEASSPQLSGGCGLRSSE

SEQ ID NO: 176436 - protein, 110 aa, Oryza sativa
  Clone ID: PAT_MRT4530_74184C.1.pep
MVTAVASNGNRGSGCASLPPDPMGGEAAAFIDDSGNGHVLPSARSSGRGGGGGYNGRGEGGSPLLSSSPSADGSRGGEGRRHHVFNIVHWSFNVVFLMFLSVVMCSYNSL

SEQ ID NO: 176437 - protein, 286 aa, Oryza sativa
  Clone ID: PAT_MRT4530_74185C.1.pep
MATNSKQSVHMNPGQGETSYAQNSALQMKKPYGRLRCVVDDYVASLHIKLKELVGDKFIKTAQDRMKTLIEEAVTGLCTSSCPHPKNMVIADLGCSSGPNALTLVSAAVDAIHRYCAQHEQLPPEMCVLLNDLPDNDFNAVAKSLDTLKHSGDEALARPTAVITGMVPGSFYERLFARGSLHLVCSANSLHWLSEAPEDLKKSRIPMHDSDEQLRSSRHQIVADSYARQFRKDFMRFLSLRAQEIVPGGRMVVSLLVKRSDKPDTELIQPWTPAVTALSDMALRVS

SEQ ID NO: 176438 - protein, 54 aa, Oryza sativa
  Clone ID: PAT_MRT4530_74186C.1.pep
MGLTGLRRSRGLLSPASEMAPPFPANPRWVGPCGEECEADNGVPPCSPGPHGSD

SEQ ID NO: 176439 - protein, 152 aa, Oryza sativa
  unsure (1)..(152): unsure at all Xaa locations
  Clone ID: PAT_MRT4530_74187C.1.pep
YNSIITPPRGFPPQWSQTLWVDSCALTVTIIIIIXSAXSSDTTITHHHTHHFHFTSSHHNTVGAXRSIYHIMADTKDSRQPDKGGHHLFXCDRHAGPGTPAQWRSQASDAQQAHTHAQCGGPPCILCCNTINPAQPXIRSVHLFQAIQRTQA

SEQ ID NO: 176440 - protein, 83 aa, Oryza sativa
  unsure (1)..(83): unsure at all Xaa locations
  Clone ID: PAT_MRT4530_74188C.1.pep
GSTRRSRRRRVPXAALPLLILLVFLLSTSLGACSSASKRGGDGRQRRCGSSPPTCRSRCGGCHPSLFFPAASPLLHGQGLAAT

SEQ ID NO: 176441 - protein, 63 aa, Oryza sativa
  Clone ID: PAT_MRT4530_74189C.1.pep
KRVVPPPQSLLKQTSRLALEGIKLRFIAPSSKLGRGGFQPPAEKQGFFGKLKAWALRIQSTLP

SEQ ID NO: 176442 - protein, 176 aa, Oryza sativa
  Clone ID: PAT_MRT4530_7418C.1.pep
MMERTWARKMHTHARCQRIGSKTIFVAEPISPSHIHRQHVLSSRARLIDFNRADRLPSEKIVFGPRDQTRVTRARGVAQAVLCGTAAENFFPSGRPLGHIAKKGLFSAAPCGGRAYVERWNGTRGDRGTGPGRRGDGDARAPVPWIVACRSWAEKEDMAAGQQECGLPVAGLVGLA

SEQ ID NO: 176443 - protein, 83 aa, Oryza sativa
  unsure (1)..(83): unsure at all Xaa locations
  Clone ID: PAT_MRT4530_74190C.1.pep
NSRVNRGGKEHGFVCIHGGAWGCXXGAXXSGGGGGRCGVRAYXALAVAAPAARDALRGARGRGXSEQGGXQGGVPASGEGGAP

SEQ ID NO: 176444 - protein, 63 aa, Oryza sativa
  Clone ID: PAT_MRT4530_74191C.1.pep
MVVNVDDEAVSSDRVGNSGSGEDEVVVCLNHHAPYPAKRRRSNFSDESDPTRTELRSSDRHEL

SEQ ID NO: 176445 - protein, 652 aa, Oryza sativa
  Clone ID: PAT_MRT4530_74192C.1.pep
MAAAAAVAAVVVAAVVAAAASAAAPASAGEPTRDVRWEVGYMTVAPLGVSQKVIAINNQFPGPLLNVTTNWNVRVNVQNNLDEPLLLTWDGIQMRMNSWQDGVAGTNCPIPPGWNWTYQFQLKDQIGSFFYFPSLGLQRAAGGFGPVTVNNRAVVPVPFAQPDGDITLFIGDWYTKSHVELRKMLDDGKDLGIPDGILINGKGPYSYDNTLIPEGLQHETVGVEPGKTYRFRVHNVGTSTSLNFRIQNHNMRLVEAEGTYTYQQNYTNLDIHVGQSYSFLVTMDQNASTDYYIVASPRFVTNESRWHDVNGVAVLQYSNSKGRASGPLPDGPNDFYYKSYSMDQARSIKMNTTAGAARPNPQGSFRYDSINITQTFVLKNELPLLINGKRRRTINGVSYSPPETPLRLADLHNLTGVYKTDFPTMPGNAPPKMASSTLNASYKGFLEIVFQNNDTGVQTYHLDGYSFFVVGMDNGDWTPDCRSRYNKWDAISRSTTQVFPGGWTAVLVSLDNVGIWNLRSEKLDNWYNGQEVYVKVADPLGYNITEMIMPDNALYCGLLKDLQKPQIHQATTSKHHRRDKDKDPDRERPSSSRHHHHHHHRDDKDGERDRDRDRHHREKERDREERKARERDKEKERARRREESSRSRRHGA

SEQ ID NO: 176446 - protein, 81 aa, Oryza sativa
  Clone ID: PAT_MRT4530_74193C.1.pep
MEQETGTATRLSMTDFASITKVSSLYVLQCRLSTTSFTSEPRLVDLHRHGQQLEAHPCDLPDTGCGHACDKQDLSDTRGHG

SEQ ID NO: 176447 - protein, 119 aa, Oryza sativa
  unsure (1)..(119): unsure at all Xaa locations
  Clone ID: PAT_MRT4530_74194C.1.pep
KVFIESSYDLNGFWEGIVDKYEELRRAGRDDGRXPFVTHFVGCKPCRRYADSYPAERCRRGMERAFNFADDQILKLYGFAHESLNTTAVRRVRNETGEPLDAGDEELGRLLHPTFRAAR

SEQ ID NO: 176448 - protein, 278 aa, Oryza sativa
  unsure (1)..(278): unsure at all Xaa locations
  Clone ID: PAT_MRT4530_74195C.1.pep
IANWFRERYMQNTLQLHPRTSDTPTWKLILSQFQTLCSTTQVKLGNGRTTLIWKDKWLHQRLEFAYPVLYSFALHKDCTVQSQFRQNSXQIQLHPSLSYQAKSELHALLQILQNLCPIPEKTDTKXFLYTAPKVSAANAYRLLTYHGSIWKPADYIWIHTIPQNCKIFLWLAFKDRLNTKSNMVSKNWNEDPHSSLCPXALESADHILLRCNNANNLREKLNLLQLANKSESSSAFLQAVIDMNHSSKGIEPIWFAACAYTLXKSRNNIVFEGQFDNP

SEQ ID NO: 176449 - protein, 481 aa, Oryza sativa
  unsure (1)..(481): unsure at all Xaa locations
  Clone ID: PAT_MRT4530_74196C.1.pep
DFFPIQPIFFPPPPFPPMEVRPRAPPPPLRARRRPHQIPAHPRTLPPPRPLPRATLPPSPPPRQALPPPPRPSPRAXPPQPAPNPAXPPPLPPLASPVRSXVPPREPPPPLWPPATAXPPPTTDASSREPPAPARRPHPERRHGPPAPVRPRASPWRSPPATAAKSPSXRCSPPTPPPPPIPPPPAATETACFSSSLTPPRVLAGATPXAAAPPRPRRSRRGRPPSSPPPRLSSLLAPPPPRXPAPPRPSSSLAPPPPRCRRYAASSPEPTSAPSPAPEPTSTSAPRDPPPAXPSRRPWRGSPPSYATPRPPSPPSPSPISPLRRSPRLPPPSSRCPPTRRARRAPPRRSSPAGRRTSAAPAPGRRSPPPPSPSSSRSGSRTAPRTRASGPLPDPPMPWXRGLASPPASRTPPPPTAPAARRATPCSLPADLLPGCSPGEVAPRRTPAGSRRRPCPAAGPRRPPAPRPPGMSTSPTPPPSP

SEQ ID NO: 176450 - protein, 118 aa, Oryza sativa
  Clone ID: PAT_MRT4530_74197C.1.pep
MAATSSPAAGGRGAVPRAPTEARQRTRGACRASCTVPSCREATQLGDGPWNTRRTSDSGSDEVTARNCYGDSDTSRGDSSRADPTRGGSRGADHLRGSRYDLVEDQCDGSRADPTHGG

SEQ ID NO: 176451 - protein, 471 aa, Oryza sativa
  Clone ID: PAT_MRT4530_74198C.1.pep
MPSSGDAAGRRPHVVLIPSAGMGHLVPFGRLAVALSSGHGCDVSLVTVLPTVSTAESKHLDALFDAFPAVRRLDFELAPFDASEFPGADPFFLRFEAMRRSAPLLGPLLTGAGASALATDIALTSVVIPVAKEQGLPCHILFTASAAMLSLCAYFPTYLDANAGDGGGVGDVDIPGVYRIPKASIPQALHDPNHLFTRQFVANGRSLTSAAGILVNTFDALEPEAVAALQQGKVASGFPPVFAVGPLLPASNQAKDPQANYMEWLDAQPARSVVYVSFGSRKAISGEQLRELAAGLETSGHRFLWVVKSTVVDRDDAAELGELLGEGFLKRVEKRGLVTKAWVDQEEVLKHESVALFVSHCGWNSVTEAAASGVPVLALPRFGDQRVNSGVVARAGLGVWADTWSWEGEAGVIGAEEISEKVKAAMADEALRRKAASLAKAAAKAVAGGGSSHRCLVEFARLCQGGTCRTN

SEQ ID NO: 176452 - protein, 123 aa, Oryza sativa
  unsure (1)..(123): unsure at all Xaa locations
  Clone ID: PAT_MRT4530_74199C.1.pep
LRALRRRRGNHAQRTPAKPKPAAXSGXPWXYAPNRVLYLGPLXGXPPXYLTGXFPGXYGWXTXGLSXKXEXFAKKRXLEVXHSRWXXLXXLGXXFPEPSPGKGFXFRXSXXSRXXSXIFXKGG

SEQ ID NO: 176453 - protein, 83 aa, Oryza sativa
  unsure (1)..(83): unsure at all Xaa locations
  Clone ID: PAT_MRT4530_7419C.1.pep
MPSFLSRSFCMYLISSRATXRASSSSEWSAARPPRGSACGSSSAWLDGAWXGSPARFGWGSSTAGWPAASLQMVARWGFWIGL

SEQ ID NO: 176454 - protein, 362 aa, Oryza sativa
  Clone ID: PAT_MRT4530_741C.1.pep
MLLSHCFAVAFALSALLAGLALAMDDATFGMEWTAAELGEARSVIARVSNAYDSGAGSSNSAGDTKHDRIMRELQARFPSRTMVQVIDLYLNLTAETAAQAGAAQPQDAGGAGDAAVVHPTFGLANDNFGMPVANNNDDGVDAGMVFGGAPMEEGAVAVNGGDGEVVNPDNADDDVLWTDYEHRLFLTGMRVYGRGDWRNIARYFVGSKTPEQVSMYADNYFHMMEIAAAMEADGDDDDDHHENNNNNLGGGQLHAVVGAVEHHENYNNNNLGGGQLNAGLGAVGHGPGAGHIAPATSSNNNVAAAAANNNVDAPFWVPLLYNLEIEQRMMEMQAQSQKAWDDQQMKMAEAATDPKEGAADK

SEQ ID NO: 176455 - protein, 113 aa, Oryza sativa
  unsure (1)..(113): unsure at all Xaa locations
  Clone ID: PAT_MRT4530_74200C.1.pep
APPFPPMEVRPRAPPPPLRARRRPHQIPAHPRTLPPPRPLPRATLPPSPPPRQALPPPPRPXSPRDCRLSRRRIPRAPPPLPPLASPXQISVPPREPPPPLWPPATAASSSYD

SEQ ID NO: 176456 - protein, 69 aa, Oryza sativa
  unsure (1)..(69): unsure at all Xaa locations
  Clone ID: PAT_MRT4530_74201C.1.pep
DSLQNEDFATSDAVFDCIGDPPEVRFDLEFCXHLLPKPFVTEGPTSISPLSYKFYKFLPRIMESGNGSL

SEQ ID NO: 176457 - protein, 101 aa, Oryza sativa
  Clone ID: PAT_MRT4530_74202C.1.pep
VFFFFFFFFFFFFFFFFFFLGLKHFYFLILFIHSSQRDGSMEVFLPLSGKESTHTRGQGKGFEQNLNKHSKLKQTRGPNQIPKKKNPGERPNFFFVPNASV

SEQ ID NO: 176458 - protein, 53 aa, Oryza sativa
  Clone ID: PAT_MRT4530_74203C.1.pep
VEPSSRSKQVLALETSQVAYQKVTHIFWNVALIGDGCLTVVLNESPVPGVVQL

SEQ ID NO: 176459 - protein, 64 aa, Oryza sativa
  Clone ID: PAT_MRT4530_74204C.1.pep
LARSNTLVIKLRYYKHGGQCKSSPENRPYIAKCILNQHFEVKPRWIAESILHALFSDESMILTH

SEQ ID NO: 176460 - protein, 93 aa, Oryza sativa
  unsure (1)..(93): unsure at all Xaa locations
  Clone ID: PAT_MRT4530_74205C.1.pep
VDASWVSRLXSHLQPLMEPCRQDAVSLXPRPVGFLAVAXRPALPCRGAXRLXLAAAAGARGRDAPPPDVEXRWALGRTLVPEVXLAYFGSTVF

SEQ ID NO: 176461 - protein, 151 aa, Oryza sativa
  unsure (1)..(151): unsure at all Xaa locations
  Clone ID: PAT_MRT4530_74206C.1.pep
AHIYVLTVKFGKARSHHRFRVNIGFRVLESADXKEAADGSHQVAMLSCFLTANKGFIGVSADFMTTDLQPMYALTIRSVLIXYHVIVSQLVYTGLYCCYTLLSTADCLYIIIYIGHIADCLNPIAIGWYRHRLLSTXGWNHYIGLSADRLF

SEQ ID NO: 176462 - protein, 72 aa, Oryza sativa
  Clone ID: PAT_MRT4530_74207C.1.pep
PPVFPHALKVFFRRRGFPPPNLRRAVAPLNRHVSPKQVTPCIYVVLRVRAPLQGLVSFRGSLIYLSSTFSIF

SEQ ID NO: 176463 - protein, 106 aa, Oryza sativa
  Clone ID: PAT_MRT4530_74208C.1.pep
LGFLNCFVFFFCFFFFVFFLFVFWGKYKFGINGPKRKLFRALAKRGKLQRRLKKIQPDIKLYWRGGPRNKKEPKKRKKPEKEGLFQGSTELPTPKWGPLKPLRGHI

SEQ ID NO: 176464 - protein, 468 aa, Oryza sativa
  Clone ID: PAT_MRT4530_74209C.1.pep
MEIVGECEYRGEAVLVTPSSATPRRSLYLSNLDDQRFLRFSIKYLYVFPPSAAVAADALRAALARALVHYYPLAGRLRHHADDKLVLDCNAEGALFAEAFLPTLTAADFLRAGATAKPHKSWRKLLYRVHAATFVAVPPLVVQVTQLGCGGMVVCTAISHCVCDGIATANFLHAWAAFAAADLDLAADRDDDLSVVLHDRRALRPRCPPRVAFTHPEYHTSSSSSSLLLIQPRLMPLAPVSLTFTAAHLRRLKARSLRSCTSFEALAAHVWRAWVLSLAPPPPPDMRVKLLFSVNVRRRLKPELPWTYCGNAFVLACAEATPTELAAGAGVRLVQEAKDCIDDDYVRSTVDLLDQRRGAKPDLAATLVISAWTRLGLEDVDFGKGRAAHMGPLTSEIYCVFLPVLADPNAVTVLLSLPQPAADTFEHHCCSCFLLDLDDDQPAVPVLVDKQDHDNQLVRAHHQHDILA

SEQ ID NO: 176465 - protein, 109 aa, Oryza sativa
  Clone ID: PAT_MRT4530_7420C.1.pep
PTGASPRGRGGGGGGLAAGGDAEKEDLVLQDTFAQETAVTIEDPNMLRYVENELLKKRGKKVDVKDKEEKDQVDELYTVPDHLKVRKKNSEESSTQWTTGIAEVQLPIE

SEQ ID NO: 176466 - protein, 1032 aa, Oryza sativa
  unsure (1)..(1032): unsure at all Xaa locations
  Clone ID: PAT_MRT4530_74210C.1.pep
MMTTGRAPEIDEDLHSRQLAVXGRVTMKRLFASNVLVTSLNGLGADIANNVVTAGVKWVNFHDDDIEELWDFSSNFFLTEKAVGQNSAQTCVQKLQELNNAVIISTITGDLTKEQLSNFQLPQIPLLLDIWNSIKAVVFTDISLEKAVEFDSYCHNHQPPIAFIKSEIRGLFGSVFCDFGPEFTVLDVDGEEPHTGIVASISNDNPALVSCVDDERLEFQDGDLVVFSEVHGMSELNDGKPRKIKNARPYSFTLEEDTTSYGTYVRGGIVTQVKPPKVLKFKTLKDAIKEPGEFLMSDFSKFDRPPLLHLAFQALDKFRNDLRRFPIAGSSDDVQRLIDFAISINESLGDSKLEELDKKLLHHFASGSRAVLNPMAAMFGGIVGQEVVKACSGKFHPLYQFFYFDSVESLPVEPLEPAELKPENTRYDAQISVFGSNLQKKLEQAKIFMVGSGALGCEFLKNLALMGISCNQNGKLTVTDDDVIEKSNLSRQFLFRDWNIGQPKSTVAATAAMAINPKLHVEALQNRASPETENVFNDAFWESLDAVVNALDNVTARMYIDSRCVYFQKPLLESGTLGAKCNTQMVIPHLTENYGASRDPPEKQAPMCTVHSFPHNIDHCLTWARSEFEGLLEKTPTEVNAFLSNPGGYATVARTAGDAQARDQLERVIECLEREKCETFQDCITWARLKFEDYFSNRVKQLTYTFPEDAMTSSGAPFWSAPKRFPRPLEFLTSDPSQLNFILAAAILRAETFGIPIPDWVKNPAKMAEAVDKVIVPDFQPKQGVKIVTDEKATSLSSASVDDAAVIEELIAKLEAISKTLQPGFQMKPIQFEKDDDTNYHMDVIAGFANMRARNYSIPEVDKLKAKFIAGRIIPAIATSTAMATGLVCLELYKVLGGGHKVEDYRNTFANLAIPLFSMAEPVPPKTIKHQDMAWTVWDRWTITGNITLRELLDWLKEKGLNAYSISCGTSLLYNSMFPRHKERLDKKVVDVAREVAKVEVPPYRRHLDVVVACEDDDDNDVDIPLVSIYFR

SEQ ID NO: 176467 - protein, 44 aa, Oryza sativa
  Clone ID: PAT_MRT4530_74211C.1.pep
RDSKREHKFLDQQGLKHPLQNLVPHKISRKENQAFTGEERFDEI

SEQ ID NO: 176468 - protein, 48 aa, Oryza sativa
  Clone ID: PAT_MRT4530_74212C.1.pep
HSFVWAGFIPCLCIPSDHMFGLARSLAIHMYSSYPLFFPSLIEWKNRS

SEQ ID NO: 176469 - protein, 94 aa, Oryza sativa
  Clone ID: PAT_MRT4530_74213C.1.pep
IVSASAPTIATGSEVSSCGRLVFLLLYNVLPRLFCSMASLLGINRFGFVEENIDPCIRNYELEDKKMFYNGSPTVLDDSIQKLMANLACKKCAL

SEQ ID NO: 176470 - protein, 288 aa, Oryza sativa
  Clone ID: PAT_MRT4530_74214C.1.pep
MSTLTKAARSLLAVPQRETFITSLCLKLYLMGNYSRDKGFLLSEAIDGGIVKDLDLAILNEKEPEDCDDKDMFCQARVLKAFAGAFPRVLHFLTRLSVQRVIFTETFIIFCLTVALSWTFLRELFLACGAQLGFEGFMLSEVLQGTKDLHTLTIDFQGEKLWVQPEQKQFCPAFNNLKTLSILCVYVEFDLLWALNLLEAAPSVELLFIDTWEHICLVDQMDEEGRKDIYGERTHPSWEISEFTGTRKWRLKKLQFAGFRPLKQQLVFLKAIMDLRDNISSPSQIIFL

SEQ ID NO: 176471 - protein, 371 aa, Oryza sativa
  Clone ID: PAT_MRT4530_74215C.1.pep
MPPSASSFFLPIIIILVVVRGRRENTWKGEAASAGERGGGEEAAAVAATREGRPAPTQKQKPKATAWASVRQRGAEQDCRFLGSAIYVTGCARSRRDGDVGIYPGSSPWGEICRILGIYIISRESLFLYLQACRMGLGHSAHPMRCGPRLVVGYPDTVYPTKTERGGVGDGAGLGALGIGVDGGDVGCSGDEQRHGGRAREQVHEVREVEVQNIEEKNMNTIKNELYPKNGPPLVFEAEQELKKLIPMNRRRTTSSCAEALPKNLIAHLPVQEGEGKRINHDYFCFRYRSKNVINQGIDSLAVTEVIAAELFGFNSPLIYLYDPYSVQEGEVKRINPDCFRFRYCCDNVINQGIDSLAVTEVIAVELPLLK

SEQ ID NO: 176472 - protein, 97 aa, Oryza sativa
  unsure (1)..(97): unsure at all Xaa locations
  Clone ID: PAT_MRT4530_74216C.1.pep
SSSCAPPPPXPXRAPFAPATPPAAXRDPPPQPPSSSPXGSRGPXFSSDQQRSXASGGSIXSARAXARARQSRCPXXXASSRLLXVASGVARGSVGXT

SEQ ID NO: 176473 - protein, 164 aa, Oryza sativa
  unsure (1)..(164): unsure at all Xaa locations
  Clone ID: PAT_MRT4530_74217C.1.pep
RKLARLHVLVCYRGVDLCVRFISANQLEPTLIECLLAGNITTVNHACGSSIEYQSNLDIFYGFGTELLSDALXITTVSCRRLXRQNDQRGEIVHVKNGLXLLKPTLTQLTDQAQXANAQKFXYSEQQQTCYRWNGLDENLCTIKARVIIDYTRRADSYRPRAGR

SEQ ID NO: 176474 - protein, 620 aa, Oryza sativa
  unsure (1)..(620): unsure at all Xaa locations
  Clone ID: PAT_MRT4530_74218C.1.pep
MHGMDGRVIAVDRGGVAVRRRPCPLSDPAPATQPPPPRTHARTRDANVVCLPRSFVEQKLTGRPSSPACSSIICGKPNQPTNHALYVHRRGCRASYRNPEEKVQPMRLEVYVRFTGGRALHLLLLGSVEVAQQLEPVFASKGSSSRPHPEFIEVAGKAGRGREIWRMRRGNWIEGRRKKGGREVAPTGSGLGRFIGEEAPPQXFLLPLASCWLLLLLWALVVVFSCHHRRPLXCLSGSQPGGPESDLGVGLLDSLLLTGGGFLAFGERGGKSFVSLSDSARSVSGAAAAAAMEAITMSPSSVSSHHLDVDAASTSEDMSSLQEGLLFSDSLKDLRNLRSQLYSAAEYFEVFYRNNSQKSTVMTSLKDYTVEALVSTVDHLGFVSYKVDNLVKERSDEVNETEFRVSSVEQRVRICQQTIDQEGRSQQSLLIRAPKYHRRTDIVESAIHPVSEPPRYSRQHMSRKMHKSQSISTPVGRQSTMRSARSPSPSARGTHHRSRSLSPSRKARAKSPSPQIISTQTKGMLSSLDETRAGSPIPNSNPLARSATVARRPPVHPKHFYSYALQVSISPDTKEPCRLAVSKLSEACQSKVPNPDIVLWYMIISYAAIQFSMNLDMSKG

SEQ ID NO: 176475 - protein, 182 aa, Oryza sativa
  unsure (1)..(182): unsure at all Xaa locations
  Clone ID: PAT_MRT4530_74219C.1.pep
FCFSGVLLPHRYKVPDFSKFLGQDDISTMEHISRFLAQCGEASVEEALKVRFFFHXSLTGLAFTWFSSLPSNSIRGWADLKKQFHDYFFAGINELKLLDLISVEQQEGESAMEYIQRFRNIRSQCYDLSLSDEQLVDLALQGLSAPIREXFCHEFDSLAHLMQTASALVLELSRSDRNNFEA

SEQ ID NO: 176476 - protein, 60 aa, Oryza sativa
  Clone ID: PAT_MRT4530_7421C.1.pep
CSPCSFSWSKPSSPATASSYSWQGLLSSPFTNNALGVQPFNIVLSLVKCPSVILAVVYCV

SEQ ID NO: 176477 - protein, 152 aa, Oryza sativa
  Clone ID: PAT_MRT4530_74220C.1.pep
MALVDGGGVATAIFKQCEGETIEEVGAAVQTKEQQGQGGASVRKKGRTMPGIELVLMELREVAARQSDALTRRNRRLDDAQFGGERGGEWGSVNRAQDGKKGKAYTTMGFVHNTITCPKAQIIFGLDEEARIRIQNVQNFISCLLWTKSDVV

SEQ ID NO: 176478 - protein, 52 aa, Oryza sativa
  Clone ID: PAT_MRT4530_74221C.1.pep
TAPAPAPGAPSPAPAPGAPSPAPAPGAPSPPAAAAPVAAPVQISSAPAPGTP

SEQ ID NO: 176479 - protein, 113 aa, Oryza sativa
  Clone ID: PAT_MRT4530_74222C.1.pep
KKNNPPGGGEKFFPPGGGIFPPPGNQERIFFNPPPGRGTRPTLGDPQRTRNIVSKPPMGQGPPGPPKGETWARERAPALFLGKNPPPISGGTLLPRGFKKTLWAGALLVGKAH

SEQ ID NO: 176480 - protein, 402 aa, Oryza sativa
  Clone ID: PAT_MRT4530_74223C.1.pep
MMAVQAQYVAHASRSSSSAAYAIRPALENAAPSSGASALFLDEAVSAALLQQQLVVAAAAVGGGGNNNNTAVFSDLRSELTCSQRRFDDFGGGFVPRKRARVGGEGEAAAGLLMSSSVMEGGGHRALLPPPPPQVTPQAFGDVHKSSSRVVGSGAASTSGRPVCGGGLLLSHLYRQSVEVDALVRFEVRATDRAFIYRHGRWSSVSFCLLSSLEWAFDSICTYLQNERLRAGLEEARRRHLRAVVSAVDRAAARRLHAAEAELERALGRNAELDERLRQMGAEGQAWLGIAKSHEAAAAGLRATLDQLLQSPCAAAAAAAEGEGDAEDAQSCCFVQAPDGGAAEVSGGGNGRRACRACGEADACVLLLPCRHLCLCRGCEAAADACPVCAATKNASLHVLLP

SEQ ID NO: 176481 - protein, 66 aa, Oryza sativa
  Clone ID: PAT_MRT4530_74224C.1.pep
KKSGNPKKLQIMIQSTMFYQLHVMLDVFSVFFPVSRQYPKNESLNRFQDTSNQFVRIHNSWLFNVN

SEQ ID NO: 176482 - protein, 265 aa, Oryza sativa
  Clone ID: PAT_MRT4530_74225C.1.pep
MAAAPPTTRERKRRPGGERGERRANTRWCRGRAKGRGRRRRARRRRRRGGTSRWTSPARSSAASRPTPTASASAPRAARGARPRGNTARRRRCRRASASPTAASAASSRRTRGRSGCPPPPAGSAPAASGSCTGATTTARTCSSTPSPRPPPWRRSPACPVSMSATTPSSPSTSETCGGAGRRGSRARTPASRRPRRPCSSSPCPRPPTWWRRWSAKGGTASSRCAGRGRRRGPSAAATAGGGSKTRRSTRASSTPSTTTRTSSP

SEQ ID NO: 176483 - protein, 54 aa, Oryza sativa
  Clone ID: PAT_MRT4530_74226C.1.pep
HISCKPEFLLVYRHWLVFRRITSEFNKRGKNGKLDELHDEPFYNGGWAIHEPGV

SEQ ID NO: 176484 - protein, 158 aa, Oryza sativa
  Clone ID: PAT_MRT4530_74227C.1.pep
MNGCTGGAGGVAAGRLPAVSLQQAQWKLVDERCELREEEMEYVRWFHRYELVATGATPSLPNTSGCPSKLGLPSTRRIERLGFPDDNDHTLRVKFIGGDHMLKDYSSTLIIHLEVIDGQLVTLVIESFVVDILEGNTKDEISYFIENLLKFNLRTLRV

SEQ ID NO: 176485 - protein, 88 aa, Oryza sativa
  Clone ID: PAT_MRT4530_74228C.1.pep
MVVFDGLRGSVLAQTQQDHIEDKKQQTSNANTSRHSIKILDPYTASSCLVGVQGHGWQVATYLMLWMGWEWPDYTGSLSVDMYRHGSF

SEQ ID NO: 176486 - protein, 74 aa, Oryza sativa
  unsure (1)..(74): unsure at all Xaa locations
  Clone ID: PAT_MRT4530_74229C.1.pep
MVYLRIYGCLPRYKRDLRGGPKASNLTANRTTTSYEVGAFRSQVAGXSSRTNSTTVLSVSSSSAIPFVICGFHA

SEQ ID NO: 176487 - protein, 113 aa, Oryza sativa
  Clone ID: PAT_MRT4530_7422C.1.pep
MGNSIIRVILSPPTLSPHYMVVVFTTIIVIRIVGDMDPGGASGCHVTPLGPVRHTTPRPSSGHHVAGGRYALSHRHAAKCAPIYGESTKVSMHLRGNDGDVLRVRRRTALGPT

SEQ ID NO: 176488 - protein, 37 aa, Oryza sativa
  unsure (1)..(37): unsure at all Xaa locations
  Clone ID: PAT_MRT4530_74230C.1.pep
RVVXPHPYKXYIKCCTIHIYMLVAVFINSLTLYIYHH

SEQ ID NO: 176489 - protein, 132 aa, Oryza sativa
  unsure (1)..(132): unsure at all Xaa locations
  Clone ID: PAT_MRT4530_74231C.1.pep
FFFFFFEHIXXXXFILWRILRYXRLIFRSPAHQAQVWLSVCPITRGSLHCPSGPHPSPXQPVIIISGEGSTIGRYHRXLLXTGHHXAXNQVSIHPGGFHLTFPVHSSEALPAAASHASSGAPKGHRASNASQ

SEQ ID NO: 176490 - protein, 386 aa, Oryza sativa
  unsure (1)..(386): unsure at all Xaa locations
  Clone ID: PAT_MRT4530_74232C.1.pep
MERAHGRRRRRQATSAWVGSAGEPSASSPPPPPSHRRHPPPPPVTXPSPPSPPPSPHQRRRLPPPISVXSSSPRPPVAANAPRPPPGSXVPSISTFPAPPSSPPPLCPHSFLSPPLSLTSPPCPVXASFPPTPADPTATPPPAWISPPLCPPPSPAASTKPSLTRSSSHRPSSKHQAVTPRSTEPSPHPWEGEGEELVAPRSNESSPRPXSTKPRGRGRTRRRRSSPRPLSPSSPPTAPPXSSPCPHLPSQSLRVPLPSSPSMAPPVAVAAPPRRPPPVAAVRPPPXPSPPHXLPEPPPPPENPAKLPTNAPKPPRXPPTNAPTPPRPPSKSXQNPSRDPPPQSLTSPRPSLESNQRIRVKSMTEEKESFEGQWAPSDVTEENLKE

SEQ ID NO: 176491 - protein, 48 aa, Oryza sativa
  Clone ID: PAT_MRT4530_74233C.1.pep
YTHYPVHDIIHEVVTNVVNNKEVGYSGWSTQGTSLVHKLNSYVSKEML

SEQ ID NO: 176492 - protein, 158 aa, Oryza sativa
  Clone ID: PAT_MRT4530_74234C.1.pep
MGGAVGGLDGDRGRGELLLLLVLPLPRGLVLQRSRRRLIAAGRDELLPLPLPRVWRRLGAAGRDGLVLAARSRKRTTCHSESGFDKMPPPTIQRIKCHFNRLLSGYFVTLEDFKTKIPLDVDKLEEGGAGKVEIDGTHASRRWAWGVGCDGRTGRGRR

SEQ ID NO: 176493 - protein, 202 aa, Oryza sativa
  Clone ID: PAT_MRT4530_74235C.1.pep
MNKKLPPLNALKAFESAARHLNFTKAADDLFVTQAAVSHQIKLLEDFLGVPLFYRRNRLLELTEIGRQYFEEIQPLFQQIALSTEKIKLKNSRQILSISTTPSFGMHWLVPRLNEFHHKYPDIEVRLVTAAQDEGLLGKDIDVAIYYGSGNWQNLEAVKLVQARIMILASSEYLQRNPMTKPEDLTGKNLIHVCSHTKWKQM

SEQ ID NO: 176494 - protein, 376 aa, Oryza sativa
  Clone ID: PAT_MRT4530_74236C.1.pep
MHVLAQSTAVAKVAASGCLRRSPNPSVTFQRSPSLLLSPAACRRRCRRGCSVSVDVRCSLGAMVTPELNGGDVGVGVGGGSFDFQRYLSARADAVHDALDRAMPRGFPERLCESMRYSVLAGGKRVRPVLALAACELVGGDAAAATPVACAVEMIHTMSLIHDDMPCMDDDALRRGRPSNHVAFGEFTALLAGDALHALAFEHVARGCGDHGVPADRTLRAVAELGSASGTGGVAAGQVADKESEGLPVSLAMLEYIHVHKTARLLEAAAVSGAIVGGGADAEVERVRRYARCVGLLFQVVDDVLDMTSTSEQLGKTAGKDVEADKATYPKLLGVDKAREYAADLLAMAEAELDGFDAERAAPLRHLARFIAYRQH

SEQ ID NO: 176495 - protein, 72 aa, Oryza sativa
  Clone ID: PAT_MRT4530_74237C.1.pep
FYFGYPIKKLFRCIHGVINFDPFKRAPANQNFFIFFLFILSSLFIFFMFLLFFFFFYHFFIFLVVFFFPTRP

SEQ ID NO: 176496 - protein, 66 aa, Oryza sativa
  Clone ID: PAT_MRT4530_74238C.1.pep
QFAHLSQVYIRNHQPFGSASLALAITLGLLFLVTVNGCGDQTCSTCHTLVDPSNFFWCPTREWVFR

SEQ ID NO: 176497 - protein, 100 aa, Oryza sativa
  unsure (1)..(100): unsure at all Xaa locations
  Clone ID: PAT_MRT4530_74239C.1.pep
AEGCGGAAAARRRGGPPLAVAAKERXLGDEEYDRRQGGPPLAAEERRLGDEEDDRRRRRRHGSPHGRHGRFLRTSRSPXAPPSASQLRRRSTSVGSRRPT

SEQ ID NO: 176498 - protein, 101 aa, Oryza sativa
  Clone ID: PAT_MRT4530_7423C.1.pep
MGGLLVWSSEGKKFAHSRFPARRRSYPNHAVSILVLVGVVFILVLVNTVSILLARHLPRCIAQSVSMDILCLGGGDCYHREEAPGAPYGLGGGEVGKASTR

SEQ ID NO: 176499 - protein, 54 aa, Oryza sativa
  Clone ID: PAT_MRT4530_74240C.1.pep
ILYIYICMYVCMYVCMYVCMYVCMYVCMYAPYMDTPYVLICKIHNILRLKKKKK

SEQ ID NO: 176500 - protein, 164 aa, Oryza sativa
  unsure (1)..(164): unsure at all Xaa locations
  Clone ID: PAT_MRT4530_74241C.1.pep
NTLWSYHNGGSWPTLLXQLTVASIKMSRPEIAAKAVEVAERRIAIDQWPEDYDTKRARFIGKQCRLGQTWCIAGYLVAKQLLDKXDVARTLSNDEYSETFNALSSTRKRGKKVLKKTFIVGVLKAKDPSLGSISQHLSYSKNLRVYIHERICIVRIDPSCWMLL

SEQ ID NO: 176501 - protein, 70 aa, Oryza sativa
  Clone ID: PAT_MRT4530_74242C.1.pep
LMRRRQKPGRSICSSSGLLVLPSLSSTASARGDSGPIEVRGRGSDRRSASANRARRSISFLSTRPPSAPG

SEQ ID NO: 176502 - protein, 363 aa, Oryza sativa
  Clone ID: PAT_MRT4530_74243C.1.pep
MEEEVEAANRAAVESCHRVLALLSQQQDPALLRSIASETGEACAKFRKVVSLLGNGGGGGGGGGGGGHARGRMAGRSRPSAVLREKGFLESSSGGGQLGMMMSGAATPSTSSAAHLRNRIGGGSGVPPDSLRGLDLVSSSSKGGAHQFDPPKLVQPLSVQFQFGATAHRYPFQQHQHQQKLQAEMFKRSNSGISLKFDSPSATGTMSSAFMSSLSMDGSVASLEGKPPFHLISGPVASDPVNAHHVPKRRCTGRGEDGSGKCATTGRCHCSKRRKLRIKRSIKVPAISNKIADIPPDEYSWRKYGQKPIKGSPHPRGYYKCSSVRGCPARKHVERCVDDPAMLIVTYEGEHNHTRLPTQSAQT

SEQ ID NO: 176503 - protein, 363 aa, Oryza sativa
  Clone ID: PAT_MRT4530_74244C.1.pep
MASEPVARAVAEEVGRWGSMKQTGVSLRYMMEFGSRPTERNLLLSAQFLQKELPIRIARRALELESLPFGLSRKPAILKVRDWYLDSFRDIRYFPEVRNRNDELAFTQMIKMIKVRHNNVVPTMALGVQQLKNEQYRTRKIPTAFDEIHEFLDRFYMSRIGIRMLIGQHVALHDPDPEPGVIGLINTELSPIQVAQAASEDARSICLREYGSAPEIDIYGDPTFTFPYVSSHLHLMLFELVKNSLRAVQERYMNSDKDVPPVRIIVADGAEDVTIKVSDEGGGIPRSGLPRIFTYLYSTAKNPPDMDCPSEGVTMAGYGYGLPISRLYARYFGGDLQIISMEGYGTDAYLHLSRLGDSEEPLP

SEQ ID NO: 176504 - protein, 110 aa, Oryza sativa
  Clone ID: PAT_MRT4530_74245C.1.pep
EVAARFRSLVDTGDIGAIRQTQHLILGRLQDSNAVLTHFNEYSEQCFAEVSNDFASKTRLLKSMKDDLDHIFLKLRSMKSRLAATYPDAFPDGAMAKTMDQRPDLESPLD

SEQ ID NO: 176505 - protein, 366 aa, Oryza sativa
  unsure (1)..(366): unsure at all Xaa locations
  Clone ID: PAT_MRT4530_74246C.1.pep
MASEPVARAVAEEVGRWGSMKQTGVSLRYMMEFGSRPTERNLLLSAQFLQKELPIRIARRALELESLPFGLSRKPAILKVILGEWSVNKVRDWYLDSFRDIRYFPEVRNRNDELAFTQMIKMIKVRHNNVVPTMALGVQQLKNEQYRTRKIPTAFDEIHEFLDRFYMSRIGIRMLIGQHVALHDPDPEPGVIGLINTELSPIQVAQAASEDARSICLREYGSAPEIDIYGDPTFTFPYVSSHLHLMLFELVKNSLRAVQERYMNSDKDVPPVRIIVADGAEDVTXIKVSDEGGGIPRSGLPRIFTYLYSTCKNPPDMDCPNEGVTMAGYGXGLSISRLYARYFGGDLQIISMEGYGIPTLHFLSDF

SEQ ID NO: 176506 - protein, 267 aa, Oryza sativa
  Clone ID: PAT_MRT4530_74247C.1.pep
MARAPRDRTLSSRRASSATSAVPSYYQKTKKASKENGLQLTSEKKDWKRATCSICLEHPHKAVLLLCSSHSKGCRPYMCDTNRQHSNCLEQFKNAYSRGKPACELSGAVAQASKKPQEMELVCPICRGDVKGWTVVEPARRFLNRKRRTCMHEGCSFGGSYRKLRNHVRSNHPSSNPREIDSASLAEWKELEYEKDRQDAISIITALNPGSTIMGDYFIDPNSDSNDSFDYSSDSLTFSDSDPGTQLNGSTSSRRPARIIPNARVRY

SEQ ID NO: 176507 - protein, 975 aa, Oryza sativa
  Clone ID: PAT_MRT4530_74248C.1.pep
MDEDGNVGIGGKYTDGLISHSLRVSKQRSCVHKYAAGANVSLQCRSSKQEHMSTTEVRFEDWMAEAVVFGILCKIGSILSSHLTQAFVAHLGKEVSVFIEIESSIKQIRSEFRLMQAFLQDGQEKESHSRLAETFLHEVQQVSFEVEDILDEFVYLFGQKQTASLKSLRNFFPKSKSMMHWQRLAAELKEAQNRLQNLRNLKVQYNIDLSEESPSSIRYEDSQVHTIQHIKHNNKIVGFANERDCLQELLMTNEKSCSIISIWGMGGSGKTTLVKTVFERKAIKNRFDCLIWVTVSQTYDITEIMRKIIQCALKETCPADLESMCSEGVALKLQGTLQGRTYMMILDDVWDTNVWFNLEPFLDLNSRGSKVVITTRINDVASLADDKNRLQLRGLNEAESWDLFCMWAFRHTEDQTCPLRLERVARQIVGRCEGLPLAITAVGNLLSFKRLDSFEWDKFYNQLNWELHNRLDNQGLNMVTRLLGLSYRHLPAHLKNCFLLSSIFPEDYMIHGKWLSRLLIAEGLVEPRKNMTLEEIATEYIEKLVDRCLLQVVRRDKLGRIWQLQMHDIVRELAISISEKEGFCMIYTSKEAHTSVVGCEPRRLSVHENYDRVQQIINAQRIRSFYPYQLDSDYSVMSNVQWVSTSARYLKGGFFPKQLPESIDRLQNLRTLDIYLTEIGKLPSGVTRLRLLRHLIAGKAEATYFGLADVYSGVQMPNGTWQSLDINVFTGISASNKLVEQLAKLTQLRSLKLSDVKSTHYAKLFVSISKMRLLQSLLIETANRDECVSLEALNPAPHHLELLFMKGKLHESVIGCHLFEVNRLSLRELNLQNSRLSIDPLPSLSNFCNLTLLGLFNTYSGESLLFQAGWFPKLQTLTLAELQNVNSIVIQEYSMANLYNLALICLKNLEYLPQGMEFLKSVEEFNLVGMHHKFMEDVQAGSSYEKVKHIPVVDYFDQSKGRWDRLSRVYGKGNP

SEQ ID NO: 176508 - protein, 1172 aa, Oryza sativa
  Clone ID: PAT_MRT4530_74249C.1.pep
MASPQQQLDHSALPPAIKSAAALRDARSARAIHAAALRRGLLHRPSPAVANALLTAYARCGRLAAALEVFGSISDSAHDAVSFNSLISALCLFRRWDHALAALRAMLAGGHPLTSFTLVSVLRAVSHLPAAAAAVRLGREAHAFALKNGLLHGHQRFAFNALLSMYARLGLVADAQRLFAGATPGRGDVVTWNTMVSVLVQSGMFDEAVQTLYDMVALGVRPDGVTFASALPACSRLELLDVGREMHAYVIKDDELAANSFVASALVDMYATHEQVGKARQVFDMVPDSGKQLGMWNAMICGYAQAGMDEEALRLFARMEAEAGFVPCETTMASVLPACARSEAFAGKEAVHGYVVKRGMAGNRFVQNALMDMYARLGKTDVARRIFAMVDLPDVVSWNTLITGCVVQGHVADAFQLAREMQQLEEGGVVPNAITLMTLLPGCAILAAPARGKEIHGYAVRHALDTDVAVGSALVDMYAKCGCLALSRAVFDRLPRRNTITWNVLIMAYGMHGLGGEATVLFDRMTASGEARPNEVTFMAALAACSHSGMVDRGLQLFHAMERDHGVEPTPDILACVVDILGRAGRLDEAYAMVTSMKTVMETSRMRRRGVAKEPGCSWIEVDGAIHRFMAGESAHPASEEVHAHMEALWGEMVARGYTPDTSCVLHDMDDGDKAAVLRCHSEKLAIAFGLLRAAPGATIRVAKNLRVCNDCHEAAKFLSKMVGREIVLRDRLAAELKEAQNRLQNLRNLKVQYNIDLSEESPSSISIFPEDYMIHGKWLSRLLIAEGLVEPRKNMTLEEIATEYIEKLVDRCLLQVVRRDKLGRIWQLQMHDIVRELAISISEKEGFCMIYTSKEAHTSVVGCEPRRLSVHENYDRVQQIINAQRIRSFYPYQLDSDYSVMSNVQWVSTSARYLKVLELSNIPITTLPRDIGSLFNLHYLGLRRTKVKQLPESIDRLQNLRTLDIYLTEIGKLPSGVTRLRLLRHLIAGKAEATYFGLADVYSGVQMPNGTWQSLDINVFTGISASNKLVEQLAKLTQLRSLKLSDVKSTHYAKLFVSISKMRLLQSLLIETANRDECVSLEALNPAPHHLELLFMKGKLHESVIGCHLFEEYSMANLYNLALICLKNLEYLPQGMEFLKSVEEFNLVGMHHKFMEDVQAGSSYEKVKHIP

SEQ ID NO: 176509 - protein, 66 aa, Oryza sativa
  unsure (1)..(66): unsure at all Xaa locations
  Clone ID: PAT_MRT4530_7424C.1.pep
CLAXXSIDLSCRCRRGSSAHGALSCLGDPDSAAATATTSLSRTDLFSKRSYWSEEKWTPGLRWRWT

SEQ ID NO: 176510 - protein, 78 aa, Oryza sativa
  Clone ID: PAT_MRT4530_74250C.1.pep
AIQLAKTLPPLAKFGHSIWLANGGSHTAKLLHGSIPTGATRRGTGGGRTRGRARRPPVFSRRRTKPIAGAGHRAAPLD

SEQ ID NO: 176511 - protein, 276 aa, Oryza sativa
  Clone ID: PAT_MRT4530_74251C.1.pep
MAASHGNAIFVLLLCTLFLPSLACDSGGVKFGYTGSIGPDFWGNLSADFTRCSNGKQQSPIDIDTNNLVHELNMEPLHRNYTAANATLVDNIFNVALRYEEAAGVLSINGVKYTLKQMHWHSPSEHTINGFRFPLELHMVHTNENGNITVLAFLYRFGRPDPFFEQDKLAALNAEGCKAEKGSPVPAGSVSLLTMRQHVHIYYRYVGSLTTPPCAENVIWNIPAMPREMTPQQAADLMAPLDEGYRRNSRPTQQMNGRTVQLYHRFWGKKKRRSSP

SEQ ID NO: 176512 - protein, 380 aa, Oryza sativa
  Clone ID: PAT_MRT4530_74252C.1.pep
MADEFKIVLTRKERFLYLAKAVVFLVIFALGVVAGLWTATGPRRCCSTYTNILFPSTTVYRYRGGGGGSFSEFVAPTRLMHDMTDEQLFWRATMAPASSGGAYPFQRVPKVAFMFLAGRGVLPLAPLWERFFRGHEGLFSIYVHAPPGMVLNVSDDSPFYGRQIPSQETSWGSITLMDAEKRLLANALLDFSNDRFVLLSESCIPVQSFPVAYGYLTGSRHSFVEVYYHKGKTCRGRYSRRMEPDITLPQWRKGSQWFELRRDLAVAALTDARYYPLFRRHCRPSCYPDEHYLPTFVAMLHGADNSNRTVTYVDWSRGGAHPATYTAGDVTPELILSIRRSEVPCMYNSRPTTACFLFARKFSADALEPLLNISSTVMQY

SEQ ID NO: 176513 - protein, 162 aa, Oryza sativa
  Clone ID: PAT_MRT4530_74253C.1.pep
MATTAPTPPSAAGLAARPPLASGSLLPSMSPSSSRSLPATTSLPPRSRSTAVTWIWTRVGDFFTTPLSTAVKNASSSLFFFSFFTDDDERERGRRTRTHAGACVRRDPGDGGGVNRGRLRHVKPNLPLATVVVASPFPNEVDGSGKLGEQRHCGGRGAASAQ

SEQ ID NO: 176514 - protein, 111 aa, Oryza sativa
  Clone ID: PAT_MRT4530_74254C.1.pep
HIAVLSLSPPPLHKPSAPPPKSPSPPQQTVTPLPTSPPSLQPSVPLPRKSPPIMDEQGDIKIKSSKCWNLIRPPTTLLTSNGHRICIRPLFSARKYLMESSWSPLSNGSSL

SEQ ID NO: 176515 - protein, 58 aa, Oryza sativa
  Clone ID: PAT_MRT4530_74255C.1.pep
LSYELVVWEMVRAGMFGAGENVLSARVRLLKKRVSLPVLTACGFCGLKWVLWGMFGMG

SEQ ID NO: 176516 - protein, 54 aa, Oryza sativa
  unsure (1)..(54): unsure at all Xaa locations
  Clone ID: PAT_MRT4530_74256C.1.pep
LLHYDVALIKKFSSTQAKFLLVHSLTPACKALHCLIFLSTXSXLEVDLXIAWAR

SEQ ID NO: 176517 - protein, 115 aa, Oryza sativa
  Clone ID: PAT_MRT4530_74257C.1.pep
MSKKIVVKLDLHDNKDKQKAMKGVSTLSGIDAISMDMASRKMTVIGTVDPVNVVSKLRKASWPAYIESLGPAKEPEKKKEGGGDAKKDGGDGKKEGGGDGKKEGGDGKKEGDGKK

SEQ ID NO: 176518 - protein, 58 aa, Oryza sativa
  Clone ID: PAT_MRT4530_74259C.1.pep
MGNGRWQQSAGMARRAAPRRALEEAGYVIIVMGRGANEFDDHDAATKMAVVYVVTVPA

SEQ ID NO: 176519 - protein, 58 aa, Oryza sativa
  Clone ID: PAT_MRT4530_7425C.1.pep
MLPDRTTLIYELEKKAQDSRCGVEERGEVMPTELAGARLEAPHLDPYSLHASSPTGST

SEQ ID NO: 176520 - protein, 65 aa, Oryza sativa
  Clone ID: PAT_MRT4530_74260C.1.pep
LSYSYSYFMVALIKIKTSHDRILTRPSAAAAAAGLRGGGIFFLVAQPLLRLRRRHGFAFLVLIIH

SEQ ID NO: 176521 - protein, 57 aa, Oryza sativa
  Clone ID: PAT_MRT4530_74261C.1.pep
CGNFQFMSHNQCMFLFYAPGVFDTHGRFLSPVYNFEPRVTILLFNGKLSPKTGRNLG

SEQ ID NO: 176522 - protein, 50 aa, Oryza sativa
  Clone ID: PAT_MRT4530_74262C.1.pep
FSLYCSCALSIGVVESVRPCTDVSLSLLSFTPWLAYSQSWAHAHSQQKKP

SEQ ID NO: 176523 - protein, 136 aa, Oryza sativa
  Clone ID: PAT_MRT4530_74263C.1.pep
MDRAREGPEASGCNRAGIVEGEGGSQQVTAVATDDTTNAGGEGSIEAHGERAMAATEPRRGRKAMLGAAPLPSTMPSPSLLARQSRQPPFPNRARRRHRYVPMWGKEKRTKEHKRMRGEERAGDTNMWASHADSIN

SEQ ID NO: 176524 - protein, 190 aa, Oryza sativa
  unsure (1)..(190): unsure at all Xaa locations
  Clone ID: PAT_MRT4530_74264C.1.pep
MGDRPGDSSQVHTSEDNVLVGAEVTATVAGPDAGASWSGGGDGCGPEWWRPAGAEAADGGGGRLELTRVEGRRRRRRHWTTRSHLLAAAMRMDAGRWWTATRSSDPGIGSGGGGGGEGXPSLRHGPQPLLSAHGLSNGPPQPATSVLCERRRRRRRREELLRADGAAGPEQRAAHDGEGSPSPASRPPSL

SEQ ID NO: 176525 - protein, 96 aa, Oryza sativa
  unsure (1)..(96): unsure at all Xaa locations
  Clone ID: PAT_MRT4530_74265C.1.pep
IPAHTTPAIGETLAAKTSAWXESRGLSFTYDGQPMLATLDEYVMLXQERDEDPIRVWAQQRYIEQQLNTDHEGPYXSRVSPNRPACAEKVPGAKSN

SEQ ID NO: 176526 - protein, 128 aa, Oryza sativa
  Clone ID: PAT_MRT4530_74266C.1.pep
PGTGPQSVGAREDAGSIAPRCARRAGHGRRTWGSTAPPVAPPAARWPSRHCTTPPREAAAHPTARASAGARVSCRVPPRHLRHPRPFLAPRGIERSAARSRRAGGGGGRRQAVEWPWEWHGGGGDGSG

SEQ ID NO: 176527 - protein, 98 aa, Oryza sativa
  unsure (1)..(98): unsure at all Xaa locations
  Clone ID: PAT_MRT4530_74267C.1.pep
FPRPNPIMPGVLMVEAMAQVGGLVMLQPEIXGSRDNFFXAGIDKVRFRKPVIAGDTLIMRMTLTKYQKRFGLAKMEGKAYVGGDLVCEGEFLLVSATE

SEQ ID NO: 176528 - protein, 56 aa, Oryza sativa
  Clone ID: PAT_MRT4530_74268C.1.pep
HYWRLGGGGKIKKSYMSWGKKGKNFFPLEGLFFQLHKGGKQLKKSHELGFLKAFPW

SEQ ID NO: 176529 - protein, 198 aa, Oryza sativa
  Clone ID: PAT_MRT4530_74269C.1.pep
ANPPPSVPHAPVPRSLPLTSSSSSSAAAAASAMGRGKFKGKPTGRRNFSTPEEIAAGTSGRPRTFKKNLAEEEKEEEEDDIEESEEEESEDESEGKAKHKGTEGLIQIENPNLVKAKNIKAKEVDLGKTTELSRREREEIEKQKAHERYMKLQEQGKTEQARKDLERLALIRQQRADAAKKREEEKAAKEQRKAEARK

SEQ ID NO: 176530 - protein, 83 aa, Oryza sativa
  Clone ID: PAT_MRT4530_7426C.1.pep
NRPPFFFFFNNNSSPYLTLRGYLHCGTIIFIVLFTKSPFSNHYSVWLHLNLLLFIMLRFFPICTLCLNLLKHIFLLLLPYISI

SEQ ID NO: 176531 - protein, 394 aa, Oryza sativa
  Clone ID: PAT_MRT4530_74270C.1.pep
MAVTVFETAEQRLPCHAAAAELGADGGKKVAVDDDASGGGPGQAVLLLQETDHGGDDDDRPERDDVWNMIQSQRPPVAAGKQQQAAAPYVHPLVRRSSSLLSQKSLEICTESLGSETGSDGFSDADGSTDRSCPASDDDSDGGAEEVAARASPPRAFPPPLPSLARRTVGAVQMTQDRRDGRLVVKAVPVPSATLFRAQRCGGRLLLSFADTAAPSSDEDDENNDQEEPEQQADEVAHDEEEEEDDEDDEEEVEVVDRGTIVEVKVSTQPQARSNGGGSVGPRVHRSSLVINKFVNAEPAIAASDISDTAATAPNPPRRPTGSTTTAAAALVAASSLSATSAPSGSDNPGGESKLLMTTCRRRRSKEELMNHMRRCGQLSGKLFIWEPRIATSS

SEQ ID NO: 176532 - protein, 149 aa, Oryza sativa
  unsure (1)..(149): unsure at all Xaa locations
  Clone ID: PAT_MRT4530_74271C.1.pep
GTTVAPSQGLKSTVGMPVDRRSRNSSLLNVSKGVRIRCMQVXEAIDDIKILETLSYLTPITVEDLLKQIEYLLHSKRVPCLECNKAGFVYRENHRSPGYYDGRYXTMWKLPMFGCTDATPALKELEEAKNAYPDAFSAIIGYYNVRHVH

SEQ ID NO: 176533 - protein, 79 aa, Oryza sativa
  Clone ID: PAT_MRT4530_74272C.1.pep
RKIVGAAALGMLPRALLSPVAALLQSRQAGETLPLAPTKPPRDSKRPVVASAQTNFASDSSSAATGSYGHREPRERRCV

SEQ ID NO: 176534 - protein, 123 aa, Oryza sativa
  unsure (1)..(123): unsure at all Xaa locations
  Clone ID: PAT_MRT4530_74273C.1.pep
MLFWTDRWIGGXPLNIQFPNLYNIILTKHVTIAKVKIKGLEHIKFRRTLHGDKLRDWDRIKISWDSLNLQDGCEDKIWWNLTKDGVFSVKSFYRALKMQQKLEANRRRLQLAAMLIRQVASEI

SEQ ID NO: 176535 - protein, 132 aa, Oryza sativa
  Clone ID: PAT_MRT4530_74274C.1.pep
MQPHVGCQVPPERKKTKVEVKRIAMRRIRQRREAEEGSGDGGGGVCGRSEGRQRREADPRQRPAVKGKSGCGEKRRGGSGGGSPAAGASRAVGGSGGGYLHPYVLGFELGLHQRRVVRPRARPRRSSARSLS

SEQ ID NO: 176536 - protein, 70 aa, Oryza sativa
  Clone ID: PAT_MRT4530_74275C.1.pep
SSSQRPPLIFCRPWIIRVSHGFDVVFFMRITLTHSLDILAPFFVEINIHSEFRKERKKERKNWGERGKEE

SEQ ID NO: 176537 - protein, 1357 aa, Oryza sativa
  Clone ID: PAT_MRT4530_74276C.1.pep
MDASSELQCVGRLEVAAPPPARYLRGEANGKAVVLLTGAPRYQMLPLETDLNTLPMIPNIPEKVFPMDAKSTEGSRYGSGLANQNLSRKCEALAVSGLAEYGDEIDVVAPTDILKQIFKIPYSKAQVSIAVNRIGDTLILNTGPDVDEGEKIFRRQSNHPKGSDPSMFLNFAMHSVRAEACDCPPSHQPSKEKQTASAILRGPFGQREGPLDSPSSSSFSTSPYLDQNISKSRKTSHGARESLYWGARENKQKVKGSDPVKKTTHVGDKPRCDVQESEKSRRVGNNGFRKVCFWQFHNFHMLLGSDLLIFSNEKYMAVSLHLWDVSRQVTPLNWLEAWLDNIMASVPELAICYHQNGVVQGYELLKNDDIFLLKGVSDDGTPAFHPQVVQQNGLAVLRFLQDNCKQDPGAYWLYKGAEEDVIQLYDLSILPQNHTAGDHRSTCGPMSSLMKKGRKESLFSLGTLLYRVAHRMSLSKVPSNRAKCAKFFKKCLDFLSEQDHLVVRAYAHEQFARLILRCYEELELTSESFLLESEVTLTDLDESPDLSLENLPSKQNEVLTEISEEPATLDGMLECSRSGSSQASNSLVDPGHVDISPVSSATKGDVTVDSLVMCQSGTQVSRTIADAISSKLAAIHHVSQAIKSLRWNRQLQNTQDDCVGNADTIWEKPVDFSLCRCGDIDCIEVCDIREWLPKSKMDHKLWKLVLLLGESYLALGEAYKNDGQLRRTLKVVELACLVYGSMPKNLEGEQFISSMSNSSLSVEDGDLKANLVLDEADYFKNAKCFNYDVSAGQLPPNYLFWVKAWMLVGDVYAEYHRLRGQQAPVLPEQKPDGEVRMSNEVAMEVKRLKRKLGKDKQNCGTCSLINCSCQSDRANSGSSASSSSSEASTLYGRKKNKKSSGRNFHSQSRETKENPSTQDSMGDSEKRNNDGDPDKSKEDVSSVRVGGIFKFLGGPEPGDVEYNLHSAIHCYDAAKGVIFAFPVPLAEKSTILKKRGWAFNELGCHRLESRNLGNAEIAFADAIKAFQEVADHTNVILINCNLGHGRRALAEQFVSRIDEFQKYDFPQDAYMQSFKSAKSEYFQAINYYTAAKRQLTYADNEVDKVLYNEVYTQYAHTHLRLGMLLARESFLTDSYEGGFVDESSNRTVLEISASDAFREALSTYESLGEHRKQEAAFGHFQLACYQRDLCLRFLDLIDKEVKQKNEDKYRQKAKWYGSLAEKNWQRALEFYGPKTHSTMFLNILMAQSALSVNLSDSFHSSVMLENALVHLLDGRHVVEANDEYSNDLDLDIKPKFWSQLQRLLKSMLAAARPAASVGQANASNSRGDTAKLKEMYRLSLKSTSLGQLHALHKIWVS

SEQ ID NO: 176538 - protein, 93 aa, Oryza sativa
  Clone ID: PAT_MRT4530_74277C.1.pep
PRGSAPVPKKKWSPPPRRCLNKPPGSPRGGSSPSFLPPRPSSGPGASSPPPKNQGFLASPRPGPPEFHRPPPESLPRFGPCPGFWGRIFGAPG

SEQ ID NO: 176539 - protein, 1274 aa, Oryza sativa
  unsure (1)..(1274): unsure at all Xaa locations
  Clone ID: PAT_MRT4530_74278C.1.pep
MEAEPPPENRHDDHHPSTSGGGLGYFHLRLLCPAAPLLLLLRSDRLYSLSLSRRRGPRLRLLASPRRRHGRRRRALLLSTSGCALRLTHRSSSADAVRVNGRPLLRGGCPADLAVGDEVSLLRRGTRYGFLVEKFVSCERPKLAAAEPCGEVLVLRAESLRKRLRAISESHDPLSFLRDSHCVENGSDDVRVKKAREEDVFLPLNLNAPIDPVAVEGLLREDCNLGQGKLEHCTDSAIAKNETDELIQRSKGSCDGNTEQKEYSNENTEQQHNENEGCYSDGSTFFLNRLIGIGSDMRVEQRSGVTLPQLLHPMDSLERVFIATFTSDVSWFLDYCKVPQNLPVTIACHNKERCWSASRESRTAAAFXSKSVTWESLLPKMEDSSMRILIKRYPCSVLHSCSLRSYIQWLKLNSNLCTVYECXLVPSKQRGRMGFDGNGQCASFLTTLFSKVEESKSDFATQLVSFIAFLINEVPSQSYWINEIAKYNFEGAAGYLIASVPGIYARNPHYLESNYCLSRKQILHTKSAHRMFLGSVQTSVVGLSHRFHIPSDAGSKLKALSVLLSKCHVNMHGTTEVILKRNTNIPADANAVSVLVADLDKFTEEANNHVQCPEIDSVHLGFLPREVAKWVSPLSDLGFFTFSGFIYPREALEAAYGATNTKVQLLLYVSKGPEFSQISRLIQDEHFPLLCSLVASLKRSLGLWRLEEVLSHFKWPETLETDFFYRIPYFRFKIFVGASSIGTSINPQFIASFASAAGKRCNQDLDSEESDPERTWQRLRSTGIFRDAIPHPYERIGHPMHVKVAQRRFESRLGRHSFGWTYCGSHNFSPAAWGQQLPPPKANPTEARAVSSGPRLHICNYELGIILIIPPSAMSKQISGRRHEINDIVLPFVVPPPQYKLGDRPATSLAMREAMAEARILQSNDLVLDLSQDTDEDIPDEDDEHVIELSDCSPEEKEEEKIYAETLWEQSASARGYMFYTTEESQPSKQFWTVVPFYSLPQHSEAFLDVLQIVVLGGSGFVGSAICKAAVSKGIEVVSLSRSGRPSYSDPWVDQVTWLAGDVFYARWDEVLVGATAVVSTLGGFGNEEQMKRINGEANVTAVDAAKEFGIPKFILISVHDYNLPSFLLNSGYFTGKRKAESEVLSKYPTSGVVLRPGFIYGKRKVDGFEIPLDVVGQPLEKLLSSVENFTKPLSSLPASDLLLAPPVSVDDVAYAVINGVIDDSFFGVFTIEQIKEAAAKCMNVVLVPSKQRGRMGFDGKGQCASFLTRCIAK

SEQ ID NO: 176540 - protein, 99 aa, Oryza sativa
  Clone ID: PAT_MRT4530_74279C.1.pep
MRTGQALGVGVAAECVSVGNGDRGGGRRMELLAVAVEAEKVYGLKGISLAFGREEDEVPEKKPRVLAQSNAANLNNKGGEDQRQQEHHPRYDGSVDARR

SEQ ID NO: 176541 - protein, 72 aa, Oryza sativa
  unsure (1)..(72): unsure at all Xaa locations
  Clone ID: PAT_MRT4530_7427C.1.pep
LVKPELLQSQLDALDVSIMSCGFIDPRKVNVAMLDQYPQETEDNLVHLLKAQHYKTFIIXRFHWVLLLFDLE

SEQ ID NO: 176542 - protein, 325 aa, Oryza sativa
  Clone ID: PAT_MRT4530_74280C.1.pep
SSVNCIFHWFKQVSSHFKWPETLETDFFYSALSIGTSINPQFIASFAAAVGKRCNQDLDSEESDPEWGCWTANHELKKPSMNLLFTTIDRVKNGACGMQLSRHSLSLPERTWQRLRSTGIFRDAIPHPYERIGHPMHVKVAQRRFESRLGRHSFGWTYCGSHNFSPAAWGQQLPPPKANPTEARAVSSGPRLHICNYELGIILIIPPSAMSKQISGRRHEINDIVLPFVVPPPQYKLGDRPATSLAMREAMAEARILQSNDLVLDLSQDTDEDIPDEDDEHVIELSDCSPEEKEEEKIYAETLWEQVDSSQRPGWPVKLKSRCFG

SEQ ID NO: 176543 - protein, 93 aa, Oryza sativa
  Clone ID: PAT_MRT4530_74281C.1.pep
MATRGDGTARRSIGTASTMARAGLEAVMATAVTRWRGSGAGLKGDGVAMERGAATGRCTARQWSRRDGDGDGTRRGCYIYLTRMDSKLDDSLS

SEQ ID NO: 176544 - protein, 105 aa, Oryza sativa
  Clone ID: PAT_MRT4530_74282C.1.pep
AESEVLSKYPTSGVVLRPGFIYGKRKVDGFEIPLDVVGQPLEKLLSSVENFTKPLSSLPASDLLLAPPVSVDDVAYAVINGVIDDSFFGVFTIEQIKEAAAKVRV

SEQ ID NO: 176545 - protein, 130 aa, Oryza sativa
  unsure (1)..(130): unsure at all Xaa locations
  Clone ID: PAT_MRT4530_74283C.1.pep
KIIGTFAGKRANGGIIFFLAAAAVAGTSPVAAGSSGLENSNRTRSVRDKAASGLKXTGMAALGGTGKAFRLPRLAVRNGKRTRNPAEGHRRFRIFSKSLKLGRSTNRRGLPYRLGINGFGDMTWKEFQAS

SEQ ID NO: 176546 - protein, 41 aa, Oryza sativa
  Clone ID: PAT_MRT4530_74284C.1.pep
TIKHYAHQPKIPHNNPKPYVRTKARKLKKAKGTRNSKGFKV

SEQ ID NO: 176547 - protein, 242 aa, Oryza sativa
  unsure (1)..(242): unsure at all Xaa locations
  Clone ID: PAT_MRT4530_74285C.1.pep
RCVRRKYRIRRHSPFRLRNCWEGRRYFIVIDDMRKDLWSTIESAFPKDGFSSRIVVTTTVQSVAKACSSANGYVYKIRRLDKIHSKKLFLKNACRXEYQDYIQPDSVRILKKCDGQALALLTVGQFLRKMGWPREPKCEDACNQLCNHLEDDDTLERMRQVLIHEYSTLSCHALKACLLYFGMFPSGHSIRRKRLLRRWSAEGFVEALPSGSFPDPAVENFNKLMDRNIIQPIDLSSNEEVK

SEQ ID NO: 176548 - protein, 125 aa, Oryza sativa
  Clone ID: PAT_MRT4530_74286C.1.pep
MAPPGGGGPGAPEAGKVSFKFFLPSAPKLPFKVFRVPKGAPFPPVLKFPPEEFKVPPQTSPFFPTDGVGPPPHQSAGNVFLKHGPELPPLPPDKVGALAAPLLDSIVIIENLPPIKSMLGACLLV

SEQ ID NO: 176549 - protein, 90 aa, Oryza sativa
  Clone ID: PAT_MRT4530_74287C.1.pep
MDTGQPRNYCGNDDSSRATGRQEHRCTQAQAQARSSPAAAGGCHGWTGELRSACRCRTLASRGDDALDPAMQCVAWTEKNKYSYRLQLYE

SEQ ID NO: 176550 - protein, 95 aa, Oryza sativa
  unsure (1)..(95): unsure at all Xaa locations
  Clone ID: PAT_MRT4530_74288C.1.pep
MAASFKKPISKPKYRRRNALMGSPVSSMPSRSPNCDTVNRDYCFVGTGQIXVRRSNRRNTGGQTDGITAVRPAGTHRSDRRQRQEAEAISGGWTG

SEQ ID NO: 176551 - protein, 37 aa, Oryza sativa
  Clone ID: PAT_MRT4530_74289C.1.pep
MAPTGFEIASTTTFPATTQISFGAFDFLVDSAGKLRQ

SEQ ID NO: 176552 - protein, 74 aa, Oryza sativa
  unsure (1)..(74): unsure at all Xaa locations
  Clone ID: PAT_MRT4530_7428C.1.pep
LLGXLPQXECQKLXLVFNRRCLVQVAPPPLRRPRHERPHRLPHGGSTHACTHQLLPPFHIKLAILILIKFHEKT

SEQ ID NO: 176553 - protein, 37 aa, Oryza sativa
  Clone ID: PAT_MRT4530_74290C.1.pep
LSLLISCRQHTSHLHSSLCNATPHAQPSKTQKSERFQ

SEQ ID NO: 176554 - protein, 270 aa, Oryza sativa
  Clone ID: PAT_MRT4530_74291C.1.pep
MLLVRSHHLLLHRHHHAARLSPRLHRLLLRHPPPLPRAASAASRLRPPRMSSASSSNASSPAPSPAPPVVPKSKIRFCPSCGSPTKLAIPDGDEKMRAVCSSCGRVHYENPKMVVGCLVEHDNKVLLCRRKIEPAYGLWTLPAGYLEVGESAAEGASRETLEEACADVEILSPFAQLDIPLIGQSYIIFRARLKTPNFSPGPESLECALFALDDIPFDSLAFSSIIVTLRMYLEDVKSGNIKFHYCTINKRIGTGASDLRSFDIDNHLAV

SEQ ID NO: 176555 - protein, 106 aa, Oryza sativa
  unsure (1)..(106): unsure at all Xaa locations
  Clone ID: PAT_MRT4530_74292C.1.pep
ESFFLVLQGLVSTHGYXNMYTQGQCKNISRSIQLGASPPSLLRFHFSTGGIWHLTLGCVGSVRSPAKGXVLRSVGPGESIGYISVVXGCIASISWIALDWLIYLPT

SEQ ID NO: 176556 - protein, 58 aa, Oryza sativa
  Clone ID: PAT_MRT4530_74293C.1.pep
VGPCLSVLLAVAYRGRFVASFLQSSAVIAEEGSVTGMCKVGRVVQFGPALQRKGEGGS

SEQ ID NO: 176557 - protein, 258 aa, Oryza sativa
  Clone ID: PAT_MRT4530_74294C.1.pep
SASGSGGPETTFKPERRGSFRLQRSVGLKAGVRQQSSGLKAGGGGPRDSKPAWVSGRWDTKPGHGSRQDSKPVQGATLDGSDETNLFKTSPTEKNFNSGVGEKSKTEYYPLYSASHTGRGGKGGGGKRPPTAAAGEKTAVAGDVGDGASRRRACGERRRAREEYRGSSHRGSAGAGGDYGKRRRVPTHEREPLPTAAVLGDLPALGEIRPLKAGLDGDPPPGVALAAAKLMAPADWLGGGSSGGERRPEEWKRRRQRE

SEQ ID NO: 176558 - protein, 123 aa, Oryza sativa
  unsure (1)..(123): unsure at all Xaa locations
  Clone ID: PAT_MRT4530_74295C.1.pep
SPGCRNSARGAVNHGRNISKKRKFVAEGVFYAELNELLQRELYXXDGYAGVEVRVTPMRTEIIIRATRTQEVLGEKXQRIRALTSVVQKRFNFPDGAVELYAERVANRGLCSQAQAESLKLPS

SEQ ID NO: 176559 - protein, 75 aa, Oryza sativa
  Clone ID: PAT_MRT4530_74296C.1.pep
LSQKRGNFTLRVKPKDAISLSDWLRFCCKRVGVLFCFVPFPAILLWERCVCSSFSSCIEVHFFFPCCSSCNIPSS

SEQ ID NO: 176560 - protein, 478 aa, Oryza sativa
  Clone ID: PAT_MRT4530_74297C.1.pep
MEDSAAAAAVAVVTVPFPTQGHLNQLLHLSMLLASRGLAVHYAAPEPHLREARARVHGWDAAGALRLAAVRFRALDIPGGYASPPPDPSSPFPGHMMPLLEAFCDGARTPLAALLRELSACHRRVVVLHDRMAAFAAVEAARIPNGEALGVHCLAASYNVGWVYPAHRLLVEHGLVFHPPDACTTKEFVALAKRMGQERRRAAVAGMVVNTCRALEGEFLDVLAQIPSSDGDKLFAVGPLSPVLPDTRARGSPEESARPRHECLSWLDKQPPSSVLYISFGTTSTLRGEQIRELAAAVRGSGQRFIWALRDADRADMDTREAEAAVHGARLAEAAGGLREEIARGVGVVVTGWAPQLEILAHGATAAFMSHCGWNSVVESMSHGKPVLAWPMHSDQPWDAELVCKYLGAGVLVRPWEERHDVTPAAAIREAIERAMASGDGAALRARAAAIGEAVRAAVAEGGSLRQDMDDLVAYLTR

SEQ ID NO: 176561 - protein, 25 aa, Oryza sativa
  Clone ID: PAT_MRT4530_74298C.1.pep
DIQVRIFSLKYQAYFLPRVFRIYRK

SEQ ID NO: 176562 - protein, 91 aa, Oryza sativa
  Clone ID: PAT_MRT4530_74299C.1.pep
IVPNLSKQQPTTPQRVKVVKQGEPKNTLSTTESPRAARVNRTYGDSINSHHESQHIPGTHHPPNQSKNLVGPIDSHEARIRGGKHLKNQIK

SEQ ID NO: 176563 - protein, 1433 aa, Oryza sativa
  unsure (1)..(1433): unsure at all Xaa locations
  Clone ID: PAT_MRT4530_7429C.1.pep
MARVPGDLAARPALXFCMVASTGETERLRELFTARSVVAWVEEGERVEASTFADDVRTAFRIRRSDIQVMKFHPEDFFLTLTNHSDREAILQEPRLMLRNGRVYRFRPWDERRGAECVDVRFRVRVYVEGIPMHARTDATAAKIIGKKSSIHYIEEYSRRRNYNRTFDYWVWSSDPSSIPRATRLTITSADEEGLPVDTPFPELEAVHPAPSDTKKVSPILFLFILTLCKTWCPDRHFLVGTCFPCFRXSSVAGNQAPEMVANQSVAADFLNNLSTPMQQPLLKMPKTKKRRPCLNKVTFSPQRHSVHLASKARRNSKLETIAQEILSNNFGLLDVGKPFDDRIKKLYLQQYKKPLSPAAMKTISALVEKGGCKAIRLNGKGKGKVLNCFILNWNVRGLNSQAKQDNVKLLVDQMKATVVCLQETKMEMVSDSVITQFLGQRFVQEFAFLPAIGTRGGILLACNHNFFSISYVILKDHSLTASVTMKSDNTCWSLTVVYGPQAETEKNLFLDELRSLESMVHPAWLLLGDFNLIYLASGKNNDRLNRRMMQRFKGTIDRLGIKELALNGRRFTWAKDGANPTQTKIDRAFCKPDWDILFGSAYMAALSSSSSDHAPLFLVGCEQRELNTSFRFEAYWLKFPEFLEVASESWNRPIRGSNPFAKLNLKLKRLARDLKRWSKFRIGDIRLQHAIANEVIFQLDVAQEERALTDEELLLKSTLKSRVLGLAISQKKNXKKQYQTFPHKKHLAQIAXIGAFFKKAWEVIKSDLLQAINHFSSLNSDRLEDLNSANICLIPKKGEATRVEDFRPISLMHSFAKILAKMLANRLAPKLHELVSPNQSAFIRKRAIHDNFLYVQNMIKNFSRKKKPMLFIKVDISKASDTVNWPYLLEVLQNFGFGQRWRNWISNILGSSSSRILLIGIPGKAEEASLLAKIDPRRSRFRCSLYADDVALFITPSENDLIAVKRILXTFAQISGLHTNPGKTEIYLIACNNLDLGNLLSSFMGNLKTFPCNYLGLPLHTKKLRKIDLQPLLDKVGARIPGWKGRFFTSAGRDVLVKSTLSATPIYHFTCCHRXKWVFKRIDRYRRAFLWKGDDPEKVSAGSSLVNWQQVCKPKDLGGLGILNLEKFARALRLRWLWFNWKEDHKPWANMDLPCDEMDRCLFKAGTKITVGNGIKISFWNDNWMDGQSPKDIAPAIYRLAKRKSNSLKKDLEDNHWLAMLHPITSLVEIEELIQLGGLLQNVNLVAGQTDDISWRWTANGQYSAKSAYLAQFQGSNALTEFTPLWSAFAEPKHRFFGWLILHQRTLTAENLLRRHWPCDWICSLCNSAFEDAAHLAKECPFTVTGWTQICIWMNFQLPQHHLQGNLSDWWISFCTISPRQNRNKVLGALIITWWNVWLERNRRIFQQISKNELQVAFLVKENIALIEQSRI

SEQ ID NO: 176564 - protein, 118 aa, Oryza sativa
  Clone ID: PAT_MRT4530_742C.1.pep
MARPSRGLKQRIRIWKKYTEAESGWPTSSTKSLAARRSETYVLSSRRLEQKELDEEAAAMGQRPRSRRWTRRRGGRLHRSGRGFGGSWRRGYVAATATGSLKGRDELSRRAVETEPEK

SEQ ID NO: 176565 - protein, 107 aa, Oryza sativa
  Clone ID: PAT_MRT4530_74300C.1.pep
MEEEKGERFDLKDHFSTSEGSDATVDGVALGRLGVRIRAPRRARSGSGDDRGDGLARQHGNKGDTHGGQRQPAASPVRAVGWGLRWHPAASTSGGLVDTGHPCGKQS

SEQ ID NO: 176566 - protein, 142 aa, Oryza sativa
  Clone ID: PAT_MRT4530_74301C.1.pep
SSKVNNKLPKIKSTINKMLSQQEDGEGKNSKKDGSSSPGGGGSGRPQLSRSGGAERRRLEPRRRLGRHWRKGGEVVGGGRQVGAVGHGHVDGQPLALPAVSQRGAYVINPARRGEVENGIARRRALAPGPNPGRGGTPPGSP

SEQ ID NO: 176567 - protein, 1121 aa, Oryza sativa
  Clone ID: PAT_MRT4530_74302C.1.pep
MGRGPSKKLAKRPRAAARGDQEEGDGKEVKEEEEDEALLFPVGAEVEVGSDDPGFVGSFYEGTVEAHLPGGDGYVVAYTTLEEGGAALREEARARDVRPQPPPVAGAPGAPGAGGFAMHDMVEAFHNEGWWSGVVTGLPLPLDVLPVDPRRRVYTVAFPTSREVMEFEEAALRPHRVFRRGSWVPAADVDNGGPAFREGSLVEVSRSAESFGQSWNPATILKVIGSTNFLVQYRHVGDDGELVTEIVDTEYIRPARSIIRMDSKYRFSPSSHVEVFHEGSWWPGIILETSSGVFGKMYVVKLKSYTTGMDNVDGVDKLTVENTKLRPQFEWDGRKWMRCMTKKKDTKAKKLVIRGSQLTSRKKPIPADLASCNDSDEIRDKPSSDKLLETADVVPRPKETMKQQNAVLALASQIKLPLQLSMTGSGHLKYTSSLILGSPIELPSSQMDVMPSVPQTAGLQASLFGVFGKLRPIPQDPLLVMQSPHPDLSRNEGSKASTDQEKQSTDEGCCLISSAANSFNFVSFAGIDVSRKRKECVSFQAPEELGVNPETLSSFHIQEMKKNRVDETIEGTHDIAAISEEQTKLIFRDEHNELPTNVIAGPAIPSEKNQPTPLEDNKGPRDSSIVDKISQSGINDVRQDENLVLHATSTLDNSGDVNLLSSVSSTENQKKISKSEGCEISMDEDSGEEFCRSILVMPDDTRMDQFPSAKSGQATRHDDLICKENLGAIVECVTNTPTENLSFLSPAMFDDGVPNQSPVSENCQDNKQDGMDNVDHGANVVELASIIPETQHASVGGPLSTISLAALEGKTVLSHSLTWESALNEQSGVSQQYHSSAMVESPECVAESSQSIDDSTITQLCSFDMSQCIDAELGNSLIVSNNTQDTPISKYVARTHNSSCPLMQKFLHVHENIMVDQPSESLAIIELPFVKTSPMWAQIEAMEVFSKVPQRPNFHQLQQHPPEFREGIALGLMYSFTNLAESINMLNVHDDNAVFEHKMRCISVLEADGFDVRHLRSRLETLLSLKNSWSKIQDMMKRSEKKIAQEEIDDQQRCAEISVLSMVVRQLEQHAHLFRCIKNRAISQQMSHAMENSRLKVEASQLKQSSMSTEQRFSSVVAAPW

SEQ ID NO: 176568 - protein, 96 aa, Oryza sativa
  Clone ID: PAT_MRT4530_74303C.1.pep
MQTDRDKGGRGAVRLCWETHCGEVAAAGRGVGVDDEPAACPQAASETVGRAQIRSAFVVLAGELGWEKGTLPLPLLLPLPACTVPPPPLLLPLKYF

SEQ ID NO: 176569 - protein, 67 aa, Oryza sativa
  Clone ID: PAT_MRT4530_74304C.1.pep
LLCRGEKRGRVVCKYFIEVEAGWTQVNFNLRWGEKRSSLEEWKNVFLVSETTDELGDVFENVVIVIF

SEQ ID NO: 176570 - protein, 88 aa, Oryza sativa
  Clone ID: PAT_MRT4530_74305C.1.pep
YFLFLISNFYYFLIGFIYGLYRLLLIFLIFNSEFLLFHKWIYIYGLYSLLLIFPIFNSQILLFPKWISIWTLSLTLKFPIFNFKIQVF

SEQ ID NO: 176571 - protein, 918 aa, Oryza sativa
  Clone ID: PAT_MRT4530_74306C.1.pep
MSALHSRQGSSHIPLRCSPTQPPAGSDPIPSSMNLSEEWRFLFPVSSVFAPPSLAVANRNENGNGNGYGPLLFSPLPPPATLHTNIPFPAFQFHPPHSKSTGDALRYFLSSTASFLPTPDLHSLSSSLSDSTTFRPPPPPSNLLATILLRAPSTSLLLFFPSGHNADHLSYATLHSTAAPLSAVQTLTHGFMHPGHRIHHLAATSSCPPPHSHSPAAATPLVHGFLLAATTYSVNWFKVESSSSSSTSPPALVPAAKQAFDAAVVHACWSKHLHSDCLVLLDNAHLCCFDLHQRRGSVLRVGTATATEGGACLSCDYGPQPWTAVVATTKAILLLDLRYGPDHPGNCKVLARVGMQGLFDPDPPLNSECHYLAFCKAPFDDFLMSVATERLLLVLDIRQPLTPVLAWQHGLHNPNHIAMFRLSQLRPSKEHEWASSSGIAILAGSFWSTGFNLFFCGPKDQCSSSSQNAHHLYAWDVPSRISLIGQHCSCSNGLMREVFTDHEPITRNTVVGYHVLPNTLLQDESSSSFTGFALIRLTSSGKLEMQRFRASGDFDEHVMCDGSHHQSAACTTSSIISPDTTAHGEKFSSRYKFLKFHYLSKYLEGNLLSALENHNVVNKGSHQIVISEDVSAFAKENSPPCYRSVSDLLCNASVPMNIFETGCQHILNNGLSSDSLLVTFSKYKDMLACSKGKLIYEYPEVPARSRNNDEHRPFLLAKPSGTGNKLTSEAISGDALVGPLLPIPLLLAIEDRNKGTIESSTCQGETSSVSRRCREALEACVPKTSNANATRFSGWYASRELRKKPYFVYEPQIDDRLTLDETARKEGKKAHMDENLTTFVCGKAGVPHSGPKQAASNLFDSNCSPVRMDFELPFVDVQPAEQKAIQSLKNQFLSWQNNFRPYKDFCNSHHIQLQKPQR

SEQ ID NO: 176572 - protein, 95 aa, Oryza sativa
  unsure (1)..(95): unsure at all Xaa locations
  Clone ID: PAT_MRT4530_74307C.1.pep
FFFFFFGSKFLXLNXWXHCHTPCXQASKVNPGLSKGCVQAVHKLVXSQGQVTPVPITHTSYPCSFXWRTPSLGSPTASKPQAHKHSPAHAFVYPH

SEQ ID NO: 176573 - protein, 56 aa, Oryza sativa
  Clone ID: PAT_MRT4530_74308C.1.pep
IVQQRHPVINSYQISMTKIFTVTTNILHILLGLTKPNKPTLGERRVFYTVTQQAIQ

SEQ ID NO: 176574 - protein, 132 aa, Oryza sativa
  Clone ID: PAT_MRT4530_74309C.1.pep
MRSTRTVPVSEPTPRMDEQRADKGGVACPDAVPSQRWCRLGRQQQMVSTCSPGARAVAWTMAVVRGCLDPVTVAVVEKAHAEGAVAADGREVVEEKWQSKSLNKPMPLSHLFFDFFHHNSHTAKSSSQKEER

SEQ ID NO: 176575 - protein, 699 aa, Oryza sativa
  Clone ID: PAT_MRT4530_7430C.1.pep
MEQISDWTSDCTNSRKRKNFIPALNTPSGIAVTTEQKEAELERYFSQRLGHSLNSDRLEDLNLANICLIPKKGEATRVEDFRLISLMHSFAKILAKMLANRLAPKLHELVSPNQSAFIRKRAIHDNFLYVQNMIKNFNRKKKPMLFIKVDISKAFDIVNWPYLLEVLQNFGFGQRWRNWISNILGNSSSRIILNGIPGKAIWHMRGLRQGDPLSPMLFILAMEPLHQIFKAAEEASPLAKIDPKRSRFRCSLYADDVALFITPSENDLIAVKRILETFAQISGLHTNPGKTEIYPIACNNLDLDNLLSSFMGNLKTVPCNYLGLPLHTKKLRKIDLQPLLDKVGARIPGWKGRFFTSAGREVLVKSTLSATPIYHFTVLPQMKWVFKRIDRYRRAFLWKGDDPEKFNWKEDQKPWANMDLPCDEMDRCLFKAGTKITVGNGIKTSFWNDNWMDGQSPKDIAPAIYRLAKRKSNSLKKELEDNHWLEMLHPITSLVEIEELIQLGGLLQHINLVAGQTDDISWRWTANGQYSAKSAYLAQFQGSNALTEFTPLWSAFAEPKHRFFGWLILHQRTLTAENLLRRHWPCDWIRSLCNSAFEDAAHLAKECPFTVTVWTQICIWMNFQLPQHHLQGNLSDWWSSFCTISPRQNRNKVLRALITTWWNVWLERNRRIFQQISKNELQVAFLVKENIDLIEQSRI

SEQ ID NO: 176576 - protein, 70 aa, Oryza sativa
  Clone ID: PAT_MRT4530_74310C.1.pep
SELNANPEISFLTPPYSDPAQATGVGLIQGKDMIKGPNGFLKVDNQPYHMNTAELGKPKRQITKVLLLTI

SEQ ID NO: 176577 - protein, 293 aa, Oryza sativa
  unsure (1)..(293): unsure at all Xaa locations
  Clone ID: PAT_MRT4530_74311C.1.pep
RVRDRRRRRWWRRRGPPRRRARAPADPPPLPPPPPXTPPLPPPPPPPLPLTLSDPPPTPPLTLSPXSHPPPPPPPPPPSRRLPXPPPPPSPXTPPPPPRPPRHRRRPPGSPTXPPPPSSSTSPHGSXPPRPPPPPPGSRSXPPRPPAPPPRPRPPPPASSRSPPPPASSPPSPQDRXAAASPTAVATPPPLRSSRPMSSPPPPASFPPSWWLRRAIKWHWKRRQRWWWWWWCIKDGWLGFIIGHASPHCGQVKFIGQAIMESRQHEAAEEELQARAGSTLECTGGQARARRAA

SEQ ID NO: 176578 - protein, 111 aa, Oryza sativa
  Clone ID: PAT_MRT4530_74312C.1.pep
MATKGNKLGEVMWEHRLQAAAVVALVAATVVSISAIGPRLGAVVSFFWPLLVSTGFFLVAVAVLLRISPPPSSTIDESGKELIDFVAGCRPEHHPPEAAEAAVDVPPEPEI

SEQ ID NO: 176579 - protein, 202 aa, Oryza sativa
  Clone ID: PAT_MRT4530_74313C.1.pep
MVAPPRAPSPARACTRGCARGCRVAPRRCLFAPLPLRGRRREEVPAIVVVVLCLTLAAAAMVVVTATVLRGSGGRRGSRRGGGAAVESSRHWLRPLDRHIAHPKNVVFYTTSMGECAAVERLCRGALSFLLRACAVPSGVADAGSLRAAAPWPTPSRRHALYSFLFSPPPSHPSTRVKSERPATTEMVAPPRAPSPARACTR

SEQ ID NO: 176580 - protein, 251 aa, Oryza sativa
  Clone ID: PAT_MRT4530_74314C.1.pep
MGRERWTEVRTPSFADRLYGGGGAGNANSNSTDPPPLDAANLRERKCRTAGDGVVEMDPGSHLTFDLGYYRTVLRHHVLNSIGKSKREQCGHLDWRRNRQECCGRKIDVESGRGRTGGASWTKVREDARETKTVTQSRQSLRKMMPKSRCSRTVKDETSCRICQTRGQLGTNTRAGVANTARARQWRCCLSVFQQPVEVDHGRRHCSPRGRCSGNPKFDSVDACLMPIGCRSRCSRALERVIKPKMREAER

SEQ ID NO: 176581 - protein, 47 aa, Oryza sativa
  Clone ID: PAT_MRT4530_74315C.1.pep
GKKPKSGGGIIKGGVANLISALFIITQKITCGFLYLRVVFTACLLIT

SEQ ID NO: 176582 - protein, 102 aa, Oryza sativa
  Clone ID: PAT_MRT4530_74316C.1.pep
MDGGGGIWRPTRRAYPAVVERIHLSAPAPSPAAGGWRSQLPSEGRTRISYSILATLKKHLPLSGPEALHELQKLAVRFAETIYTGASCRSDYLRTPSTKMLS

SEQ ID NO: 176583 - protein, 50 aa, Oryza sativa
  Clone ID: PAT_MRT4530_74317C.1.pep
YPAGIVEDVPVKIRDFFIPVDFIVLDMDTGKETPLILGRPFLSTRTEQCS

SEQ ID NO: 176584 - protein, 61 aa, Oryza sativa
  Clone ID: PAT_MRT4530_74318C.1.pep
PAPLLASSVMSSDCRPPTTPLAPRTSSQARSVRRKQPLSPRCGPPWIQPWRLRRQALAPCS

SEQ ID NO: 176585 - protein, 93 aa, Oryza sativa
  Clone ID: PAT_MRT4530_74319C.1.pep
VGIQITIGTLMKVFIIMGIFPYVMQSEDQARLWKKNSTHGSISLQLMYLIFLIKTTQSMQRESNSAVARAEGKIVHGNDCSYFTSCKLIPSIQ

SEQ ID NO: 176586 - protein, 50 aa, Oryza sativa
  Clone ID: PAT_MRT4530_7431C.1.pep
CLKGHLRMKPQAGHSHLDLIISRRAGATADASGCIAMHFIQTPSIPVSVT

SEQ ID NO: 176587 - protein, 182 aa, Oryza sativa
  unsure (1)..(182): unsure at all Xaa locations
  Clone ID: PAT_MRT4530_74320C.1.pep
MAMWVFGYGSLVWNPGFAHDARLVGFVRDYRRVFYQGQWGVAYKISTEQDKQTALEHLEVREKQYDEKIYLDLYMDSSPKTPAVKNVMVYLATTNKQSNQNYLGPAPLEEMAKYSTYLTCSIGILQLNLRQIYLAEGPSGPNKEYLFKLEDALNKIGKXVVDPHVQDLANAVRKYPDTAVSC

SEQ ID NO: 176588 - protein, 187 aa, Oryza sativa
  Clone ID: PAT_MRT4530_74321C.1.pep
MAMWVFGYGSLVWNPGFAHDARLVGFVRDYRRVFYQGSTDHRGTPEFPGRTVTLEHQPGATCWGVAYKISTEQDKQTALEHLEVREKQYDEKIYLDLYMDSSPKTPAVKNVMVYLATTNKQSNQNYLGPAPLEEMAKQIYLAEGPSGPNKEYLFKLEDALNKIGVVDPHVQDLANAVRKYPDTAVSC

SEQ ID NO: 176589 - protein, 65 aa, Oryza sativa
  unsure (1)..(65): unsure at all Xaa locations
  Clone ID: PAT_MRT4530_74322C.1.pep
LARIINLVPLNGPPHHFSLCLTAASKEVVSSLLLINLYQCMFSYSVFFFFFFFXHSSTRLEQMRT

SEQ ID NO: 176590 - protein, 91 aa, Oryza sativa
  Clone ID: PAT_MRT4530_74323C.1.pep
MAVWLLLNIHWPVKRTTAVEATKGGEQQRRLLLDYLGRHICTPMEIVFSILSITSHRHVMAARGEHLRWSSMARFGCAPGMDEGERKRATG

SEQ ID NO: 176591 - protein, 471 aa, Oryza sativa
  Clone ID: PAT_MRT4530_74324C.1.pep
MRPRRRDASASDSDDADARSSSPRPRRRPDPAPPRAPLLSSLVVKLQPRGPEEEHGAADRLERRRDPPPAARRPPREPSPPGFMRRRESRQTPPPQQPHAAPRRRGGSASPPPPRRRGSPLGFRPRYPQPREEPQGYHPHSGSMIPPRGRGVESSNFNDGSRYGYELASKGGERLQYVSPPNGRGRPHRRDGGAPGKDFIFINGEYVHRNDPNLSPREGDWICQNPTCGNLNFARRSHCNNCNKERYAPAMYKSSYSPDRRQFNSPPQGPPSRVIGPPSGRDLPREKQRYRSPPRGWGMVRPDDHRDYSTQLSQDRPGRMADPMHRDRINFGDELPHRQRGKFDWDGYNHREHPRDGPYLDRREPRLGSPRGNWGQAVRDRSHSPMRNKPMNRGLDLRERSRSPFRDRPLNKASIGRGGPDRDYVHPFDTHGRPHNLGNSRGHGYRQEDDLFPIRNQGDQRVLSRHWNGIH

SEQ ID NO: 176592 - protein, 847 aa, Oryza sativa
  Clone ID: PAT_MRT4530_74325C.1.pep
MDGGYKREKELADQGLQCYLKSIYLVLRKGKKENEEISLLNHRRVLYIKFFSASSSAVPDENPEADYPSTEEQEQQLVLFVNTEDDANHDDSEHENLQRSPCTENANVDVHENIYDPRTWENLDNRGRDILIEKGPIREFNLLFPSDSSGRHFSYAYYSRKLSNGEVIDRKWLVYSKHVDKVYCFCCKLFKSNQSKSLLASDGLKDWKHLSGRLKQHENSVEHIKNMNTWNELRLRLSQNQTIDDDLQRGISKEKERWRQVLIRIVAAVKFLAKHNLAFRGSNEKLYQDNNGNFLGTIEMVAEFDSVMQDHIRRIQNHEVHHHYLGHNIQNELISLLAQAVKVYIMRVIKDAKYFSVILDCTPDVSHEEQMTLIVRCVNLSSNIPRVEEFFLEFLKVDDTSGLGLFNELMKALDSLELNVSDVRGQGYDNGSNMKGKHQGVQKRLLEINPRALYMPCACHSLNLTLCDMAKSCNKAISFFGVIQRIYTLFSCSTKRWKIFLENVPHLTVKSVCNTRWESRIKSVQAIRYQTPQIRSALLELEKASTDDPKAVSDAQSLVTALENFEYLVGMVIWHDILFSINMVSKKLQSEIVCMDATLKQIEGVISFFQRYRNEGFTSSIDIAKVIASDMDIEPKFPTKRQAKRKKHFDEQNDQNEEQQSVVESFRVNYFLVMIDVAIASLTSRFEQLKAFENVFGFLFTSKNLKSLDDTDLWQCCTNFVETFSHNNSSDVELNDFFSELKVLQATLPDALKSAPEILEFITAADCYPNVLVAYRILLTVPVTVASTERSFSKLKLLKNYLRSTMSQERLNGLAMCCIEKNVLENIDLDTVINDFASRNARRSIFL

SEQ ID NO: 176593 - protein, 236 aa, Oryza sativa
  unsure (1)..(236): unsure at all Xaa locations
  Clone ID: PAT_MRT4530_74326C.1.pep
KKGTLNSYSLCLLVLFHFQTCEPAILPPLKEIYEGNIMEDISDKISLWEYGLPVMDSDYLFVSALLFNCCIHIXGRAYYNEKHLDEVCSINIERFRRQNMGQRNQSSLSHLLASFFHKFFRIDALSDKVISTYTGRLERIQDNPRWMDKSYSLFVEDPFEKPDNAARAVGSFEFQDIVNAFSNASNKFVSDAHALTDRNGLLSLLCTXPDVWIKTWVEEPGASRYTNTLVSPHDRF

SEQ ID NO: 176594 - protein, 180 aa, Oryza sativa
  Clone ID: PAT_MRT4530_74327C.1.pep
MLAHELTQLTLATYSTINYSYRTYHETLTWNDSNRRGGHAVRGKENQCSELLSHVDLTFSSLHACSFSHDSNLNLRVDIVVCVSAMTPDSPYADRGHSATAFASLTVREVEGFSIGTKVFFYSTVHFSIKLIIKPTMHHQAFEHRNFADPSMRTDRRSAPHLQPKKSNKCEPLIQVLING

SEQ ID NO: 176595 - protein, 76 aa, Oryza sativa
  Clone ID: PAT_MRT4530_74328C.1.pep
SEMQPCKRHQINMDYFSNVPLAIVHITLIPSLITFTFLACFYVYCKFFSNKFIKKNQNLFSSFRYRYFNLHHLLSK

SEQ ID NO: 176596 - protein, 146 aa, Oryza sativa
  Clone ID: PAT_MRT4530_74329C.1.pep
MAVGGRKRSGDSPPRLARPFSTSMRPSLFLRPSPSSPTHGSPPSSITGLSASRRGLPDELASSLAAFSSRRPPPVISPPPPAAPLLCPLPAARHPSAHRPSPSLRPPPAGRCCSSFVVIGSVRLVFSIAAWQQGRTSLPRAWVRPF

SEQ ID NO: 176597 - protein, 99 aa, Oryza sativa
  Clone ID: PAT_MRT4530_74330C.1.pep
KFSWQGPDSIVPSQLDPFPFAIVRLKPQLFGVLRGPLDWGLPRGRGGGPEGFPPRQGWCLQFLRRSGCGSLKKGSEVSPAVGGPFGHLKDEKGVCLFFC

SEQ ID NO: 176598 - protein, 100 aa, Oryza sativa
  Clone ID: PAT_MRT4530_74331C.1.pep
PAILPCHAPLEPMRLPRCRKPTTPFPGQRPPQRRPRWPRTPSSRAPSGSNLSAPAGPPLPAPPPPRRRWESAPPATSRASGGGWHRQRRLGISLVGAEKS

SEQ ID NO: 176599 - protein, 70 aa, Oryza sativa
  Clone ID: PAT_MRT4530_74332C.1.pep
TFVSPSGLGVGNFLGQFLTPQQQKVEEITSLFHPNFGVKYHRGLFCGFKGAFKNVNLKKKGKCIPFQNGQ

SEQ ID NO: 176600 - protein, 203 aa, Oryza sativa
  Clone ID: PAT_MRT4530_74333C.1.pep
MATLARLLLLLSLSLSFSSSRRRRERCRGAAAGANLHHWHVRWPAVRFPNDDEVEEEQEEGDPPAHSDSSHSEHVSWVCAAIVDVVVVGADLVLWEARCMPSLAVAEVVSLPISLPPVAGWELDLQPHFLPARASTSPLPRGSRSVDHRDGSHSELHRSLMPPLLALPYRLPLRATAGKGVVGLRHRGNRIGSNGAWQGRMAG

SEQ ID NO: 176601 - protein, 91 aa, Oryza sativa
  Clone ID: PAT_MRT4530_74334C.1.pep
LSKGSGITEDFEEASVQSRGFGILDVGYRSKNKAWAAGESGVLLKTTNGGKTWVRDKAADNIAANLYSVKFLGDNKGYVLGNDGVLLRYVG

SEQ ID NO: 176602 - protein, 42 aa, Oryza sativa
  Clone ID: PAT_MRT4530_74335C.1.pep
QLLIIQQHYANVNKAHREGCSYIAYKTKPNSMIRHIARKNFM

SEQ ID NO: 176603 - protein, 121 aa, Oryza sativa
  Clone ID: PAT_MRT4530_74336C.1.pep
FWGFFFFFFFFFFFFFFFFFFFYFFFFFFFLKRGEPLFRPGFEQNHPQRARGGGFILPYPGTRSQIQYPGGPLSGPIEKPGGDWGGKLGGKGPGPSPRGVLRVRACPLGKAKPIRRPHKTG

SEQ ID NO: 176604 - protein, 231 aa, Oryza sativa
  Clone ID: PAT_MRT4530_74337C.1.pep
MEQRNLFVSALSVGVGVGLGLASARWAAPGSGEGGGGAGIGVAELEAELRRLVVDGREGDVTFDEFRYYLSERTKEVLISAAFVHLKQADLSKHIRNLCAASRAILLSGPTEPYLQSLARALSHYYKAQLLILDVTDFSLRIQSKYGSSSKGLAQSQSISETTFGRMSDLIGSFTIFPKSAEPRESLQRQTSSADVRSRGSEASSNAPPLSKNASMSSDISDVFSQWSAHS

SEQ ID NO: 176605 - protein, 136 aa, Oryza sativa
  unsure (1)..(136): unsure at all Xaa locations
  Clone ID: PAT_MRT4530_74338C.1.pep
MIFSPWLSCEFVFFYLGDDMSCHVVXRVMSSLVFKMYDRNGTLLSDVRHXVPAIRSSLILLKSLHEICWLCQADCSKXTMNIMKDRKNIMYGERXSSCLYKXKEVAGEVMEGRYASVAVHNHEGGEPGVNCLGCLA

SEQ ID NO: 176606 - protein, 84 aa, Oryza sativa
  Clone ID: PAT_MRT4530_74339C.1.pep
HRTNRINGYGEHNGTADTAGCTEEYKVIRRYREQSGKEESICLEGDIGGGGVFSAKYPSGRETQRLWRSTPVFEQNTEPIILVG

SEQ ID NO: 176607 - protein, 52 aa, Oryza sativa
  Clone ID: PAT_MRT4530_7433C.1.pep
EIKCYSYKKFLEDQLEVVQHLDAHLVVHVSFLNHQLLETDIHYMHKEYHFFF

SEQ ID NO: 176608 - protein, 63 aa, Oryza sativa
  Clone ID: PAT_MRT4530_74340C.1.pep
TNYRRTSPSYVVPKHHQHHSSATDIIALSFVSRSMTFIIVSRWSNPLIKLNNANQSPITNLIK

SEQ ID NO: 176609 - protein, 102 aa, Oryza sativa
  Clone ID: PAT_MRT4530_74341C.1.pep
MAAVAVARPSEHGFSQPTSSAGLLAMLDEDESVLQVYALKQLNRIVDEFWAEISAEISKLEALYEDEGFEERELAALLASKVFYHLGELDESPHVCTGCGSL

SEQ ID NO: 176610 - protein, 327 aa, Oryza sativa
  Clone ID: PAT_MRT4530_74342C.1.pep
MYSRRAAAGGEQQHLSNRVVGLVNLVTLVASVPIIGAGLWLQAHGGSSPCGSALQAPLLAIGFVTLLVSLAGFLGACYHVPSALWLYLAAMLLLVLALLGITVFGLAVTAGGGGTQVAGRPYREFRLADYSSWLQRHVRAERYWRPALACVLAARACDTLAAWTPLDYLRNDLTPVQSGCCKPPTACTYYDDAQQQQQQPDCYRWSNAPGVLCYGCDSCKAGVLEQLRRHWHNVTILNVVLLLLLILFYSCACCAFRNTATATSSKTIFHLHPRWEYRCRSSVWERQAACGADNGRSPLGRWAPLTKPREMNKVEQEREFVWDNSRE

SEQ ID NO: 176611 - protein, 152 aa, Oryza sativa
  Clone ID: PAT_MRT4530_74343C.1.pep
MAAMMEMRRGGGGGESCGTARLQQAPRGAAIGWGRRWSSDVVFSPSTAMSLVVAAGSDQAWGGGGGDGAWQRKSGRWVDDLPSGSTEWGLQPPSSLKAAPSTAKWLCVASSFCSSTPSPRVVAFKLHQWLGREEKQHWPGGRGKESGIDWWR

SEQ ID NO: 176612 - protein, 216 aa, Oryza sativa
  unsure (1)..(216): unsure at all Xaa locations
  Clone ID: PAT_MRT4530_74344C.1.pep
RPSPPPSPFPSNAQQGPPPPPPPSPSLPPDLPPPPLSSSSRPPTXSPPPDRRPPPSPTPRRPPAIGRRIRPTAPPHRLPXPPPPPPPDRPPPPPPDPASTRSGDVDPRPGHQTRPPLDRRTPDLASGKPDPAASASHTDCRTPPLPPPPDPAFPSQPPTPTPTLPPTPQPHPPHIPPKPSPPPRQTWTCPFLPPNPLDPXTAPPPCSTPSPSPPPP

SEQ ID NO: 176613 - protein, 367 aa, Oryza sativa
  Clone ID: PAT_MRT4530_74345C.1.pep
SFAIPSAADPHAPPLLSLPPVGRRALPLLSPASPMSLPPPSQRSQTRGWRPWRGTVGRWRRQRPLVGGASGRRSEGEAELASDGREAAMSGGWDADPRPPTLWASGSRCGSRWRPDPASRRPDPASDGREAAASGGPDADPRPLISWRPDPVGGGGGGVRQSVGEALAAGRRAGRGSTSPNLVEAGSSGGDGGGVRQSMGEVLAAGFGVRWPGGRRGVGGGGGRRSGGGETWEVGRKKREERHLLAAQGRGRGAGRHERRGEGEASTTTGPRRGEGLALASRAREWERQRKRWMKSRRCKRISQPLSSPSSVHLPLAPRLPHAVVGRRPALAHPLPAPLASRHRHLASTTTTPPPSSRSPGKLHRIQ

SEQ ID NO: 176614 - protein, 205 aa, Oryza sativa
  unsure (1)..(205): unsure at all Xaa locations
  Clone ID: PAT_MRT4530_74346C.1.pep
TTHPGGPPPTHLPALSPLLSSSSPPVSPLPQLSPSLPPDQPSPPLSSSSRPPTXSPPPDRRPPPPPTPRRPPGHRTPNPAASTSPIDCRTPPPSPPLDPASTRLGDVDPXPPSSRPPAPPPPTAGLLPRLPPPDPASTRSGDVDPRPGHRTRPPLDRRTPDLASGKPDPAASDSHTDCRTPPTPPPPDPASTRWGDVDPRPSRRT

SEQ ID NO: 176615 - protein, 93 aa, Oryza sativa
  Clone ID: PAT_MRT4530_74347C.1.pep
MLRWPPDLGVPSLAALLPSSAAGHYAGAPALRGWHWQHWWPERLGSAVRRWPELVQDFSPVVDAVLWGLVTAIESVALFSMVCCFFLFCGCTL

SEQ ID NO: 176616 - protein, 196 aa, Oryza sativa
  Clone ID: PAT_MRT4530_74348C.1.pep
SRPPVASISHASPAPGHRTPDPADSASPIDCRTPPPPPPPDPASTRSGDVDTHPGRLPAASASHTDCRTRPPPPPPDPASTRSGDVDPRPGHRTRPPLDRRTPDLASGKPDPAASASHTDCRTPPLLSAAPPPHRPLTTPPNRCRTSRRRMLPLCWICKGREERGARRRIRRPHASPPPDLQGEGGLEARQWAMIS

SEQ ID NO: 176617 - protein, 533 aa, Oryza sativa
  unsure (1)..(533): unsure at all Xaa locations
  Clone ID: PAT_MRT4530_74349C.1.pep
PTPLPHPPTPIPPLPPPPVTTTSCRRSAAXVPPPDPTEGRHHHCRSPPPLAARPPPHAPLQIRRREGAAASRPAAGSGGREGVAPSPPPLPPLXATAASTPPDLAEARTGPPPPRRPPPPPPHLPSTPILPPPPTTHPGGPPPTHLPALSPLLSSFSPPLSPLPQLXSLTSSRPPASTSLLFLLTSHVPPPXPPPPPDRRLPPPPTPRRPLGHRTPDPAANASPIDCQTPPLPPPPDPASTRSGNVDPCPARLPAASASHTDCQTPPPPPLPDPALPPPPPDHPSPWPPSSLPPPXPWPAPPSSPPPPTPPISXGSPPPPPPGCRSAHGRPPRAARTTSMPPPPPPPSSPSSPPAAAPAAGRWSSPPPPPPSPASPYPPPPPSSPLLHTAVPTPAPTAVSPHLPPPPPAARRAPPPAPGTRRPPTPRRTASTPRPAPARAPAAAPPRRPPPPPPAGSAPRSRAPRRGRGPGARTXPPPPPPPPPPDPRGPPPPGPASPXGGARAPPPPRGERARPPGARRRLVFALRPAVFCI

SEQ ID NO: 176618 - protein, 209 aa, Oryza sativa
  unsure (1)..(209): unsure at all Xaa locations
  Clone ID: PAT_MRT4530_7434C.1.pep
METRTGPTAAVAAGGGAHLACAGRGALLLALVAVAAGVFLPVTESSCPRDNSLVKDVSKMYQSNYGREGFSHITIAGALAHGMKEVEVWLQTFGPGQRTPIHRHSCEEIFVVLKGKGTLLLGSSSMKYPGQPQEIPVFKNSTFSVPVNDPHQVXWNSDEHEDLQVLVIISRPPVKIFTYDDWSVPHTAAKLKFPYFWDEDCLPAPKDEL

SEQ ID NO: 176619 - protein, 114 aa, Oryza sativa
  Clone ID: PAT_MRT4530_74350C.1.pep
MAARGCGHLRLDTAAIKSLPSAMAARGCGRRGRWRRDLLTHIISHPQALAQCELTLNAMGLNSAPGIGGARNLLQLPDIILNARNLLTGNKTALFAIPWLGRCSPTASRTTPAT

SEQ ID NO: 176620 - protein, 114 aa, Oryza sativa
  Clone ID: PAT_MRT4530_74351C.1.pep
LVTARKVKHSKSSFAMGKCLRPTHQEVMLFCLVLLLCSAIPAQTRDIGQTTNEIQKDMSTGVKNKNSFGELYYKPDHCVQTPGGFYCCALDQLCYPTIGLCIPECTSSKVRRGS

SEQ ID NO: 176621 - protein, 47 aa, Oryza sativa
  unsure (1)..(47): unsure at all Xaa locations
  Clone ID: PAT_MRT4530_74352C.1.pep
GLQVCILFTRCSTHHALIPFYHTXLGFLVHHTRVAFFLFTFEQQGAT

SEQ ID NO: 176622 - protein, 179 aa, Oryza sativa
  unsure (1)..(179): unsure at all Xaa locations
  Clone ID: PAT_MRT4530_74353C.1.pep
GPGCGGDGRGGGVGEKRGESSPALEGWPWEAVAGRWAADRAGGEVAAPXAMPRGRKLAVGRCRRRGQSGRYVRRRRPVVAPRSRRRGXDGRHRLEGRRGQGCGGEGAGRGDLACAVDSLRPTGEAGGGVLGRWRRRIRWWRDGRARGAAAAECARGRGMGEKRLGLRLCTNLKAYPMVQ

SEQ ID NO: 176623 - protein, 90 aa, Oryza sativa
  unsure (1)..(90): unsure at all Xaa locations
  Clone ID: PAT_MRT4530_74354C.1.pep
HPAATAAFQLTNIHVWQQLSLVAHQSHYRDINIVQAISQQLQLQQFGDLYFDRNLAQAQALVXFNEPSRYGIYPRYXGAPRTITTLGGVL

SEQ ID NO: 176624 - protein, 41 aa, Oryza sativa
  Clone ID: PAT_MRT4530_74355C.1.pep
PIFFFFNSKPFNFHICNIYNRWRQHKQNNLSYLILTPQNII

SEQ ID NO: 176625 - protein, 268 aa, Oryza sativa
  Clone ID: PAT_MRT4530_74356C.1.pep
HKEMLLQILHDAQRYSAFRKGLAMIDICQLKNDPEEVLKWLKFSTGWSVLHNSELRIGLKRHMDLLKEHEGNKMNPLSMPEDENLVLEKINAELCSELEKMIGTFDWALMSQYYYKARFSNFARQCAIQARASGVILVKQALPIRETWKEQKQSTSPKVSKLSLEDCLGSLRRPLRRINEQFGRGAAREFSRDCISEIVTFVRLNVHDLLHIVGIAFYLEGNSWRNGSDGQLELVTKLGSWLIIGFQGRMTNNRHVIVILFGASSRKI

SEQ ID NO: 176626 - protein, 78 aa, Oryza sativa
  unsure (1)..(78): unsure at all Xaa locations
  Clone ID: PAT_MRT4530_74357C.1.pep
AGRVQVPVRYRGVDLSRSDRELTARERFQPLFPRPGALKLWMQXXQHLNNMSREGRYAGIRRMVRSXSESMPMPLEQG

SEQ ID NO: 176627 - protein, 157 aa, Oryza sativa
  Clone ID: PAT_MRT4530_74358C.1.pep
MAAPRPTSRAQPLIASRLNLAGFSASSPRRILPAPRASAGGGGGEEEDSRVQELRVPGSWLTPAGAAQESEWLRETLHKWLDDEYCPEPANVDISNTAARSFYESLTAKESDLGEILLKMVGDLQKLSYKESFHGAFSAANAAVSLISQRMESSSDD

SEQ ID NO: 176628 - protein, 156 aa, Oryza sativa
  Clone ID: PAT_MRT4530_74359C.1.pep
MAARVALRRAFSAAVAASPSPGLGATASPVGFQHGPLLRRLINSDASAALKNNKHGFSSESRDARMDIKRRCELKEHEFFHLVEEALKTADPVKARLVFEKRKELSDLVREYKANSGRCFRLLRCRHDRVELTKMRFRSTGDRYEKHATNLYDYPW

SEQ ID NO: 176629 - protein, 181 aa, Oryza sativa
  Clone ID: PAT_MRT4530_7435C.1.pep
MAMGDDYSKARQALAVSAHECSLVDAVSSAATPPTADDGEGHAAGFFEGFVLGGIRVDSVRPGLVDCSFTVPSRLTDRSGCLAAGAVVSLVDEVGSAASIADGRPVKVSTDMSVSFVSLAQARPGDRLRITARALGHKGAYSATHVLIFNAATGEVVAEGRHSLFGRMKVFTFTGTATSKL

SEQ ID NO: 176630 - protein, 192 aa, Oryza sativa
  Clone ID: PAT_MRT4530_74360C.1.pep
DYQKHLLPRPHPHTPFSVTEPEISMWRIYRSKMEKGRRRHIPAFGEWNQQCEELPITQYFDSAMEQGLVVTAGHYYHATAGELLFKVAGSPPPQKPPKKAMIIVVKYRYVRCLKELRSIVDHFKVKVRSTKNGMENQAARRRDGPSVVVDGGVVVHGSRRPRVVRAVDEDLYKVPSELLRKKAKGVLLLHPI

SEQ ID NO: 176631 - protein, 151 aa, Oryza sativa
  Clone ID: PAT_MRT4530_74361C.1.pep
DAWAMAARVALRRAFSAAVAASPSPGLGATASPVGFQHGPLLRRLINSDASAALKNNKHGFSSESRDARMDIKRRCELKEHEFFHLVEEALKTADPVKARLVFEKRKELSDLVREYKANSGLKTANRRLNLAVIISAVVSGYFVAGMIASN

SEQ ID NO: 176632 - protein, 321 aa, Oryza sativa
  Clone ID: PAT_MRT4530_74362C.1.pep
MKGPVEVTFLDGDDDSDDDDRWYYSPRREAVLCIGDDLALVDVTFPVDDMDTNPWFRGIAQLCRGHRLRAPLVVGLVALRGRAPPYNWCPWDASGVRGHPRDPRNPIRCIAICVGGSHALVYQPCCDRGSSKYTGGVLPFSEGGCKMARLRAFLRDRRVTVACVGAREAAEKLAEEWEVDVARPVELTDLFARAFGKVAGVDTVKPPKEPEPDRRWMTTSALLRAEAKAEAEAAKENHYSYSKRGKRPAAEVVKGLSMERMAHVALGPEMRLAPWPEKAADADWGSCYLEKSDWKYAARDAYLCLEIAAVCLQKLGAPVGN

SEQ ID NO: 176633 - protein, 566 aa, Oryza sativa
  unsure (1)..(566): unsure at all Xaa locations
  Clone ID: PAT_MRT4530_74363C.1.pep
GRQPKATNQTHTKSPKTPQETKVSLDENRPRTRLXSKPKVYTDGTIRYSYFTSTGEPNNLEEALGDKHWKYAMDLEYSALMKNKTWHLVPRQEGKNIIYCKWVYKVKRKADVSLDRYKARLVTKGFKQRYGIDYEDTFSTVVKAATIRTVLSIAVYRGWSLRQLDVQNAFLHGVLEGEVYMRQPPGYENSSRSGFICKLDKTLYGLKQAPRAXYARLSGKLQQLGFKPSKADTSLFYFNKGNITIFILIYVDDIIVASSTQGAVSALLQDLKEDFALKDLGXLHCFLGTELXKVNNGLVLSQGKYIADVLKRTNMIDCKPVNTPLSTIEKISLHEGDLFGSNDATQYRSIVGALQYLTLTRPDISFSVNKVCXFLHTPTAVYWAAVKRILRYLKYTSCLGLKFSRSVSTLVSAFTDADXAGCLDDMRSTGGFAVYLGSNFVXWSARKPVTVSRSNTEAEYKALVNATVEVMXIQTLLNELGIQVPREAKIWCDNIGAKHLSANLVFHARTKHIEVDYHFVRTRILNKLLEVEYVSSEDQVADGFTKPLXVKQLEMFRYSLNLGSLD

SEQ ID NO: 176634 - protein, 74 aa, Oryza sativa
  Clone ID: PAT_MRT4530_74364C.1.pep
QRNIKRRGDEEILNRSEYIGLVLYGRSSLMSPRDEPEVTWQGRRHMHYRSSSPTTCEPSLDFSMQHYLCNLPSC

SEQ ID NO: 176635 - protein, 109 aa, Oryza sativa
  unsure (1)..(109): unsure at all Xaa locations
  Clone ID: PAT_MRT4530_74365C.1.pep
MIIPSVIVNADRSIDAWIGGIWPYSWLVAAAAANESLPMHMSTNTRKQIWLDRSIQMMICHIDRNLCXCTSDLATSLVSVTPIAAAVILDPDRQTHAYTTDREVDFNLL

SEQ ID NO: 176636 - protein, 120 aa, Oryza sativa
  Clone ID: PAT_MRT4530_74366C.1.pep
GNPRTIITTKNFRRGGDRRPGASFTGHRGPVLIALDNKNGKKNKGGRNERLLTSSKKRKEGSFYLFAQMPAPRGRTGRPLPCLKTGHFFGFRLADLNHRGRPLNWNPAPPPGTDPSSTPG

SEQ ID NO: 176637 - protein, 101 aa, Oryza sativa
  unsure (1)..(101): unsure at all Xaa locations
  Clone ID: PAT_MRT4530_74367C.1.pep
LAPSRCRXLXHRIRPRRRLLXXQMSPPPPVAAEVAAAAASRRICTCRLTGSAGXIPLFTGAGXSSXXXTXHDLGAVXXSPXQGNGATDSLAVMLXXLHFRR

SEQ ID NO: 176638 - protein, 52 aa, Oryza sativa
  Clone ID: PAT_MRT4530_74369C.1.pep
MAPVVQVEDSKVYAFFTEVPCHSLQGLKGANAIFALPKFEHKRVTTERADEA

SEQ ID NO: 176639 - protein, 121 aa, Oryza sativa
  unsure (1)..(121): unsure at all Xaa locations
  Clone ID: PAT_MRT4530_7436C.1.pep
YRHILQIKLTTQLATSVTWSGTGGGYAHTSLPPXRLKSVTIRSAAPIDAIAYTYIFTYIKAHLAGPFGGVXGNPTTITLTSPESVKGFSGTITNFLTNVIIVPNVTTYNFGLNGGTVFRLP

SEQ ID NO: 176640 - protein, 507 aa, Oryza sativa
  Clone ID: PAT_MRT4530_74370C.1.pep
MASGDGGDDAGVKRVADRYLKREVLGEGTYGVVFKAVDTKTGNTVAIKKIRLGKYKEGVNFTALREIKLLKELKDSNIIELIDAFPYKGNLHLVFEFMETDLEAVIRDRNIVLSPADTKSYIQMMLKGLAFCHKKWVLHRDMKPNNLLIGADGQLKLADFGLARIFGSPERNFTHQVFARWYRAPELLFGTKQYGSAVDIWAAGCIFAELLLRRPFLQFSTEETGNGQALVRIKLFKGLPENMMQAESCPTISLLTPWCWATRCHALVLLPSISTAYCLRFGYPGYLFWPYIFWPKKGFQGSSDIDQLGKIFAAFGTPKSSQWPDMVYLPDYVEYQFVSAPPLRSLFPMASDDALDLLSRMFTYDPKARITAQQALEHRYFLSVPAPTKPSQLPRPPPKGDSGNNKIPDLNLQDGPVVLSPPRKLRRVTAHEGMEVHMHRADRTEEHPSGARHMDDMSSQSLEYQYVFYTEISVIYICGMGKWNENVSFGLLASVYACELVIVNGPD

SEQ ID NO: 176641 - protein, 40 aa, Oryza sativa
  Clone ID: PAT_MRT4530_74371C.1.pep
RCPSDPNFVHLYPCTFAHDQTEPQSMPYPSLSQMSASTSM

SEQ ID NO: 176642 - protein, 94 aa, Oryza sativa
  Clone ID: PAT_MRT4530_74372C.1.pep
LYNRSDVNNTDHSFSPIGTIGAGDHGCTWHSAIYAIMVLVTGIPADVPYIAGIAVSSVGVGNREARVRCTSKAAQASMSSLSAHSRISALERLS

SEQ ID NO: 176643 - protein, 248 aa, Oryza sativa
  Clone ID: PAT_MRT4530_74373C.1.pep
MAAAANGGGAALFSEEELRDVSGVRRCEDFVEVTCGCTSHRYGDAVGRLRVYASGDLEVSCECTPGCREGPLGSSSSVVPNAHKLTPSAFEKHSGRETAGKWRNTVWVMVQGEKVPLSKTALLKYYSLSHKSANGSNKGRNGRLSHRDEFIHCTECGKERRFRLRSKEECRIYHDALAKPNWTCADLTTDRVTCGDEEERASRKVLRGCSRSTSCTGCVKCVCFGCEICRFTDCGCQTCVDFYHNSKE

SEQ ID NO: 176644 - protein, 1071 aa, Oryza sativa
  unsure (1)..(1071): unsure at all Xaa locations
  Clone ID: PAT_MRT4530_74374C.1.pep
MAVTDLCPTPSNPSPSWRTAQSIPSNSSVADAGMSPPLSANATGVLDVRPGGYEPLTGLELHREDTTVARYLDMSWVNLSTIVQWVPTVNIDKGLTIKDIVEECKLFYFAGAETTSVLLTWTMLLLSIHPEWQDHAREEIMGLFRKNKPDYEGLSRLKIVTMIFYEVLRLHPPFIEIGWKTYKEMEIGGVTYPAGVSIKIPVLFIHHDPDSWGSDVHEFKPERFSEGISKASKDPGAFLPFGWGPRICIGQNFALLESKMALCLILQRLEFELAPSYTHAPHTMINSESIKTWCQKNPNPRLIPAHCRPPPPSRRRLSPSPFSHWFRPSPSPSLLSPYRRCRSLSPSPSRLTYTAGYGMKTAVTTVPPPLPSTRRPQRPSLPLGLFVFVGDGARSTLKMQRRPPNGGDDSVNGFPRVDLVTATARGXSTRDVDNADPPSPTPGMPTGVKQVRMIRESNPGWGILDACVGDGRGHHIRGGLTVAIGNTSTGVGITVAFCAVAPPAMSRLAPALNPTKHTMTTDQDTHWASSEFDSDECYYTARCRVLAANVNSDFQCCIFNVRDPITPYVASLREELFIYQPARAVDLTRLPPCYHGVINIDGSRNIGILCRNNGEFVVAHLGGMTSVGDGGSGLPITRPVAAKLCKYVGGFWSTNWLRIHHAAGEDQDLCWWETDLVVPFGDSLCWVDYLRGILLCDVFSPIPDFRYVRLPVNPYPGNDIESCPTPFTITSWTLTSDRLSWIKDASLDANVFFSLASNEHLPQIVPEFPLVDMEDPNVIYFTLPLEEGSNDKAAFVALDMVRRTLGLRNTYTLRSTLKPGDDNSSTSCNLFGNEPFLPFEFSNYLNLDAAYNSTEGAKTYYTLQDDKAIHSVNTGGRAPTVEAGRSNTDVEACAQEEVEAGNEEAGELRRRQRRGRRRPASSSSRVWRGGGRGRRPEVGARGAGMDARPETQKPALLGMAVQRRLATRRPEQQRRRGQRGGWTVGGAGAGTAAFPASAQAQMVVQRELAVDAEAMPPSPGFFFGQIWRGGRRVVEWRGPRPTLRDGGSMKSAGGGASVQCGGSLVVGRTGS

SEQ ID NO: 176645 - protein, 403 aa, Oryza sativa
  Clone ID: PAT_MRT4530_74375C.1.pep
MGKNGKKTESHRQGRGRRASRFRGGGGGGDEDGDELPSSAYDAPPPHHEDSDGDDTDEAAAEDEHEGGVDGGDQEQREVGSMPSKFHLYQLSVQSPKGDISYLQKFFLMYVGGRVPLHFQEDFCGTALLSAEWLRTDARRTAVGLDLDLESLEWCLENNLSKIGADGYSRMLLFHGNVLQPNVARLVKQKICDAMQDLHVNNDNDSLASNICDQLDPASPKCSANSTMSDLVLPARDIICAFNYSCCCLHRRKDLVLYFRHAFNALSKRGGIFVMDVYGGTSSERKLRLQRRFPSFTFVWGQEEFDIISHQTRISLHFQAGKKQMLRHAFTYHWRLWSIPEIKDCLEEAGFKSIHVWIREMPNTQSSGNAKEYNANRDVKYEELQHFNQADAWNAYVVGVANI

SEQ ID NO: 176646 - protein, 545 aa, Oryza sativa
  Clone ID: PAT_MRT4530_74376C.1.pep
MADDINKLFAFFSECKMQNSKFYWDMQLDEDGVVKNIFWSHASSQAEYADFGDAVTLDTTYKTNIYGMSLAMFVGASHHIQDTLFGCALLRDKKIESFEWLFKTFKNYQDNVIAVAITNVFPKTIHRLCRWLILKNHSEALNILYARDDRIESELLLCVNQTYTPQEFENAWSWFIDEFDLQDSVTLQNLYEIRHRWIPALFKKDYCGRMTSTQQSESVNKLAKRNFVDHQTNLHSFARRMLDIIISREAKEAAETRACLGMPITKTRWSFVVQMSRVYTRAVFKLFEEALDDCTAFRIDMDIGNTNRWIVLDMEHSEKHDWCQLQFKVLADVQKGRYECECKQWEHTGLLCTHLLRTFIHAQVEKIPPQRDRVTAGPDSVEESYRQKTLLAEAMAIVRLGRKEMLPDSVACRDDIVARNNGAGTSAEVISQEPPPKPKTKERTVGPEENVSLGARGKKLCTRVCSWCGLRDGHYTTTCPKNPANFEKVRKAMSRGRGRRGRPRGSGRGGGRGMACVGRSLMDELEREGITEQDSNDDMVESDAE

SEQ ID NO: 176647 - protein, 104 aa, Oryza sativa
  Clone ID: PAT_MRT4530_74377C.1.pep
PFGKTSSLFWEEKKTYKFKKKKKAPKKKANPYLLMQTTYLQWQTQGNKGPVYMDGLNNSQKNHSLGLEKKPRGGGGPLPLCSHGVVFPAMLTFLGIVSLVFLTG

SEQ ID NO: 176648 - protein, 49 aa, Oryza sativa
  Clone ID: PAT_MRT4530_74378C.1.pep
QLVVLRSTAVSMLTSPVPSLALAKSCSSSCTSSPSRAMRDPPPTAPMPA

SEQ ID NO: 176649 - protein, 218 aa, Oryza sativa
  Clone ID: PAT_MRT4530_74379C.1.pep
MAPVAAEEDDVPRLRNTRSRATRRQPGLQELLRTVRGRGNEQDSKGRSHCSRSAPASPSSERDQRMKRRRKMIEADHSCEDGEEKVPEKMNEGEEEEEVSSAPSSPLHMPLLPFKFSGYDSDGQEILEPPDMDIVDAYQKRREEFEEKRGGKPLAHCSGFLVDWDETRKKGIVMTTSDIICSKSSLDCWSGEDEYSPNAEVCCTLDSSILQQCYRDYS

SEQ ID NO: 176650 - protein, 100 aa, Oryza sativa
  unsure (1)..(100): unsure at all Xaa locations
  Clone ID: PAT_MRT4530_7437C.1.pep
IIQGPNPWHVSFSYPRALHNTCLQTLAGHPQYVKEAQHALLLRGKDDSLHRXGKYSIVGEAAQPXDGMFVHSVVYSSDPILSHSGRLCYSCLVLLLLLCC

SEQ ID NO: 176651 - protein, 124 aa, Oryza sativa
  unsure (1)..(124): unsure at all Xaa locations
  Clone ID: PAT_MRT4530_74380C.1.pep
LCEFRCLFWVWIFPVTRITNLXAKNKHKIEENRHKNRWSINRTMSRIRLMEGWTKNSEMTRSIGPKFTSXSEQQERRPPARNWAGXGQPRVRPNQPQRRWLQGLARRLGLIFNDSWWILPTFPT

SEQ ID NO: 176652 - protein, 54 aa, Oryza sativa
  Clone ID: PAT_MRT4530_74381C.1.pep
GGGFLHGKVFINQIFSQAPHPGSLLIPLPTRLLHRQNTGFVYQTLYKGFVLENS

SEQ ID NO: 176653 - protein, 99 aa, Oryza sativa
  unsure (1)..(99): unsure at all Xaa locations
  Clone ID: PAT_MRT4530_74382C.1.pep
MRPGHGADAEELSRATAAPMRRGTVEGLLGASVVVWRHXPGEGTSWVTASAPTPWACRRSAPTCERSGTVRGRGASHGLPPPRRSARPSGMLLPPLCRL

SEQ ID NO: 176654 - protein, 101 aa, Oryza sativa
  Clone ID: PAT_MRT4530_74383C.1.pep
MTEPITVTVARTDSETRTSPSSSQQSHSLAMMTGEGNKLVFLDSVPERPYDLDTLLRASVEVMLARVVDYEECGGGGGSSEVVVCSGGGERKWLSPYQFVY

SEQ ID NO: 176655 - protein, 115 aa, Oryza sativa
  Clone ID: PAT_MRT4530_74384C.1.pep
LVRPDGAAAATTSGAGAPAARRGALVGGYQRLLLPPAAESDSRRLVAADSAGRQPATEVASSSRIRTTHEPLLSAGLPAGLHRPATSALISYGLSTTYVQHIYSGCKRVSMYSTL

SEQ ID NO: 176656 - protein, 199 aa, Oryza sativa
  Clone ID: PAT_MRT4530_74385C.1.pep
MAPVKVFGPAKSTAVARVLVCLEEVGAEYELVGIHIPAGEQKSPAHLARNPFGQVPAFQDGDLILFDLLKESNLSQSAIMVDVWLEVESQTFDTAMSAITFQCLTIPTFMGGIADDKIVEENLGKLKKALEVYEARSCRFRYLAGDFISLADLSHFPMTHYLLATPHASVLDAYPHVKSWINDLMKRPAVKRVRELMEA

SEQ ID NO: 176657 - protein, 410 aa, Oryza sativa
  unsure (1)..(410): unsure at all Xaa locations
  Clone ID: PAT_MRT4530_74386C.1.pep
MAAGEQPGTGSPPQPSTRLFLLVLAVILTDQVLAASAQGMSIGINYGQIADNLPSPTRVSGLLRSMQISKVKLYDADQNVLSAFLDTGVEFVVGIGNENVSAMVDPAAAQAWVQQHVRPYLPSARITCITVGNEVFKGNDTALKANLLPAMQSVYNAVVALGLQGQVNVTTAHSLDIMGSSYPPSAGAFRPDAVPYIQPLLNFLSMAGSPFLINCYPYFAYKADPGSVPLEYVLFQPNAGVTDPNTKLNYDNMLYAQIDSVYAAMQALGHTDVDVKISXETGWPSRGDPDEAGATPEYAGIYIGNLLRRIEMKQGTPLRPSSPIDVYVFALFNENLKPGPASERNYGLFYPDGTPVYDVGLRGYLPPMDESKSARKFCRESVKCPFYECANETSEIVHPPFASLIYKRPD

SEQ ID NO: 176658 - protein, 68 aa, Oryza sativa
  Clone ID: PAT_MRT4530_74387C.1.pep
MRLHSSDASRRRPHSLDGLRCRPAVEAARPAHAKLASTDRARSGPHGFVRWAMVANAELHFGENLNGF

SEQ ID NO: 176659 - protein, 64 aa, Oryza sativa
  Clone ID: PAT_MRT4530_74388C.1.pep
PRSISPPRPETRQSSHCCHEVGPLTQTLRCLWRGPVAHPNNQPPSQPQERRGPSGVPTADPHPL

SEQ ID NO: 176660 - protein, 260 aa, Oryza sativa
  Clone ID: PAT_MRT4530_74389C.1.pep
MPPRKRPPPPAKAPEAPPETKPKISPPAKPIAAAPPPPKAVLSDTVLAALSQHERPIYKLVFAGGDKGMSQTEIRIKTGMPTSTLTKHLRGLTSKGVLKVVNSVHKRAEKIYMDVRIDPSPEITGGTWYRNGQLDSDAVASARRRCLDQIDKLGVATAESIHEGISRECSNLAYSTEQVRDILRTMALDREVEEVRSTGAGEFGDLRAGRVCYRRGGPVQGGMMERIPCGVCPRIDECSPDGVISPSTCVYYKKWLQMDF

SEQ ID NO: 176661 - protein, 147 aa, Oryza sativa
  unsure (1)..(147): unsure at all Xaa locations
  Clone ID: PAT_MRT4530_7438C.1.pep
MVTDMAYLLSYGLWNIRIWVRYLRVLLRDKVNSWYKYTPPGRGPMASNHSANTTTIAYNSEDVKPTRREISSKPSRQGSRXSSYQRXPIPYVSGLRVSPVDNHNLSVCCPGLLRAGVLLEPSDDFGLELDIGPDLSVPAPSPSSSSL

SEQ ID NO: 176662 - protein, 225 aa, Oryza sativa
  Clone ID: PAT_MRT4530_74390C.1.pep
MAARHLRSGLPLLRAHLSQEGSRGFASQVAKPTGKDIKVPEALYGGTGNYASALFLTAAKANLLDKVETEIRDVVEASKKSPLFSQFIKDLSVPKETRVKAITEIFAEAGFSDVTKNFLAVLADNGRLKHIDRIAERFVDLTMAHKGEVKVLVRTVIPLPEKEEKELKETLQDILGKNKTILIEQKIDYSIMGGLVIQFGQKVFDMSIKTRAKQMEMFLRQPLDI

SEQ ID NO: 176663 - protein, 173 aa, Oryza sativa
  unsure (1)..(173): unsure at all Xaa locations
  Clone ID: PAT_MRT4530_74391C.1.pep
VGGQSFTXAEIEFVILKMKTPIHRRQLSLMLALHKFRVTEEHKKYSIDDAEPLVLFGLSCGMFSSPAVRIFSAGNVRQELQESMRDYIRASVGINDSGKLIVPKLLQSYAKGTVEDSLLADWICRHLTPNQVAAVQDTSSSRKQRLLGVRSFSVVPFDSKFRYLFLPDNSSSQ

SEQ ID NO: 176664 - protein, 575 aa, Oryza sativa
  Clone ID: PAT_MRT4530_74392C.1.pep
MAMAPPPPPTAFSRLRRLFSTAAATATAPTPESVLYSLRTLSKDPSVALAFFRRSQAGGHPLGSAAYNLMLRTLASHPTSAHSHFWPFLRDMNDAGHSIDQGTYLAALASFKKASLTADYASLTAHYAKAQEDAKGGTPTSAAADAVRALEDGSDSDASAELDEKLEGVDLPLTETAVARVLREVRDHPIKALAFFRWAGRQIGYKHGSVSYNAMVRVLGREESMREFWDLIQEMKADGIHVDIDTYVKLSRQFQKRHMLTEAVELYELMMDGPYKPSKQDGPVLIRRIALGPSPDLELVYRVVRKFEAVWEFKTKDVFDGIHRALTSNGRFDEAAEIVKRMKGEGHQPDNITYSQLIFGLCKANRFDEARKALDEMEAEGCVPDLKTWTMLIQGHCAAGEVEKALQYFTEMVEKNLEADAALLDVMVKGLCSDDKIDASYAFFVEMVDKANLSPWQGTYKHIIGELLRVKKLEEALGLLRSMKARKFPPFADPFPTHIAKYGTFDDARQFLKALTVNNKYPSPTAYLHVFKSFFTEGRYSEAQDLLYKCPFHIRKHPDVTELFESIKVESESAA

SEQ ID NO: 176665 - protein, 137 aa, Oryza sativa
  unsure (1)..(137): unsure at all Xaa locations
  Clone ID: PAT_MRT4530_74393C.1.pep
TTAPWNXSAHLVLPLYRPASLMSTPHFSTWHLXPPPPPTGATAGTARAPPRRRGHRGGGGAXRRASXQQXRTRRNRRRRRLPRAXATTSXCXCVLCASLLGXVXAVAGXGWRELEXARARAHEWXWXWKAEEEEEXE

SEQ ID NO: 176666 - protein, 78 aa, Oryza sativa
  Clone ID: PAT_MRT4530_74394C.1.pep
DFNICAFHWFGVTNGLFLSVSTVSYNVCTSCYDKLISNGILQSTGSSGRQIVNVKYLSRNIFFYFQCGFSNNVYICVD

SEQ ID NO: 176667 - protein, 315 aa, Oryza sativa
  Clone ID: PAT_MRT4530_74395C.1.pep
MGAASTPRHHLPLPKRIFAYALYALLPLAALHYLLLSPPPPPLATTSTSTTPPVAAVAVARKAAPRCDYSEGEWVRSASAPRYNGTSCGSTIKGGQNCMAHGRPDTGYLHWRWRPRGGGGCALPPFAPGEFLELRGEVLGCHHCPEPNRTETGFFGVFRLAVKNALREVITRAARSPSQQQKLAVVTTFSPAHFEGEWDARDACARSEPYAPGEKEVGYMDREMGRAEAEEVAAAAADARVRAPGRVEVEALEVTAMAALRGDGHPGPYMNAFPFAGGERARVPNDCVHWCLPGPIDTWNEILLQLVKRWRDSSK

SEQ ID NO: 176668 - protein, 103 aa, Oryza sativa
  Clone ID: PAT_MRT4530_74396C.1.pep
MARIGSWVAGDGWLRAVEAAQCRVTLGRRRRPNPRRRVEFLAWVRVDAPCGVNPDYVDAIARAYQSCPFACKRIHLMIITNISRSRFKTQHASRIPFTSGSGC

SEQ ID NO: 176669 - protein, 123 aa, Oryza sativa
  unsure (1)..(123): unsure at all Xaa locations
  Clone ID: PAT_MRT4530_74397C.1.pep
SDPARRPAGAXGRPNXXVLYVFNRGGVCLLLPXXGTGPLPQRSXPTQRTXKLXFPAFLFLPPVPFNRPXXXIXXXFLXAXFXXPPXXXKKFLWXSKPXXGFXEMXXTLTSXVPXLPXFXPPXX

SEQ ID NO: 176670 - protein, 445 aa, Oryza sativa
  Clone ID: PAT_MRT4530_74398C.1.pep
MGAASTPRHHLPLPKRIFAYALYALLPLAALHYLLLSPPPPPLATTSTSTTPPVAAVAVARKAAPRCDYSEGEWVRSASAPRYNGTSCGSTIKGGQNCMAHGRPDTGYLHWRWRPRGGGGCALPPFAPGEFLELVRGRHVAFVGDSLARNQCESLVCLLASGFPAELVRGGNGGDGGDGDEARKFRRWVFPSHNATVSVFWSPFLVNGTEKSSSSAAAAGAGGLDHNRLYLDQPDERWAGELDGIDVVVLSAGHWFLHPAMYYERGEVIGCHHCPEPNRTETGFFGVFRLAVKNALREVITRAARSPSQQQKLAVVTTFSPAHFEGEWDARDACARSEPYAPGEKEVGYMDREMGRAEAEEVAAAAADARVRAPGRVEVEALEVTAMAALRGDGHPGPYMNAFPFAGGERARVPNDCVHWCLPGPIDTWNEILLQLVKRWRDSSK

SEQ ID NO: 176671 - protein, 236 aa, Oryza sativa
  Clone ID: PAT_MRT4530_74399C.1.pep
MAQGTAPSAGGGAAVPTPSAAAAVSTTTTTPPGTPRATAASPQAGYYAVELYFDPALENQVLKAWNALARRQLSSRLIDAASRPHLPMLHLPAASLPDPLRLAPSLRALASRLDPLPLALSSLASPPSSPDAGVLFLAPTPSAALLGIHAQLCELLRKDAGVEVPDVFRPDHWVPRCAVAVDVPRGRMAEAFCVLRELKLLPVSGYGMDIALVEVGPVVRELVSYPLGGSGGAGAD

SEQ ID NO: 176672 - protein, 100 aa, Oryza sativa
  Clone ID: PAT_MRT4530_7439C.1.pep
NPPAPCPCPLRQAWGSLDALVGRLRAAFEENGGRPESNPFAVRAVRLYLREVREHQARARGVSYEKKKRKKPQPADTSGGGGHPHPPPPPPPPPSAGAAC

SEQ ID NO: 176673 - protein, 63 aa, Oryza sativa
  unsure (1)..(63): unsure at all Xaa locations
  Clone ID: PAT_MRT4530_743C.1.pep
GRTSLSRGHGRGRTPPPPPASASAXEPXRSSRPSSPPPTRRAPSPRAAPPPPSSPAPSSRQAS

SEQ ID NO: 176674 - protein, 237 aa, Oryza sativa
  Clone ID: PAT_MRT4530_74400C.1.pep
MEPGFGKRLMHVLRAVYHMLRRGLCRKRLMMDLHLLLGRGKLAGRALRDVLLAHQPHGGAAAVAVMGGGAGVARGGDSSSSPLSASFFHHNPRDVEFSCTTTPSYAPGVFPFRFRGRGGSRHAGGGASNYGGLDASAVARVFEMLNADAAAAAGAGGETPLSSMPGATPSPLLALSLGRSPAGTRQLRVTDSPFPVEPPEGAVDGRVDDKATDFIEWFRRQLLQQQASAAPTPDYRG

SEQ ID NO: 176675 - protein, 59 aa, Oryza sativa
  Clone ID: PAT_MRT4530_74401C.1.pep
WLSGDRAPVHRETPPIPGQSTFLGTRVRDPASESGRIGARFGFGGSKKAPGKKAASTAA

SEQ ID NO: 176676 - protein, 159 aa, Oryza sativa
  Clone ID: PAT_MRT4530_74402C.1.pep
INKHLIYKWIRGLATYTFTLTLDTTGTAQRSKVKTPRRLEPHNTRRPRVRIERRIELARSGQHVHVHGTGRSWRAALENSGRVEALRPELLVEHVDELLRPVVHVDQLPAAALPRAVLINLLVFFLLLLVRRLCRRRPAAAGGPERAEAGAAPARRFQP

SEQ ID NO: 176677 - protein, 115 aa, Oryza sativa
  unsure (1)..(115): unsure at all Xaa locations
  Clone ID: PAT_MRT4530_74403C.1.pep
TQPQLAFLWLVFKDRLNTEANMVSKKWNDDPHCPVCLALETADHIILRCKNTDNLWRKLGLLHLANKAETISDFIQAAIDRKXTQRVIPIXFAVCAYSLWKSRNNMIFDRQMDNL

SEQ ID NO: 176678 - protein, 201 aa, Oryza sativa
  unsure (1)..(201): unsure at all Xaa locations
  Clone ID: PAT_MRT4530_74404C.1.pep
MAAPPSPTTAATEVSIHRCSGEFAFVAMLEFDGMMMIRSGEQSAAATKAEKQQQRPAAHRVAEAGGVVMALAKTDSKYQHHTGHGGHGQAADHHGPSSSSKAATAAAQKIELPRIYTTLSRKEKEEDFMAMKGTKLPQRPKKRPKLVEKQVNFVCPGMWLSDVTRSKYIVREKKSTKKLYSPXQQKYRGLKGMESMDSDSE

SEQ ID NO: 176679 - protein, 75 aa, Oryza sativa
  Clone ID: PAT_MRT4530_74405C.1.pep
KGVCHGPLGVCHKLYFQKNKKTLAHSFFTAVHVFDSIELSRTSPKCCMRGRTSTVTALLISYILIFHLMSFQASE

SEQ ID NO: 176680 - protein, 85 aa, Oryza sativa
  Clone ID: PAT_MRT4530_74406C.1.pep
DQDVVCEAAEEAAKAAEEEAARKAAEQAAAAEAKKAADDSATSQQIVEAEALAKVSTEDLSSLASPPQTPLGGDTPSGPPSSYVA

SEQ ID NO: 176681 - protein, 122 aa, Oryza sativa
  unsure (1)..(122): unsure at all Xaa locations
  Clone ID: PAT_MRT4530_74407C.1.pep
MADYLXGPGRNHXFXPGPXNIPDXXIRAISRXNEDYRSPAVPXLTXXLLEDVDQXFHTXTGPXFXFXTPGXGAWESXXIXTXSPGDKIXSXLVGXXXXLWIDXXXRLXFHXXLVENXXGSGX

SEQ ID NO: 176682 - protein, 127 aa, Oryza sativa
  Clone ID: PAT_MRT4530_74408C.1.pep
MVSWRVAPAGGLLLILLVAQQASAQAAEKVISVSAVVQPNTKKKPPHQQPKIRKCTEAQKQDILHECRGYVTAGSHIILPDLHSACCDAARSVQNLDMDCIVDLLTSEERSRYNANRIKHLNEMCRP

SEQ ID NO: 176683 - protein, 151 aa, Oryza sativa
  Clone ID: PAT_MRT4530_74409C.1.pep
MAWAGAAPWLGRRCAVMREVVPELEAGAALGRRCARKDGRAQQRDHTRSAAAPGRLQEVGSDGAGAGAARLKPSLRAFFSCGIFSAYTHLALSLTVTPNNNVACHQAGCGGGVVAGCGGGSTGGGGGVVASCGGGGGGDRGCSSGRRRLLR

SEQ ID NO: 176684 - protein, 578 aa, Oryza sativa
  Clone ID: PAT_MRT4530_7440C.1.pep
MTYIPVRDGLSVTGVSSVTELERLARLEEEGEFLVVREEVGVVTGGARAEADIMLSSCAPTAVPPQDASGAATEPFRSLQIATASAGSAKKKRRPAGTPDPDAEVVSLSPRTLLESDRYVCEICNQGFQRDQNLQMHRRRHKVPWKLLKREAGEAARKRVFVCPEPTCLHHDPSHALGDLVGIKKHFRRKHSGHRQWACARCSKAYAVHSDYKAHLKTCGTRGHTCDCGRVFSRVESFIEHQDACNAGRPRAAEASSSPGRGGGVVVGAPAAASSSQQQQLFAVPASLSRTASSASPSSDLVVSPVAWPATGGGGPAMVSPRAAAPAPAGGSIAAFHHRFTDPALSPPTPCGGRRGGCHTTHSLELQLMPPRTTTTCAGGSLGGTPVATAVGYYASSSPHSPAAALPSRQPVADAMRLQLSIGFGGARDDGNNNSSSSSGEVSASATRLKEAAHEQLRLAMAEKAAADEARAQAKRQAELADQELATARRMRYQAQVELSRAHVLRDHAIRQVDATQLQITCYSCSHKFRARAAAMSSDVARSYVSSVVTEGGDADDPLDVVDATRRRLQHANSMGIM

SEQ ID NO: 176685 - protein, 64 aa, Oryza sativa
  Clone ID: PAT_MRT4530_74410C.1.pep
MATLGNGETACVEVRGWVHGDRRKVGVDHLCVEVLATTLLFSCLVVGDGMASVSLATAQMRDHL

SEQ ID NO: 176686 - protein, 116 aa, Oryza sativa
  Clone ID: PAT_MRT4530_74411C.1.pep
MPPASSVASAVEKLQAAAQDAANSSSRSAAAFSEQAHQVLVPRAAGSIARARLKVECIDMLQGVCICIALVSYKMQPEEAMSCCLSINLYEDQRRQLCSRCCGGLHIEEKTTPVGC

SEQ ID NO: 176687 - protein, 44 aa, Oryza sativa
  Clone ID: PAT_MRT4530_74412C.1.pep
SYMVHVIMFTYRLQNSLQFCTIHHPTIARELTLRWLLTIDHGCA

SEQ ID NO: 176688 - protein, 77 aa, Oryza sativa
  Clone ID: PAT_MRT4530_74413C.1.pep
CPCTPQFYFGVKKAPLNFESKFWGNKNLKIPPSWGPLGGVFFPWVFGSSPNPPFGIFFTQTKFGGVIFSPAGNFLAP

SEQ ID NO: 176689 - protein, 81 aa, Oryza sativa
  Clone ID: PAT_MRT4530_74414C.1.pep
PMELNSLFFQQNTVNKSYNWDNDNVGPPTQAATKTANPTPTATPNNPTPAGFPPFFPCVKSPAAPAPVPATPGLMLAPFGG

SEQ ID NO: 176690 - protein, 222 aa, Oryza sativa
  Clone ID: PAT_MRT4530_74415C.1.pep
MAAGLQVFGQPASTDVARVLTCLFEKDLEFELVCIDTFKREHKLPEFIKLRDPNGQVTFKHGDKTIVDSRAICRYVCTQFPEGNKTLYGTGSLERASIEQWLQAEAQNFSPPSSALVFHLAFAPHLNIPQDHAVIAENEKKLQQVLNVYDEILSKNEYLAGDEFTLADLSHLPNSHYIVSSERGRKLFTGRKNVARWYDQISKRETWKQVVKMQREHPGAFE

SEQ ID NO: 176691 - protein, 80 aa, Oryza sativa
  Clone ID: PAT_MRT4530_74416C.1.pep
MAATSTMVAENLVKEERRTGEAVAANLSVTTGTPLLVSLLPQFSPSEASSSQEQEASITTDDDHHQAASIISTASAPAHH

SEQ ID NO: 176692 - protein, 66 aa, Oryza sativa
  Clone ID: PAT_MRT4530_74417C.1.pep
MGLAEFTRELSTVQWRRPLAGTTVEEDQARGGCDLRWEDAAHCSGRICAAMLVDWLIVRMMARRRG

SEQ ID NO: 176693 - protein, 785 aa, Oryza sativa
  Clone ID: PAT_MRT4530_74418C.1.pep
MSSSSRRPARRAALTARSSYDESLVDAELESYLGNARSRRISRLRRLSADERQRETETEALIALSLGFPIDELLPAERPLLPAPVAAAPNDYIVVRNHILASWRADPRVPLPRSRVQETVAASYDNLVAVAHGFLAREGHINFGVSAAFPASPPPDAPQRLAASVLVVGAGLAGLAAARQLLRFGLRVLVLEGRARPGGRVYTTHLGGDQAAVELGGSVITGIHTNPLGVLARQLGIPLHKVRDSCPLYHHDGRTVDMKLDRSMDLVFNTLLEHATRLREYLKKAAEGISLGEGIERLRRFYKVAKSVEEREVLDWHLANLEFSNAGCLSELSLAHWDQDDQYEMGGDHCFLAGGNARLVHALCDGVPVLYEKTVKRIEHGEDGVSITVEGGQVFKADMALCTAPLGVLKSRSIIFEPELPERKLEAIQRLGFGLLNKVAMVFPHVFWDEEIDTFGCLNKERSKRGEFFLFYSYHTVSGGAVLIALVAGEAALEFEKVDPAVALHRVLGILKGIYGPKGVTVPDPIQSCCTRWGSDPLCSGSYSHIRVGSSGTDYDILAESVNDRLFFAGEATNRAYPATMHGALLSGLREASKILHASESRLNSDYKKYALQKSIRLINNVLDDLFMEPDLECGRFSFVFSYITPEEEQAPGLARITLEKPLLLPSKKRKVKGNQKDQDPVAEKIDQEVFYLYATVSQEQATELLECDNDKSRIAVLCKDLGVKLMGYDSTYDVLLDSFREATIVFIFPLFFLDVVPILVSGSLCVAEMVDKLTSGPVCLASLN

SEQ ID NO: 176694 - protein, 425 aa, Oryza sativa
  Clone ID: PAT_MRT4530_74419C.1.pep
MTVRLGAATCVVASSPATARAVLQTHNASLAGRGRQDAWHAGGHAENSVFVLPPGRKWRLLRKLGAAHLFSRRKLAELAPLRDEIVGGLLRRVAERADHRGGAPVNVGRLALAANVELLWRSVFSTRLDAATLDVLCDVAREAAVLLGTPNVSDFFPAVAALDLQGLRRRLAELMKNTYRLVDAQIDHRMRCRELRGGRGGEAMDLLDVLLDMSEQEREDGDDEVINRDLMRALLTDLFVGGSDSTATTVEWAMAELLQNPEIMKTLQQEIKMVLGTRSQVEESDIGQLPYLQAIVKETLRLHPIVPLRLYEAERTVEIEGHTIPKGSKVIVNAWAIHQSVKVWIQPEKFLPKRFITKDIDFAGRHICIGLPLANRMLHMILGSLMHQFKWTMPQMVNRNGLDMAEKFGLAVSMATRPNIIARKM

SEQ ID NO: 176695 - protein, 504 aa, Oryza sativa
  Clone ID: PAT_MRT4530_7441C.1.pep
MLGSCAPTTAGPPPDEATTPEPFRSLQIATASAGSAKKKRRPAGTPDPDAEVVSLSPRTLLESDRYVCEICNQGFQRDQNLQMHRRRHKVPWKLLKREAGEAARKRVFVCPEPTCLHHDPSHALGDLVGIKKHFRRKHSGHRQWACARCSKAYAVHSDYKAHLKTCGTRGHSCDCGRVFSRVESFIEHQDTCNASRGQAAAVAEGGNVSTAACGGVAVLEQEKQLDLQAPAAASLSRTASSTSPSSDVVASPVAWPGAGAPSMPSPKAAAFRGRFDMAPSPPPPSYDHYRGGAGAHNLELQLMPPFNAGGAAAAPGGMGACFYAAAHQHHPTGVSQCNDASTQLQLSIGRDEVMGAAGTSDEASAAATAKEQAREQLRQAMAEKEAAGEARAQARRQVELAEQELATARRMRHQAQVELSRAHALRDHAVRQVNATLLQITCFSCRHKFRAAAAGAPLPAAMSSDVACSYVSSVVTEGGDADDPLDVVDATRRRLQHANSMGIM

SEQ ID NO: 176696 - protein, 113 aa, Oryza sativa
  Clone ID: PAT_MRT4530_74420C.1.pep
VGARILSVKLVDKTDLWDTPEPGTRPDPPTEDAEDMVFNVAWLIGGTPLVNVGELLMDVSQDLAMFLEQFKPAKVKLLNTSMIIVYGPCLILYCSKKTFFFLVSISSCFSLFF

SEQ ID NO: 176697 - protein, 313 aa, Oryza sativa
  Clone ID: PAT_MRT4530_74421C.1.pep
MASTTTTTAAAAARFTCLAPATRPASASASAGRFLLPARQWGAATTHGSAAVPVVAAPSRRLAPRVADATPATGNGGRFLPPAQHWGAATAHGSSAAVPVPVVAAAPSRRWAPGVSYATAATGKSVHDFTVKDIDGKDVALSKFKGRALLIVNVASQCGLTTANYTELSHLYEKYKTQGFEILAFPCNQFGAQEPGSNPQIKQFACTRFKAEFPIFDKVDVNGPNTAPIYKFLKSSAGGFLGDLVKWNFEKFLVDKTGKVVERYPPTTSPFQIECWGALRYTYLHQSPDGLRLPMEFAWALLAICFNIVPELS

SEQ ID NO: 176698 - protein, 227 aa, Oryza sativa
  Clone ID: PAT_MRT4530_74422C.1.pep
MSSRLASRAARLAAVAASRAARLAAASASRTGAGDPSARATATAASRAARLAAAAASHAGGPTARAIAAAVSRAARSISSKLLDDDIAARLSFRYSTEPPDDGKCVTAKDLESDQAVWALYERWCKSYNKKRDHAEMIRRFDIFKLKASLVHSWNNYVHEDKEELARAKKRRDLGKPVDPWYLQEELGPSADGGDTVNQYWRGMLKENDQGMDLPDIQGGKKMSTED

SEQ ID NO: 176699 - protein, 100 aa, Oryza sativa
  Clone ID: PAT_MRT4530_74423C.1.pep
AFPCNQFGAQEPGSNPQIKQFACTRFKAEFPIFDKVDVNGPNTAPIYKFLKSSAGGFLGDLVKWNFEKFLVDKTGKVVERYPPTTSPFQIEKDIQKLLAA

SEQ ID NO: 176700 - protein, 159 aa, Oryza sativa
  unsure (1)..(159): unsure at all Xaa locations
  Clone ID: PAT_MRT4530_74424C.1.pep
FYMSISFVCKSICCKDLLWHAKGPIKCKFFLWFAFQRRCWTADLLLKLGLDSHSAYPFCAQELETANHILLDCMFARQVWLRVLSPLGWTTLSPSRGSCLXDWWPSSRAFLPGHLHAGFDSMVLLVSXQLWKERNSRVFDFALSSVSGVLESILYEGHL

SEQ ID NO: 176701 - protein, 88 aa, Oryza sativa
  unsure (1)..(88): unsure at all Xaa locations
  Clone ID: PAT_MRT4530_74425C.1.pep
GGGFPPQKHQXGFQGSTPVGVKARPPAPGNVKWXGAQQPGGRKGGRMGLGLGLGLPGGPVEGLIPGEMVGSMEASPPPXAGFHDAPEF

SEQ ID NO: 176702 - protein, 235 aa, Oryza sativa
  Clone ID: PAT_MRT4530_74426C.1.pep
FHYDGRTTEWDEFEWSKRAIHVSVRKQTKWWYAKRFLHPDVVARYDYIFIWDEDLGVEHFNAEKYIELVRKHGLDISQPGLQPDKGLTWQMTKRRGDQEVHKVTEERPGWCTDPHLPPCAAFVEIMATVFSRDAWRCVWHMIQNDLVHGWGLDFALRKCVEPAHEKIGVVDAQWIVHQAVPSLGNQGNAENGKAPWEGVRARCRKEWEIFQTRLADAEKAYYLSQGITPPNSTLV

SEQ ID NO: 176703 - protein, 133 aa, Oryza sativa
  unsure (1)..(133): unsure at all Xaa locations
  Clone ID: PAT_MRT4530_74427C.1.pep
ARGLVPNSARGKANNYPFIDGXSYTIXDXENVLQEIAAEILDDPSPKRLFLVRGKLQKLLVEFVPPKLILQKLAELFLKGIQSSIKREVYYWHAYYDKRLPVGASALLKLEEFVAKFMSIHRKTLPVRSTRPV

SEQ ID NO: 176704 - protein, 96 aa, Oryza sativa
  unsure (1)..(96): unsure at all Xaa locations
  Clone ID: PAT_MRT4530_74428C.1.pep
MACTKQTNGKFTGGWDPRTHLVTQADRKSDPTTGGVKKPRPCKPRTVALTEMRRXRRVTDLLMRRIXVQRIIRQNGHDXKTELGHQRHAAIALREE

SEQ ID NO: 176705 - protein, 425 aa, Oryza sativa
  Clone ID: PAT_MRT4530_74429C.1.pep
MAKPANSIGRSTPRSNEGMRLIFSAVVGVMLGYLFGVSFPTVNITKLHFPSSIISYIEDRNSGITTQTLLNHAWASANRHNKNNSDSTSEEVPKIYVPTNPKGAERLPPGIVVSETDLFPRRLWGDPSEDLSSEPRYLVTFTVGITQKANIDAAVKKFSDKFTIMLFHYDGRTTEWDEFEWSKRAIHVSVRKQTKWWYAKRFLHPDVVARYDYIFIWDEDLGVEHFNAEKYIELVRKHGLDISQPGLQPDKGLTWQMTKRRGDQEVHKVTEERPGWCTDPHLPPCAAFVEIMATVFSRDAWRCVWHMIQVEWHYMFNFNIVYNSGILTHCLLQNDLVHGWGLDFALRKCVEPAHEKIGVVDAQWIVHQAVPSLGNQGNAENGKAPWEGVRARCRKEWEIFQTRLADAEKAYYLSQGITPPNSTLV

SEQ ID NO: 176706 - protein, 105 aa, Oryza sativa
  Clone ID: PAT_MRT4530_7442C.1.pep
LDCSRGLAGGSGPPPLRWTPSSVEWRAGDNGDGVLGMSGLALLAMLVSHTEAIGLARQPQPVNDRCIYCSWLTPSEMASYMNCRWIYLLTQTWSSDTYYCSDCVL

SEQ ID NO: 176707 - protein, 122 aa, Oryza sativa
  unsure (1)..(122): unsure at all Xaa locations
  Clone ID: PAT_MRT4530_74430C.1.pep
SLFSSGRGRGRPQRRHSGSGGDGGRGGGVDPEVLRSLPVTVYSCSMAAPAAKEEEDDGVKYAVCLAELEEDDEARFLPWCXHGFHAECXDMWLGSHSTCSLCRLTVVVSSPPLLPPVPPALP

SEQ ID NO: 176708 - protein, 277 aa, Oryza sativa
  Clone ID: PAT_MRT4530_74431C.1.pep
MALPTTSPLAAAAARPCAFPTPWRCRSPPLRRLPHVSCQANRGGSRDGNSLSTSAAAAAAASPPPRWRAAVSAALAAAIVSAAPAYADLNKFEAEQRGEFGIGSAAQFGSADLKKAVHVNENFRRANFTAADMRESNFSGSTFNGAYLEKAVAYRANFTGADLSDSLMDRMVLNEANLTNAVLVRSVLTRSDLGGAIIEGADFSDAVIDLTQKQALCKYANGTNPLTGVSTRKSLGCGNSRRNAYGSPSSPLLSAPPPKLLDRDGFCDEATGMCDAK

SEQ ID NO: 176709 - protein, 38 aa, Oryza sativa
  Clone ID: PAT_MRT4530_74432C.1.pep
AKKLEQSKPSFAPKPKVWIEKPKTPAPLPPETGGKSAH

SEQ ID NO: 176710 - protein, 55 aa, Oryza sativa
  Clone ID: PAT_MRT4530_74433C.1.pep
LFRDVLLLLWLRPFSPWGRTCRVLAPCISNRSEYGRRMNIHLLLKKDDRLRSRST

SEQ ID NO: 176711 - protein, 50 aa, Oryza sativa
  Clone ID: PAT_MRT4530_74434C.1.pep
GFYFIEFAMFCRKSLTSMWVIQGVYFYFRGSGKKPEIKPELAPRQTRGGF

SEQ ID NO: 176712 - protein, 116 aa, Oryza sativa
  Clone ID: PAT_MRT4530_74435C.1.pep
VINESEVLKENHSKKLIQAKATIDELSSRISIVEAKMKNDASAYNKENTKLRMQIRWMQPELDAHRGRLKEAINEMKLMDTKYLEASTKLKKDLSFYCREVLRLKEQLKESQVKAS

SEQ ID NO: 176713 - protein, 957 aa, Oryza sativa
  Clone ID: PAT_MRT4530_74436C.1.pep
MAAVIPKLSKLLMEEYGLQNSVKEGITFLNSELESMQAEVDKISKVPLDQLDSQIKIWARDVRELSYDIEDNVDTFMLCVDDLEARKKHDFTWLIDKYCKSLSELKIHHKIANDIKHDIIPVKEVVERHDRYNADDVDSKLPTIIDPRILKLYDNVTKPVGVDKASGDLIKKLSMETDQSSQKLKMISVVGFGGLGKTTLAKEVFGMLRVQFSYACFVSVGRKPDIKKVLKSILIEVNKQKHMSDLAKLSERHLIDEIREYLENRRYLVVLDDIWEISTWDIIKCAIVDSNCGSRVIATTRISQVAEEVGDIYNMEPLSDDNSKRLFNRRIFGADCIGTTNNQSIEAMEKVLKKCGGVPLSIITIASLLVDKPLEDWSNVFDSIGFRLEDNDGFQNTRKILSFSFYDMPSYLKNCLLHLRIFPEDCLIEKESLIWKWIAEGFVHVEQGKGLFEVGERYFTELINKSMIQPMDFNNYEGTLDGCRIHDMVLDLIRIISTEENSTTVLDRMHEEHNTSLVSRNVRRLALHISWNQDIDNNLPVDMARLRSFNAFECPTSMMPPLLDFHALRVLALEDCDITGGYFLKHLGNLRQLRYLGMRNTGKVELPQEIGNLRHLQTLDVRDSFLDALPVTVYELSKLLCLCMDSFTEVPAGLGNLKSLQELRVYVSDDSCPNFAAELLKLTDLKILHINWYWEVDEVSLKDLVESLRSLRGIEDLDFFSCSDAEMSGWEGWEPPRQLRRFSIDSVRVTLPRLPSWVNSTCVPHLSHLDLRVKAMEMQDLEALARISELRFLSVNVEAGFSWTVPGGGLFPNLRRCHTDIALTFLHGAMPMLMEIELCVVASGGGATSYDVGLGNLLLLKTVEVWIACEGATASQWLIKEDKEDGDDEDISATDQELCDEGGKEDTAFRLIGENKHTLAPARGGAPARQQGGGAPFSGEPFSGPASRMGAPSQLAR

SEQ ID NO: 176714 - protein, 1382 aa, Oryza sativa
  Clone ID: PAT_MRT4530_74437C.1.pep
MERIHVAVRARPLTAEDAGSSPWRVSGNAIALSTQPSIRFEFDRIFGEECRTADVYGARTKHIVDSAVRGFNGTVFAYGQTNSGKTYTMRGSGNEPGIIPLAVHDLFRTIEEHLDREFLLRMSYMEIYNEEINDLLVPEHRKLQIHESIERGIYVAGLREEIVTCPEQVLEFMSFGESHRHIGETNMNVYSSRSHTIFRMVIESREKVDESEAGESCDAVRVSVLNLVDLAGSERAAKTGAEGVRLKEGSHINKSLMTLGTVIKKLSEGIEGQGGHVPYRDSKLTRILQPALGGNANTAIICNITLAQVHADETKSSLQFASRALRVTNCACVNEILTDAALLKRQRKEIEELRAKLRSELEKERISLELEEEKKAKEQRDKRLIEQAKKIENLSSLVLNSERDDRTTVSSKNKRRLTWCPGLLSRQFDGQVLESVQEDPPSSTVRHGRNMEMPLHFEELIQESCESSIKHYTDAYSSGSLSCEDDSLPDSHALLHVTSRRKPNTMKKSDQEQLMGLASERIIPQELNDWKYTTQSQENIKACVNGLSARESEAILVIKQLEDQIKLLELEKSSFQNNLDDVLELATQQKASFHEKYEELQQNALVAQEQAKIANEKLSKQEAAYEFLTGIFVETESIAVQMDQSTRSVDNALSFIEELFQNLFMMAKNFTVSIDNYQPFCSIIYIDLVLWTGYGKGPKIGDRTLTLAPAGLLLAELKEVEAKQFVCGDITQFSSVIRDYENISNCLREKLSKLEMEKKILDEQSLDQKDELQRLKSSLESCEKAMEDCNIQNELEKDSILSELLTLQKEVVYLSSSSLMKEKESIRKELDRTKTKLKETENKLKNSIQEKIKLESEKAEAQREIKKLQSQRTLLERDLRKRDSFTVDKRHEQSVKSKELAGIYDQAVQIQEDYGKLEMHAFDMEAEIASLQEALVTTIAEKEEALSRVELLTSAVEDLESRLNSAESETSSLLEETAVLTRKLDASESISKKLEASISSLSREKEDMGIELTDVLLEMESERSTWTAKEKAYLEAKQKLNICNKNNCKLSEDLIKVQIQRISGGFRASPWHERLELRRRPTAVVKAARGTVGSGPSRSRFGCVLVGVGRGRTPRGGGVDGWVACVAPMSSAAQWSSAGPGEVAEQVLRCAGGIWWHLVASVADTMFGWDSEVKALLGLPMLATATPSGIVHLVEGVAIGALVQLHIKGFLRETFEESERLLKKERNIDTGVNENELHQQLLSITEERDKLLSEIKYMNSVINESELIQAKATIDELSSRISIVEAKMKNSYWLPLSNLGIDECFDASAYNKENTKLRMQIRWMQPELDAHRGRLKEAINEMKLMDTKYLEASTKLKKDLSFYCREVLRLKEQLKESQVKAS

SEQ ID NO: 176715 - protein, 48 aa, Oryza sativa
  Clone ID: PAT_MRT4530_74438C.1.pep
MAGGPTARPKHGTRYNHGGSTQFSWEDKAIGHIVRPLSSKHLGGSWYL

SEQ ID NO: 176716 - protein, 158 aa, Oryza sativa
  unsure (1)..(158): unsure at all Xaa locations
  Clone ID: PAT_MRT4530_74439C.1.pep
NQDLFSYNSALSCASSHTHTHTPHAFKQPWCCTDHPRRRFXEAIMATKMFRAAAVVVVSCRRCHCTSARGCFWHARWAQRRARQSRQHAQPVSSFGRRQPFSAQAQWQXPLRQPALLSWLRSSQRARVHEAGSMHDSVLLCLITRLVCLLYPLVLTCT

SEQ ID NO: 176717 - protein, 45 aa, Oryza sativa
  Clone ID: PAT_MRT4530_7443C.1.pep
IPLCPGRMPCIQSCFSLAFLEQISSARNLQLLLNMSISMVYVASG

SEQ ID NO: 176718 - protein, 109 aa, Oryza sativa
  unsure (1)..(109): unsure at all Xaa locations
  Clone ID: PAT_MRT4530_74440C.1.pep
LVMLCKTLIGSNCLCVCSHHLSFLQHFDLEYFVVICRDVDVEDVQQHGXPELPVIIPVLAFEPHLKSALADQDRRIXYWRTKFEVAKLERTMLEVRKDQAMETLRGREV

SEQ ID NO: 176719 - protein, 321 aa, Oryza sativa
  Clone ID: PAT_MRT4530_74441C.1.pep
MDRQWRCLAAAASTSGNSKLPPLPMALGGAVEYGQLVHGAAAPVAPFFVDAEQQSLSPATAMVLGAGWYNYNLVTPSQAAQLHHRLRRAVGAAPCSMKRCGGMAAAAAGRLALVGPAPVQAKLYRGVRQRHWGKWVAEIRLPRNRTRLWLGTYDTAEDAALAYDGAAFRLRGDAARLNFPELRRGGRHHAPALSASVDAKILQATTTTTADTAAAAAPASTNTTPPPSPRVVKTEPGCCSVSEASTTTTADAADVSSTGSSPSPTSSNQAATATPPAPRPPPPLPETIQQLDFTEAPWDEADGFALRRYPSWEIDWDAILS

SEQ ID NO: 176720 - protein, 576 aa, Oryza sativa
  Clone ID: PAT_MRT4530_74442C.1.pep
MLRTPDLGDPPVAEITHPFHPHKLRLADNVTDGHWPFRCGGCKELAAGRRRYRCEPCDLTLYTCCATAPLTLEHPLLPGRHFRLLERPPPPPPWLAADDRGGGGWRPACDACGDLLRGDGFAYHCADGHGLVGLNLHPRCARLRLPVAAARGAAAVKLCRRAAPRRRCGVCMSGEDGYRHGFWTCRFRRSGGDELVDVHLSCLKELMSHSHETLTNLYEILMEDGTPTNDCGEGASAQDNSSYSGESNGDAEEFENQNGTNNGMVPEMKTITHPSHPEHKLRMVTTTGEAPFKCDACKEPGDGPRYHCLTCEDLNMHKFCAHAPSTLYHHLFGRTFELLAKPPQGRPEKPHPAATGGGRGESGGRWCDTCGDHVFGLVYHCSGANLDLHPCCASLQELPVQNRETLDQPKESLATPQKLVKEGLAKITIDGVAFDIAAFSKCSLCSRQEEEGPDHCCRRLRRQEQWCYYNSDVVDGGGEAVSLHVSCIKQIARRRWQAARDMKCGGQIMLAISEEMIGEGGPLHGIPSERDRNIVGAVVRVIIAVIFGDRTAMEGDISSWVALGLPWLTNLFTVQR

SEQ ID NO: 176721 - protein, 65 aa, Oryza sativa
  Clone ID: PAT_MRT4530_74443C.1.pep
MPLDVSSPILAVWLEGVASIARLKDVLHLNLELPPGDTVEAASAPLCAAFARTILQDFSLLHEAR

SEQ ID NO: 176722 - protein, 37 aa, Oryza sativa
  Clone ID: PAT_MRT4530_74444C.1.pep
CCKRIGRFLCMNHTLLNTFTGHSNAGNLCSVDKKTCC

SEQ ID NO: 176723 - protein, 130 aa, Oryza sativa
  Clone ID: PAT_MRT4530_74445C.1.pep
TGTSRRGRGRGTASMKQTTLNFSQSRSSAAIRSEEVQSSSDEENETNEANEVVESSEPEESPQQTGRKRAAPRGGRGRGRGATAKRGRKADISSIQSMLMSKDDDDDDEDDRPKKPPPRVTRNYGAVRRR

SEQ ID NO: 176724 - protein, 382 aa, Oryza sativa
  Clone ID: PAT_MRT4530_74446C.1.pep
VLRANPVQLYKQDSEGLYPIHVAASSGANLTVKSFIRERPEIAGLRDSKGRTFLHVAVERERWNVVVYACHTQSLARILNMQDNDGNTALHIAVKHGNKAIFCSLLMNKEVNLNISNNKGQTALDISQSKILAGYFYGWNPNKLILRALTFCNARGGCRRVDHLQEQYIIHQKQVDEVRESDKMTNSTQTLGIASVLIVTVTFGVMFAIPGGDKADDHNNGGTPTLAGSYIFDAFIMANTIAFICSSLAIINLMYSGMPMVSLPLRRRHFNISLLLAFSSVTSLGTAFALGMYLVLAPVTRCTAIAICAMMMIASLCLYTEPLNGVRFAIALYVRRGNRVLLVIAQILLIRTLIIYLFCIAAFTMLMQWQLLNASRHNKFYL

SEQ ID NO: 176725 - protein, 362 aa, Oryza sativa
  Clone ID: PAT_MRT4530_74447C.1.pep
MANAKLPKQALLPPRSPFPTAAAAAGPYAGDHGPIARPQGAPHHRHGHGHGHHQRTSSESFIEEQPSWLDDLLNEPETPVRQHGRAGHRRSSSDSFAMFDGGAAAGAYANGFEGMGGGGGGGQAAPWGGVQEYYAKPSSFGRHQGRPWEQGMNNLVNYRQSGGPPMPAKEKVGGHHGSPSVLRDHDHGMDRRSSDESGHDQKVGPERKEGVPPKHAQSEADTKRAKQQYAQRSRVRKLQYIAELERKVQALQSEGIDVSAEMEFLSQQNIMLDLENKALKQRLESLAQEQLIKRFQQEMFEREIGRLRSLYQQQQQQQKQPQPTTTLSRSNSRDLDSQFANLSLKHKDPNSGPLRTQSSSIL

SEQ ID NO: 176726 - protein, 163 aa, Oryza sativa
  unsure (1)..(163): unsure at all Xaa locations
  Clone ID: PAT_MRT4530_74448C.1.pep
RALLCFYKPSSSSSDISSTAKIRSEVLSPFRSLRMFFYLAFIASAGLGGLIATTQLIGALANPSRAADVPEILKGLGIDFGAVAIFAFLYSGDNKAKNKQIARLAREETLANLKVRINERKTIPISSLRGIARLVILFGPASFIAESXKLSEPFTEMLLERGV

SEQ ID NO: 176727 - protein, 114 aa, Oryza sativa
  unsure (1)..(114): unsure at all Xaa locations
  Clone ID: PAT_MRT4530_74449C.1.pep
FVYSSNEIGAVVVDAAKVSGLXNTPRTCLIALLELKHSTWNAETATTTSXLYHLIXLNGKTVTXIVNKCNPLEAKLSLTQVKEDEPAIEEKNINSXYGGALQKKDASRSHMKHG

SEQ ID NO: 176728 - protein, 106 aa, Oryza sativa
  Clone ID: PAT_MRT4530_7444C.1.pep
NEGDHSDQAHGLLLDVDDAVAAAAERERQGAHLAAVQLQRLVPPPPAAAVSLGVDSRHPGADAPPPNVSVHQLYDDQDRRRLAADGLHPQRQGGDGQARCPTTSRC

SEQ ID NO: 176729 - protein, 48 aa, Oryza sativa
  Clone ID: PAT_MRT4530_74450C.1.pep
MKKNALSNLDRYDLVTCMICPRWFGKVINVVVDEDGIAWDKFLQLELI

SEQ ID NO: 176730 - protein, 54 aa, Oryza sativa
  Clone ID: PAT_MRT4530_74451C.1.pep
MAVASVALKRERRKRRSSTSTLDYERRWQPASSHCEREQRRRWAKPLASWNKGR

SEQ ID NO: 176731 - protein, 69 aa, Oryza sativa
  Clone ID: PAT_MRT4530_74452C.1.pep
PASTQFCPPYGCLWGPHPWGPCSRVKPCLGPEARIPSKAGMLENLPPEIFFEISSRSRIFILENGRAVL

SEQ ID NO: 176732 - protein, 49 aa, Oryza sativa
  Clone ID: PAT_MRT4530_74453C.1.pep
HIIAAKHIQSRIEFTSLLLVTRREMGEKKIQYHDRYARKAVIAITARVG

SEQ ID NO: 176733 - protein, 985 aa, Oryza sativa
  unsure (1)..(985): unsure at all Xaa locations
  Clone ID: PAT_MRT4530_74454C.1.pep
MAAHTVTDPLEELWNHTMSMDKTHLMCFYPSKITMGGVWTGDNPLDFSIPLLLFQILLITSTTRAATLLPRLPTYISQILAGFLLGPSVLGHLPHFSNLVFPVRSLFVLESMALLGLVYYTFIVGVEIEVSAITRAGIRSFGFAIGCTLPPFLVGALTGYVALSTDDKHKGDTFLNKLSFPIFLGSTFSSTAFAVLARNIAELKLAGTDVGQLTLSASLINDTFAWTGLTVATVLGHSRCTITQTTWTLTSGVVIFGASYLLLRPMLLRLARRAAEGEAVGEDRECWILIGVMVAALVADAGGTHAIFGAFVFGLAVPNGPVGVALVEKVEDFVRPPHRHKITNMHSAVLLMVAAMVAAVLKVVAAIGVADHQEQHHLAAALVRKRPASDMDLPPPRRHVTGDLSDVTAAAAGAPTLSASAQLPALPTQLPAFHHTDMDLAAPAPPAPQQQVAAGEGGPPSTAWVDGIIRDIIASSGAAVSVAQLIHNVREIIRPCNPDLASILELRLRSLLNSDPAXPPPPPPSHPALLPPDATAPPPPPTSVAALPPPPPAQPDKRRREPQCQEQEPNQPQSPKPPTAEETAAAAAAAAAAAAAAAKERKEEQRRKQRDEEGLHLLTLLLQCAESVNADNLDEAHRALLEIAELATPFGTSTQRVAAYFAEAMSARLVSSCLGLYAPLPSPSPAGARVHGRVAAAFQVFNGISPFVKFSHFTANQAIQEAFEREERVHIIDLDIMQGLQWPGLFHILASRPGGPPRVRLTGLGASMEALEATGKRLSDFADTLGLPFEFCPVADKAGNLDPEKLGVTRREAVAVHWLRHSLYDVTGSDSNTLWLIQRLAPKVVTMVEQDLSHSGSFLARFVEAIHYYSALFDSLDASYSEDSPERHVVEQQLLSREIRNVLAVGGPARTGDVKFGSWREKLAQSGFRVSSLAGSAAAQAVLLLGMFPSDGYTLIEENGALKLGWKDLCLLTASAWRPIQASGR

SEQ ID NO: 176734 - protein, 1022 aa, Oryza sativa
  Clone ID: PAT_MRT4530_74455C.1.pep
MESAAQSLVSNVGTLVGQEFNQLRGVGVEVARLRNELATIHALLRMQSEADEAAVDHFAREWLKQLREVAYDAEDCVHLYHFRIRCRSGQLSVWTNCKRLLTTLLARRQLAGDIRALRALASSINEQHCSYGFSLDSLRRSTADAAALGTMPASARVVVVDADDHDEFVDNNGQATELANKVSALREGVDDDKKRRVFSIVGFGGLGKTMLAREVCRRLETVFHFQAQVAVSQTFSGKDLQGLLRRVLRQITQPIVDRETVDDAEITQLQAAAASSQPNVNIDTMDVDDLATELKKRLDNKRILVKKVGPTDSQKSSERFGVPISSFLVDMTFDMTCKCIVFYKNVVYLILIDDVWSIAAWDAIRSKLPVTDSNCGSRIIVTTRIHTVAKACSAASDYIHHMKKLDDTESKQLFISKAFGSKSPCPDDLKDAMESILKKCSGLPLAIVSIASLLANYKPPEGKEMWETIKNSIGSQMENNPTLEGMRQILTLSYNHLPHHLKACMMYLSIFPEDYMIAKDRLLKRWISEGLIVEKRGLCQMDLAEGYFNELVSRNMVDMVISKATFNLHQGIREDQFRVHDMMLEILVSKSLESNFVSLVGGQYEGMSYTDHTIRRLSIHGGVEAGKDPSSSSKKMAAHRGTGGDSIKGMMMQHVRSLSIFDPEAHNILSRLGEFTLLRVLDLEDCTGLTNKHMSCICRMYLLRFLSLRGTDVKVMPSRIGDLEHLQMLDVRQTQLKDLPKSVTKLEKLEHLLFFDQGDSGWMLPQGINKMKALRQLKKAAVVFDAKVAEEIGALGQLQELAIFVDTGKKMNNGVVKKLASSLSKMYSLRWLDIGNLDAGKWPFAPIMEFLHDIEPPPQLLRYLRICGHMDRLPDWVESLHDLVELQLRWTHVDGFQLFNVLCKLPNLKRLFLGIYFIHGKHMVVHSSQHFRELKELILGYTPSSCDVYEFEEGSMPNVERLVVYFGDQTKKIVGIEHFKKLKEVEYIGSKDNLRPVLEPVEQMNNKRDVSQRITIKVRYDW

SEQ ID NO: 176735 - protein, 100 aa, Oryza sativa
  Clone ID: PAT_MRT4530_74456C.1.pep
SGADPTWDFSGNKQTVTCIKVKALKLREDKLGLTNERTQANSSPDGGERDESERKKEAHQDPLPSPPLLCSPRQMEIAAPPLCLGGGARSGGDKETGASA

SEQ ID NO: 176736 - protein, 127 aa, Oryza sativa
  Clone ID: PAT_MRT4530_74457C.1.pep
MTAGRCGAERRHGRQARAGVEGADGGGDQAVGHHDASTWMLFHLLDSQLATAPRAAATEGVDLQLLLTEGLAPMLRSPSFQAAAALRQPPPPVSTSVCSSPRALRPLLPLGPPAPTGVAAIPGRRRP

SEQ ID NO: 176737 - protein, 181 aa, Oryza sativa
  unsure (1)..(181): unsure at all Xaa locations
  Clone ID: PAT_MRT4530_74458C.1.pep
MEKEWSTYATPGYPRLLLCLCLSVPDPIYELLFPTSSFLARSLDGAASTSDTAGSGRRRPTSASNSAYSPPNHLRRRLRRKRMQIQMGTWRRLGLGIASFDFGSARVGEHGKTGHDTLIHKKDFPVKQQIGDQCGFHVCHNMRLLYREKGTITKSLPTSFEEVREEIASFILREIINPXGM

SEQ ID NO: 176738 - protein, 163 aa, Oryza sativa
  unsure (1)..(163): unsure at all Xaa locations
  Clone ID: PAT_MRT4530_74459C.1.pep
DFIFIGYLYELTVLQKDKIEDEQAKEVGVIDADWREPFIKFLTQQKLPQDKNQAERISWRSKLYVMVKAEFYKKSPSGVLQCCVSLDEGRQLLQDIHSGICGNHATARTLVGKAYRQGFFWPTAVTDAEKIVLSCVGCQSFFXARQTHLPAQELRTCHPIWQY

SEQ ID NO: 176739 - protein, 36 aa, Oryza sativa
  Clone ID: PAT_MRT4530_7445C.1.pep
NRCFDGCLSWATDHRSSQVAFSTYSEILESKIINHR

SEQ ID NO: 176740 - protein, 80 aa, Oryza sativa
  Clone ID: PAT_MRT4530_74460C.1.pep
MSPGASRAMGARSAGRAKHEATSAVNSRGPRSCAWAWHIATRPHDTAQLSVAGGVSSSMVHTDSERGFGEPEAIGLVGQL

SEQ ID NO: 176741 - protein, 1066 aa, Oryza sativa
  Clone ID: PAT_MRT4530_74461C.1.pep
MPAAAVSGGGAADAEELFRTRRIPEIRAAEGATRREISAKEEELRQLVGRSYRDLLDSADSILLIKQSSDAVSGNLSRISDSLASLAPPPEAPPAASPSPSGGRVRLYASAARAKYLVDTPEHIWGRLDEGLLLEAAGRYVRAQVVHGVLSRDAAAAARFPLLAHQAQLVEAFRPQIAQRARERLADRRLSVAAHADALAAAASIDAPSLTPTQALQLFLSSRRAWISQALTTLASDLTSYSSVLCDVAKIVRVTLGHVGQLFVLALNDLPLFFKTVLDLPPPSQLFGGIPDPVEETRLWKEHWDQLEATMVLLEPDAVARTCTDWLKGCCDEIFGVIAGGQRLVDAIESGEGLGSVQRLVREALDGREGLEGTLEQWLKSVFGSEIESPWDQIRGLILKEGKDIFEDWMEEAFVQRMKDIVHLEFGSLDDSVNIKKSIDGIGANADPKDAGDFMVYLRKVSTGGGVWFSESKIKKGGILAHLKPIADENDFHSCLTSYFGPEVSRIRNAIDSKCKTILEDLLSFVDSHNSAPRLKELVPYLQEKCYKTISGILNGLEAELGKLSASLRTKKGESNMLAASVIVERSLFIGRLMFALRYHSSHVPLILGSPRQWVKEAGGAAFMRLSSPSPRHSRASFDTAMPFTPRRHTQSSPRSPGRQFSDNPRRQTIAAAASLFGADDSSNPRLDELNKTLQALCIAAHGLWIAWLSTELSQLLSYDLNKDDSLSLSTPLRGWEVTVIKQEESTEGPLEMQIALPSMPSLYIISFLYQACLEIHKIGGHILDKSILQNFAWDLLQKVIDIYESFLVSIESGKSLVSEKGVLQILLDLRFIGDVLSGGKSSSTKTTETQRTHDSSPSAIAKTSFRRKQSQLQADSATIEPINKLINKFSQRLDPIDWATYEPYLWENEKQSYKRYVVLFGFLVQLNHMYTGTVQKLPTKSNTDSNIMRCSQVPRFKYLPISAPALSSRAHKSSLQSTSDDSTSRSPWKSYSNGERSTASEFDDNVSLGGAAPLLKSFVTQVSNLLHIFSLLVIVHVQGTFLQGHVHTYTEFRNMARISNPNHEW

SEQ ID NO: 176742 - protein, 663 aa, Oryza sativa
  unsure (1)..(663): unsure at all Xaa locations
  Clone ID: PAT_MRT4530_74462C.1.pep
PETLSEERRWPPPPSSRRPRPAPPPQVRPRXESAGWVVDERDGFISWLRGEFAAANAIIDLLLLHLRSVGEPGEFEHVAAAVQQRRHHWAPVIHMQQFFPVGDVAYALQQAGWRRRAPPHHQQQGPGASPSPPPPPPRGRPSFSASHSHHRHGGHHHRSDSVRGGGTGATAGSDKDGREVHNKEEKGMKEAENVVEAKSSQLESLVSHEGEKTPRPQAVAEGSSKVVPTPVEYTVNDIIDGKTVNAVEGLKVYEGLVNENEKNKILSLLNETKASFRRGGLEAGQTVIIGKRPMKGHGREIIQLGIPIVEGPPEDDYPRETKVEAVPGLLHDLFDRLCQKEIIPTKPDYCVIDYYNEDQMIFFPRGIILTLTNPLLDCDMVFGRVISGERGDHRGPLKLSLSTGSLLVLHGKSADVAKRAIPAACKQRILLSFGKSLSRKQVPSESVSRFTTPLTPPPMPWGPPRPANMARHSSSPKHFGYAPNSGVLPAPAIGAHHIPPSDGMQPLFVAPAPVAAAAMPFPSPVPLPNSTTAWMAEAAPRSAPQRLPVPGTGVFLPPGSGHALPHQMMTASQSPAEPISSTDSSAYVHNKSTSTMGEMANGDVSPKSSPAKQSDAVEQKPECNGSSNGGSSLVDKKSAVSKEQQNGGMKKVGSNKVQPNAAK

SEQ ID NO: 176743 - protein, 55 aa, Oryza sativa
  Clone ID: PAT_MRT4530_74463C.1.pep
TGSTREPWPRRLPPPPRSPPPPPSSPPRSPPSPPTSPPRSPPSPPTPPTRSPPAR

SEQ ID NO: 176744 - protein, 108 aa, Oryza sativa
  Clone ID: PAT_MRT4530_74464C.1.pep
VGSKKYPYLPPCIASPSLLSPQVIFSHQTNPCGCRVPPSSQLPPVVSACPTVAPHTAHLPCTTHFVHSTFPIINTVVPFFHHCNLCHSTYSGVSSNVGPNPHGRSMRS

SEQ ID NO: 176745 - protein, 208 aa, Oryza sativa
  unsure (1)..(208): unsure at all Xaa locations
  Clone ID: PAT_MRT4530_74465C.1.pep
SLRVPRPRPRLPRHHGGAFRHDLAGETKVPIRRNARCRKHVTSTATCVAGEGVEVWYSRPPSHPAMCPYSLVLPPQSANRRSGRGGXASGCHVMPLGPLHRFAPRPSPSHHLAGGASEVRAQAEPPLMRATPQLPLPSVCDSENTDMGTRFSSLRVNSSSSLPSHRSTSSQSSNSISSVIFTLVNSRVLQSNTMMMLKLVRRNNFPKA

SEQ ID NO: 176746 - protein, 149 aa, Oryza sativa
  unsure (1)..(149): unsure at all Xaa locations
  Clone ID: PAT_MRT4530_74466C.1.pep
SPLFAGICVHHINGGATAYGSDGRDYDVVPTSYFFTARMLDSRRSFMTEAIHAILITEHALHGLDTDSLVADASAYTPMRXEFTAIGDIPPSGLTEYACTIYSRGESSNXNDTCFMDLTDLADRHDAEALVPLCQNNLMHCTRCDLCER

SEQ ID NO: 176747 - protein, 152 aa, Oryza sativa
  Clone ID: PAT_MRT4530_74467C.1.pep
MEAVVGVKYRPVVFPNGGAAAAAAGKSKATPASATAAVYRECLKNHAASLGGHAVDGCGEFMPSPAADAADPASLKCAACGCHRNFHRRLPEAPPSPPLLALPPPPPPPPPPPPPPQPQQHLPRTAAVAVAVAPQLLLHGSHQRREQSPETD

SEQ ID NO: 176748 - protein, 1135 aa, Oryza sativa
  Clone ID: PAT_MRT4530_74468C.1.pep
MAIVLDAFASYVGDLLKQVAKDEVNLLFGVSGEIATLHDKLRILKDYLADADRRRITDQSVQGWVTKLKHAMYDATDILDLCHLKAMQRQRGGGSSSSSNPVGCLDSLLFCLRNPLFAHDIGSRIKALNTRLDAICKSAAAFSFLKLEAYEDMAAPRRSSATDRRTDPVLGKERSGVVGEKIEEDTSALVQRLTNGNTAMTTIMVVAVVGTGGIGKTTLAKKVFNDETIQKAFHKKIWLSVTEDQNQVELLREAIKSAGGASGAGDARDSNSKSLLVDAIRNKRFFLVLDDMWSDRAWWNLLREPFSHGAVGSRVLIPTRHDDVARGMQAVRPFHHVHKLYPRDAWSLLKKQVASSDMEELEIDDMLKDIGMEIIDKCDGLPLAVKVMGGLLRRREKQRADWEQVLQDFIWSVPPGELNDAVYLSYQDLPSCLKQCFLHYSLLPKNVEFYDVTVIGMWISEGFLHGDTDDLEKLGERYYQELIYRNLIEPDVEYADQCVSTMHDVIRSFAQDISRDEALVVSTSDERGKGALRSQKFLRLSVETNDFQPNDELEWKLIQGQGSLRTLIVIGELKIDHGDSLINFTSLRTLHIEDTNCSASLVESLHQLKHLRYLFLECSDIARLLQNISKLKLLQYLEIISENLVRLPNSIVKLGQLRHLDLLGISISGIPRQFCRLTNLRYLYGFPVQADGDWCSLQELGPLAKLRRLALRKLENVPVTSLAREARLGEKLHLRYLRLECSSRLGEDGLVEDEKGVSEEEQRRIEEVLDELTPPLCLENIDITGYFGQRLPRWMMSGAAGAYMRLLIVTMDDLVCCTQLPDGLCQLPCLNFFQVTRAPAIKHVSPKFVTMQPSSSQFRHAHAFPKLKEMRLIDMVEFEEWEWDHQLNNVPAMPELEELMLENCKLRCLPPGLSSQATALTSMGLCDIKYLNFVESFASLVKLELQDNPDLERVTSMPRLQKLIIIGCPKMRTLEGVPELRKLALEDCDMEQLPRYLQQGVSPMHLVLDCSLELLTSIALGESGPEWGKLSHVQHVKAYADQGDDKRKWHVLYTREPYSFETNIGDSPSSNSGGKSAQLLLLISVHNTLFSLFLPMFVPSFNCMMHLPTVSISLNGQLQRMSRRQILRRLKAPKG

SEQ ID NO: 176749 - protein, 119 aa, Oryza sativa
  Clone ID: PAT_MRT4530_74469C.1.pep
MNSQKKRSPKIEPFRHRVDADPKSFDKSWKKLEDAIREIYNHNASGLSFEELYRLIDLRRIPCPDFFLFYARLILARRPMWGAGDTGNRVLYETPARLVDLVSHTVIVGVIFFSLGFAV

SEQ ID NO: 176750 - protein, 75 aa, Oryza sativa
  Clone ID: PAT_MRT4530_7446C.1.pep
QCGHKHEYMTAMQFHIMKCLTSKYHFHHKRFFDDIHWNLCCTFCSESGSIRKTNLHYGSNTGSTKRDHNLHYQNT

SEQ ID NO: 176751 - protein, 200 aa, Oryza sativa
  unsure (1)..(200): unsure at all Xaa locations
  Clone ID: PAT_MRT4530_74470C.1.pep
MKLMRNVILFGLNLFVCSSVLLAAELPSYKAIEMQINDAKKLDKNDSNNALVKHLEETRSLLEKIAQQKNDNEDLTKEIKGASVALGISQANIEKLKNVIVPTVDMLEKSSIGXLQKALTSLETELEMIQTELTTINGNLVAQNAVPDKAQLALADNATRRQMINAALGNTNLSSAEKVKFETELTLLDLQNGYNYDLLR

SEQ ID NO: 176752 - protein, 372 aa, Oryza sativa
  Clone ID: PAT_MRT4530_74471C.1.pep
MADVVRAGAASRRWRHLSTRVPSLRFGFTEDGVDAKPKRREKFDRFVAFVNHVLDARAASAGIEQLAISIQLYDRGAAHAVAAWIRGYGSSAPEPEPIAAAYSAGSCCPRLRKLRLVSVVGLRSSAVARRRRSLQQFPRNRAFGVLELNTPNLRSLKMCCYAPGTLRISAPRLEELRSSNNVIDMRWQCVEQLDVGDLSCVRGLREIDLSSRGHPEYVVIWDAEAEELIDEEEEKEEVDDMMKDVPHLPGVTSLTIRDSTLNERALMTGVTCLLARCNSLRYFQLNMTSPIMDSTIAAGNQASIISLPHLTEVEISGFRGRKCEARLMERLHASATALNKITLRFDWLFTVESSREERINSLPLIPFGEVGK

SEQ ID NO: 176753 - protein, 687 aa, Oryza sativa
  Clone ID: PAT_MRT4530_74472C.1.pep
MALTTLCQLKLGIVKSSFCFNAATDNDGRAEASRYDDGRRLMVISVSLIAAAAAAAGGGAAILLCALAIGDASRGGRGAASGFGAEGEARFGDLSASFLAELRVSTNLLHTPNTADHEVRCCSFDRGMSLHCCPAAGDPPAPAGTAEELLERARSLVPAALDAARAATGFGGRWKVIAARLERVPPCLSDLSSHPCFSKNSLCRELLQSVAATLAEAAELGARCREPPRAGKLQMQSDLDALAGKLDLNLRDCALLIKTGVLSDATVPPVAPAAEAAAQTDVRELLARLQIGHAEAKHRAVDGLLDALREDEKSVLSALGRGNVAALVQLLTATAPKIREKAATVLCLLAESGSCECLLVSEGALPPLIRLVESGSLVGREKAVITLQRLSMSPDIARAIVGHSGVRPLIDICQTGDSISQSAAAGALKNLSAVPEVRQALAEEGIVRVMVNLLDCGVVLGCKEYAAECLQSLTSSNDGLRRAVVSEGGLRSLLAYLDGPLPQESAVGALRNLVSSAISPDSLVSLGVLPRLVHVLREGSVGAQQAAAAAICRVSSSSEMKRLVGEHGCMPLLVRLLEAKSNGAREVAAQAVASLMSCLANARDIKKDEKSVPNLVQLLEPSPQNTAKKYAISCLLTLSASKRCKKLMISHGAIGYLKKLSEMDVAGAKKLLEKLERGKLRNLFSRK

SEQ ID NO: 176754 - protein, 355 aa, Oryza sativa
  Clone ID: PAT_MRT4530_74473C.1.pep
METSRRLWPCWSLTPALRALPPRPRAARAPPPPPDSDSGGAGSPLHLAALHGHAECVQLLLDLGASVSEVTINDGSTIDLIGSGSTPLHYAACGGSAVCCQLLVAAGANMRAQNTNGLTPLMVARSWHKSSVEGILTKRPEVPVRILPSSYLSLPLMSIVKIARECGWRKTSVSSVCHDPCAICLDTECTVSAEGCGHEFCTKCALYLCATASSSTSIRGVPGSIPCPLCRHTIVSFVRLTSTTPIKELPWTNKSLALCAAGASTGSKYAGPAAITSSKYAGSLHRRSEMRSLRSSSVDLGCSSFRTASSGKLSSIKLNCTGADETMPCLVNCFRPDVQRSSSYRERIRRYSQFS

SEQ ID NO: 176755 - protein, 781 aa, Oryza sativa
  Clone ID: PAT_MRT4530_74474C.1.pep
MKLDSIVHLILHEINCLLNTISDAQDVKQNELVEKSLVVTLLEHFGQEVADLRSERNTLKQEQQAKSEELLQLQREKQELVNITDEFWEEVETRNRKVDELRAEAKFLVGQLSELQGSRRSLQSEIIKLIQENSMLSDELCDSREKERVFEDDFSILISEVMSKDILSVVFRSLHEERTLQLVSLHSDFAQLQAAGSELYQDIKMMNMKLGDLEKESNECNKELSRTISICNSTSTENAIGSGYPVGRDTDHLNSGRSQLEYHVNMETGRVQVDMAGLEKSNEMLQEEVHKMQSEMEVLTSKENSAIDIKSCDEDIKRLLANMQMAIVNAALFKEKVLELIITCESFEISSMVQKEVLKEEITRRNSYVDELKDKLNAVEIENRRLKVDLNGDFTVLGSLQNEVSALEKQTLSLANDCLQSNKLRMEENALSTQVLKTNMRSSGDQNTVRTVKDMELQKLHGTIKALQKVVTDTAVLLDQERLDFNANLQEARKQIEVLKLKEILDDDLIEMNYEQMLKDIQLDLIQISSGNKTGSLGQANKTVAQANEKMLDSHGIVGASSSHVRNDLRPPQSESFERDNYKRPPSELMVVKELSIDKQELPRSITTEPHQEWKNKVIERLASDAQRLNALQSSIQELKTNTEASEGLELESVRYQIREAEGFITQLIDSNGKLSKKAEEFTSEDGLDGDNIDLRSRHQRKIMERARKMAEKIGRLEVEMQKVQEALLKYEEQTSTRTSKTMHRRSKVQLVDFLYGRRRDSRKQQRCSPCGCMKANAIDD

SEQ ID NO: 176756 - protein, 625 aa, Oryza sativa
  Clone ID: PAT_MRT4530_74475C.1.pep
MWTPSRGSASGRRATGHRRIADYLADDRTEASTENGSFNTAYSDELFAPTSSSAGGDGVGGMLPAFLADQSDLVEVMLELDEESMVVRSVTPTTGALYGPTSLAGGGAAHTPPGSGRSLSRCSSTSSRIRKKFAWLRSPSPAPAPRAPTPSEPPPPREAAMAARERRRIQARLNRARSGARRALIGLRFISRTTGSAEAAELWTRLIVLSASANKLSKLKEQAEEYASLIMEELDPEDLGYIELWQLEALLLQRDAYMNYSRPLSSGSTAQWSQNLGGGGGGQQGGQGQGQGQSEGRRNDWRRRWSPRRAAARAQVAAEENWRRAWVLALWFAAMAGLFAWKFVQYRRTPAFRVMGYCLPTAKGAAETLKLNMALVLLPVCRNTLTWLRSSWARFFVPFDDSITFHKVESSSGFKWAPPGRSNQCSVAGEPAGTEDPRPGRLRVKAPVIQKSPRPTGLPLSCGATIIATAIALGICTHAGTHLACDFPRLIGSSREEYELLLSGFFGASRPTYRGLLAGVEGVTGIVMVVLMVVSFTLATRPLRKREAPRLPFPLGHLAGFNAFWYSHHLLIVVYLLLLVHGWFMFLVTKWHQRTGHPPPPGPACYGDGHRAPLEKKRREILVAN

SEQ ID NO: 176757 - protein, 46 aa, Oryza sativa
  Clone ID: PAT_MRT4530_74476C.1.pep
HQRCIWLFTEISCWGDGWIVSVDDLAYIIWGFYSWFPFVYAAKFGM

SEQ ID NO: 176758 - protein, 873 aa, Oryza sativa
  Clone ID: PAT_MRT4530_74477C.1.pep
MAARERRRIQARLNRSRSGARRALKGLRFISRTTGSAEAAELWTRVEHRFNALSRDGLLSRDNFGDCIGKQAKPSSMSMARRARARSRDDTAYGAGIGAGMEDSKEFAVGIFDALARRRRQELERISKEELYDFWLIVLSASANKLSKLKEQAEEYASLIMEELDPEDLGYIELWQLEALLLQRDAYMNYSRPLSSGSTAQWSQNLGGGGGGQQGGQGQGQGQSEGRRNDWRRRWSPRRAAARAQVAAEENWRRAWVLALWFAAMAGLFAWKFVQYRRTPAFRVMGYCLPTAKGAAETLKLNMALVLLPVCRNTLTWLRSSWARFFVPFDDSITFHKVESSSGFKWAPPGRSNQCSVAGEPAGTEDPRPGRLRVKAPVIQKSPRPTGLPLSCGATIIATAIALGICTHAGTHLACDFPRLIGSSREEYELLLSGFFGASRPTYRGLLAGVEGVTGIVMVVLMVVSFTLATRPLRKREAPRLPFPLGHLAGFNAFWYSHHLLIVVYLLLLVHGWFMFLVTKWHQRTTWMYIAVPLMLYVGERTLRAFRSKAYAVKILKVCLLPGNVLTITMSKPYGFRYRSGQYIFLQCPTISPFEWHPFSITSAPGDDYISVHIQTRGDWTQELKRIFVENYFVPSVPRRASFGALGMAEQKSPPRLLVDGPYGAPAQDFRNYDVLLLVGLGIGATPFISILRDLLNNIKLADELMDLAMETSRSDDSANSFSVSTASSNKRRAYRTSRAHFYWVTREPGSFEWFKGVMNEVAEMDKKGVIELHNYLTSVYEERDARSTLLSMVQALNHAKHGVDIVSGTRVRTHFARPNWKEVFTRIASKHPNSTVGVFYCGKPTLAKELKKLSLDMSHKTTTRFHFHKEYF

SEQ ID NO: 176759 - protein, 868 aa, Oryza sativa
  Clone ID: PAT_MRT4530_74478C.1.pep
MAARERRRIQARLNRSSTGAKRALKGLRFISRTTGTVQAAELWRRVEDRFNALARDGLLSRDDFGECIGMVDSKEFAVGIFDALARRRRQNLERITREELYDFWLQISDQSFDARLQIFFDMVDTNVDGRITREEVQELIVLSASANKLAKLKEQAEEYASLIMEELDPENLGYIELWQLEALLLQRDSYMNYSRPLSTASGAQWSQNLGGAAVAAGAAAATGGGAHAAVAARGGQQQQQQQEGRRGGWGVRKAAARVRVAAEENWRRAWVVALWFAAMASLFVWKFVQYRRTPAFRVMGYCLPTAKGAAETLKLNMALVLLPVCRNTLTWLRSSWARFFVPFDDNITFHKMIATAIVVGITLHAGNHLACDFPRLIASGPEEYRLVADAFGPEKPTYVGLLSGVEGITGVAMVVLMTVSFTLATHPFRKGEKGGSGGGAAATVLPTVARLPSPFNRLAGFNAFWYSHHLLGIVYALLIAHGYFLFLVRRWYLKTFFYETFLFVGWEEDHLAFKRNGRFMTWMYISVPLMLYVGERMLRALRSNAYAVKILKVCLLPGNVLTITMSKPYGFRYRSGQYIFLQCPTISPFEWHPFSITSAPGDDYLSVHIRTNGDWTQELKRIFVENYFSPHLNRRASFSELGATEPRSLPRLLVDGPYGAPAQDFRNYDVLLLVGLGIGATPFISILRDLLNNIKLAEELMDLAMETSRSEDSANSFSVSTASSNKKRAYRTSRAHFYWVTREPLSFEWFKGVMNEVAEMDKKGVIELHNYLTSVYEERDARTTLLSMVQALNHAKHGVDIVSGTRVRTHFARPNWKEVFTRIASKHPNSTVGVFYCGAPTLAKELKTLSHEMSHRTGTRFHFHKEYF

SEQ ID NO: 176760 - protein, 78 aa, Oryza sativa
  Clone ID: PAT_MRT4530_74479C.1.pep
MASLFVWKFVQYRRTPAFRVMGYCLPTAKGAAETLKLNMALVLLPVCRNTLTWLRSSWARFFVPFDDNITFHKSYVPF

SEQ ID NO: 176761 - protein, 67 aa, Oryza sativa
  Clone ID: PAT_MRT4530_7447C.1.pep
MRGLLACATLARRAAGATSTARRHLAGAAEAAEAELKKTALYDFHVAHGGKMVPFAGWSMPIQYKDT

SEQ ID NO: 176762 - protein, 492 aa, Oryza sativa
  Clone ID: PAT_MRT4530_74480C.1.pep
MIATAIVVGITLHAGNHLACDFPRLIASGPEEYRLVADAFGPEKPTYVGLLSGVEGITGVAMVVLMTVSFTLATHPFRKGEKGGSGGGAAATVLPTVARLPSPFNRLAGFNAFWYSHHLLGIVYALLIAHGYFLFLVRRWYLKTTWMYISVPLMLYVGERMLRALRSNAYAVKILKVCLLPGNVLTITMSKPYGFRYRSGQYIFLQCPTISPFEWHPFSITSAPGDDYISVHIQTRGDWTQELKRIFVENYFVPSVPRRASFGALGMAEQKSPPRLLVDGPYGAPAQDFRNYDVLLLVGLGIGATPFISILRDLLNNIKLADELMDLAMETSRSDDSANSFSVSTASSNKRRAYRTSRAHFYWVTREPGSFEWFKGVMNEVAEMDKKGVIELHNYLTSVYEERDARTTLLSMVQALNHAKHGVDIVSGTRVRTHFARPNWKEVFTRIASKHPNSTVGVFYCGAPTLAKELKTLSHEMSHRTGTRFHFHKEYF

SEQ ID NO: 176763 - protein, 100 aa, Oryza sativa
  Clone ID: PAT_MRT4530_74481C.1.pep
MEECTPHYLARGGVHVSHTLSAPTRADCTVERMTLVTTVMKHNDTVEESWWSTVASNHQNTEGRRSAAAMRTATRQRDAKREEDVGDHAGVGGGGHWPRG

SEQ ID NO: 176764 - protein, 78 aa, Oryza sativa
  Clone ID: PAT_MRT4530_74482C.1.pep
FHPSSILQTRVNLTRLETPTLWRYWKHFNLVSMNPDPSKEQLFHGVQQHFQSQQQLDELQVILGFIQAAKRLKTLYHS

SEQ ID NO: 176765 - protein, 64 aa, Oryza sativa
  Clone ID: PAT_MRT4530_74483C.1.pep
GTYMNCRWDTRTETDMCCRVTGACEHWDFLNTLKTPMQSFHLDYITRTCTPSLTHRIREEILWI

SEQ ID NO: 176766 - protein, 90 aa, Oryza sativa
  Clone ID: PAT_MRT4530_74484C.1.pep
LYRGWSCPLQALLHVQLGVETKGNPKHAFPSKETPRPNETQSDSVLPVRPATHRRSDRPSTGGLTTQHTAVRPANSEETGRLSKFWQSLP

SEQ ID NO: 176767 - protein, 351 aa, Oryza sativa
  unsure (1)..(351): unsure at all Xaa locations
  Clone ID: PAT_MRT4530_74485C.1.pep
MQSPSKISDASGSMPPATFQEELLHSIVPLLGSFVDILAFAGTCHSWRAAFSSYPSKSAFRTLLPPLLVRPNVRVKSPCIPSTSNGPHKLLRSCQXGYCLVVDVFTGAEVSPPRLPFSKDHEEIYFCGTLTAPITSPNSHLLISNRSSLFDWPVGSDSWSELKLPVNRVDQIVEFNGQLIAVIEYKLYTLQLAPKLRLKKMKTLWWDDMSECPYLRPWLVVCDGMLLIVDHYITLSFGAPVNYRPYRLDMSAKPAKWVEVKKLENWALFIGGDARSPPFAFKNPERWGGRSNCLYYAHYSQPWSLHGLGDDADAVWDPTTDDNLVFKRNWYSQLQAFWVYPSMFYSDGDGQ

SEQ ID NO: 176768 - protein, 127 aa, Oryza sativa
  Clone ID: PAT_MRT4530_74486C.1.pep
MELRWILASGRWLPGFLSFLRTQRRQRRPKAAAKAAASCGWRHSDHGGALVHDDGQPPVGFGAKQPVAEVALTLAKPREATALTGDGRGDGARRLERRRRRRRGGARGGGATRHGRPRERGQTKEED

SEQ ID NO: 176769 - protein, 65 aa, Oryza sativa
  Clone ID: PAT_MRT4530_74487C.1.pep
GRVGFPGNIGPDPGGPPKIPIGDLIKNRVYLGKGGIQGGIIIGKKFPKKKRGKQKKLKKGGQKEK

SEQ ID NO: 176770 - protein, 126 aa, Oryza sativa
  unsure (1)..(126): unsure at all Xaa locations
  Clone ID: PAT_MRT4530_74488C.1.pep
GAPVDFGFGEMAAGLPLLLANPTAAAATKGDDGRRRTERLETRRRRRRSGSRRRATSGGIWRKTTGGRGSSHPCEAEGGDGSRRHXQRGGAARMELGRRRRRGGARGGGATRHGRPRERGQTKEED

SEQ ID NO: 176771 - protein, 106 aa, Oryza sativa
  Clone ID: PAT_MRT4530_74489C.1.pep
LAPGPSSNFLREFLIVLRDTVMSLRSDKRHFQQEVENSTARLEEERTGFEAVRKEMVAVREIVQDNLAKLAALKARISKVEVEKNVFVLCSVACLFALARKECAKN

SEQ ID NO: 176772 - protein, 177 aa, Oryza sativa
  unsure (1)..(177): unsure at all Xaa locations
  Clone ID: PAT_MRT4530_7448C.1.pep
PGYTVLFFAAALMAVLLTTYGAQLSEXEMRLTDRHCQRKVPDSPVDACRSALDRAFTRRETFQSMFRRAGALSLXMQRCHKLLDVSRECLCTIIRRMVKSYYESMPIPLDQGWSMKSXGYYGCEESSTEQGYYGEGSSEEGYYGEHQHQPEMTRVRLTRARQYAAQLPSMCRDEPHQ

SEQ ID NO: 176773 - protein, 353 aa, Oryza sativa
  Clone ID: PAT_MRT4530_74490C.1.pep
MFFTIIFPDSMPQTTDSSLPYTSQSGKPINYAAGIIPNGGGLAPSVIGYIAPKTTNLLYGQTHEPIPVETCKRKSTKQSDVKPSAAKPPAASKKVAKKQKFAADDLPPLDRDVEEVLENEEIEEAIDNAAAGMSDTRALSASPTGRAGTPPAGTPSPNKTPDAPTPAPKSGEEEETTSGALVPLDDDLKTKLMDIAQRLGSSLDSLVTGCGSIRARFEEIHHQIPEDEADIISLARRETTTEGWTGFTLLLRTQWSRRRPKATTDDDEQCGWRHGDDGGARVHDDGQPPVGFGAKKPVAEVALTLAKPREATAQGGTDQRGGAARLEMVAAVEREDKRGESDSGDRGGRDLRG

SEQ ID NO: 176774 - protein, 123 aa, Oryza sativa
  unsure (1)..(123): unsure at all Xaa locations
  Clone ID: PAT_MRT4530_74491C.1.pep
MATKRLVVTLREANLTGKKEPVRSDLNVPLERRTIRSPITPRIRSXVPTGKFLLERGAKVMLASHLGRAXDVTPYYRLKPIVPRWSELLGVDAVMANDCIGXEVEKLIAVLPEGGVLLLENVR

SEQ ID NO: 176775 - protein, 781 aa, Oryza sativa
  Clone ID: PAT_MRT4530_74492C.1.pep
MAPLVPSSQPWVEKYRPRQVKDVAHQEEVVRVLTTTLQTADLPHMLFYGPPGTGKTTTALAIAYQLYGPELYKSRVLELNASDDRGINVVRTKIKDFAAVAVGSARKGGYPCPPYKIIILDEADSMTEDAQALATLSTISNGDLRRAITYLQSAARLFGSSISSTDLISVSGAIPEDVVKSLLASCKSAKAEKVGRNSNRGCSTPFLTRFARASLAGNTPSSPTAAAAAAAASSATGAGDDASSQGHLLRRYVPPLLASHFPLAGTSSRADAGGQNPTSPVDARAKWRKRKRNANTSAADHSDDSDSAVAAAANDDNDDDDAALHAATAAANGGGGTLGGGDDDPVVDLREAEVHPTAIERVSAFPPAFRRVVNRLHPSVLAVMAAERAAAAAGAGAGGGGAAVPALENISHGQLQVLSSVLPDHPSLSNDPDKPSSYVCTPPLLMECRGVAKQFDGKLLMVPKHSDWFLPMTVHRLERQVLPQFFSGKSPGHTPEKYIMLRNRVITTYLERPARRLAFSECQGLVTSTPEFVRAEDIASGASLSSSPGMENGDAGFDEKTLLERLSESFCSFCAQPLPSLHYESQKELKRLELKLKQFADIETYLLRDSEQSERMRQGLQAQRIRMMSGLRLASPRGNTMASNPLSQANIRPPGIPGSMPQAGTPAFYSNNMQVHPQMAFLQQQMQQQQQKQQQQQQMQLQQQQQQMQLQQQQQRQAFLQQQQQQMQQQQQQLQQQQQRQLQMLSFGGRLPLSAMNAPSTSAAPNVMFDNPDMPGPSNQG

SEQ ID NO: 176776 - protein, 339 aa, Oryza sativa
  Clone ID: PAT_MRT4530_74493C.1.pep
MAPLVPSSQPWVEKYRPRQVKDVAHQEEVVRVLTTTLQTADLPHMLFYGPPGTGKTTTALAIAYQLYGPELYKSRVLELNASDDRGINVVRTKIKDFAAVAVGSARKGGYPCPPYKIIILDEADSMTEDAQNALRRTMETYSKVTRFFFICNYISRIIEPLASRCAKFRFKPLSEEVMSNRILHICNEEGLSLDAQALATLSTISNGDLRRAITYLQSAARLFGSSISSTDLISVSGAIPEDVVKSLLASCKSGEFDVANKEVNNIIADGYPVSQLISQFLDVIVNADDIPDEQKARICKKLGEADKCLVDGADEYLQLLDVASETIRALFDMPQTLVF

SEQ ID NO: 176777 - protein, 921 aa, Oryza sativa
  Clone ID: PAT_MRT4530_74494C.1.pep
QKPKKWEEIRTAVSTPFLTRFARASLAGNTPSSPTAAAVAVAASSATGAGDDASSQGHLLRRYVPPLLASHFPLAGTSSRADAGGQNPTSPVDARAKWRKRKRNANTSAADHSDDSDSAVAAAANDDNDDDDAALHAGTAAVNGGGGTLGGGDDDPVVDLREAEVHPTAIERVSAFPPAFRRVVNRLHPSVLAVMAAERAAAAAGAGAGGGGAAVPALENISHGQLQVLSSVLPDHPSLSNDPDKPSSYVCTPPLLMECRGVAKQFDGKLLMVPKHSDWFLPMTVHRLERQVLPQFFSGKSPGHTPEKYIMLRNRVITTYLERPARRLAFSECQGLVTSTPELYDLSRIVRFLDAWGIINYLAAGSVQRGLRMAATLIREEPTGELHLMSAPLKSIDGLILFDRPKCSVRAEDIASGASLSSSPGMENGDAGFDEKTLLERLSESFCSFCAQPLPSLHYESQKEADIALCSDCFHDARFVTGHSSLDFQRVDGKKDGLDNDGDSWTDQETFLLLEGIDKYKENWNAVAEHVGTKSKIQCLHHFLRLPVEDGLLENIKVPEASFSSKFWLMQNASGSVFKLPQLFALGSLPQSGEAGDLPFINTANPVMSLISIMSLALLFRDDLQIAFLASSLGPRVAASCASEALIVLTGGDSRISSIGNDVMGHAARPNCGDYLIPKINSSLAVSSENVRHAARCGLSAAATKCKLFADQEEREIQRLSATIINHQLKRLELKLKQFADIETYLLRDSEQSERMRQGLQAQRIRMMSGLRLASPRGNTMASNPLSQANIRPPGIPGSMPQAGTPAFYSNNMQVHPQMAFLQQQMQQQQQKQQQQQQMQLQQQQQQMQLQQQQQRQAFLQQQQQQMQQQQQQLQQQQQRQLQMLSFGGRLPLSAMNAPSTSAAPNVMFDNPDMPGPSNQG

SEQ ID NO: 176778 - protein, 104 aa, Oryza sativa
  unsure (1)..(104): unsure at all Xaa locations
  Clone ID: PAT_MRT4530_74495C.1.pep
MVRIVTILMEEQKSSAIRIPYEKXTRVMILGGHLRSTVGVGIRLKEELKSKRLKITGDEVGYEMTHGRXTPCRRNLRNRLYEVCVQASMFANENWKKNGAELLQ

SEQ ID NO: 176779 - protein, 186 aa, Oryza sativa
  unsure (1)..(186): unsure at all Xaa locations
  Clone ID: PAT_MRT4530_74496C.1.pep
GGGGRCPAGERIRVGGGDGVRVVLGVSAAVVEVATNSSSCSALRRALASLRRARVGGAVGGYVAVSVAVGAISLRRACAGGGXAGVGVCTVLDGAAVVASRAPVAISALAGAAPGADSSSVGGSSRLVINILLQADAFGILVTGCLICSESCGSTLQVTLFLAISALIARQKSIGSLLKAPLLMVG

SEQ ID NO: 176780 - protein, 86 aa, Oryza sativa
  Clone ID: PAT_MRT4530_74497C.1.pep
MRLHRLPTTLPTLSSRTSVGGLPSFRVWLQQPPLPLQVSNCVPFRGIKFQGTVLNVRFDMLSEHSEVAISPLASRRFTGGGTTDGY

SEQ ID NO: 176781 - protein, 56 aa, Oryza sativa
  Clone ID: PAT_MRT4530_74498C.1.pep
ESKSVKLWQLKRRNFAPLCEHHRGLLFFWFVGVRCCYFRVIVAGGLLLECTWGPFL

SEQ ID NO: 176782 - protein, 312 aa, Oryza sativa
  Clone ID: PAT_MRT4530_74499C.1.pep
MNPLTQVKRTQVINQKEALLGIGEDGSWHAKFKDSAYVFVGGIPYDLTEGDLLAVFAQYGEVVDVNLVRDKGTGKSKGFAFLAYEDQRSTILAVDNLNGAKVLGRIVRVDHVSKYKKKEEEDEEELQKKREARGVCYAFQKGECNRGASCRYSHDEQRNANTGWGSKEESKARWEHDRHHEPPMSHKKFPSSAGEQRFPDRAKEENKSTGREGQSSRSEAYKDRDSRLRHSDRGSKDHDRYRHDRSPERSRGDRQRNNDRYAQGRDEKSERYRSEVKHDEGDQKRSRRDTDSSGHYERRGNEDSERYRKSRR

SEQ ID NO: 176783 - protein, 157 aa, Oryza sativa
  unsure (1)..(157): unsure at all Xaa locations
  Clone ID: PAT_MRT4530_7449C.1.pep
IESDSYSSPTHSTTPPATRPDFRLIXINLVVSRSRQITCRLPSRQTTRVLCLAISLLNAAHRKARATPPRVFDPPTXERRSPPASINPSVGPHVSLLRVAHQKVRATRSKCPTHQLDRQSLRPPSTRAPRLVISLLITAIEQFRPLSEVSDSIDQIP

SEQ ID NO: 176784 - protein, 286 aa, Oryza sativa
  Clone ID: PAT_MRT4530_744C.1.pep
MREPVVVAASSAAALRGFWEEVNESPAWQDGAFFSLSAAYALVSAVALIQLIRIQRRVPEFGWTTQKVFHLMNFLVNGVRALVFGFHLHVFLLSAKVYKLVLLDLPGLLFFSTYTLLVLFWAEIYHQARSLPTDKLRIIYIAVNAIIYTIQVCIWVYLGINDNPLVELVSKIFIVVVSFVALLGFSVYGGRLFFLLRRFPIESKGRKKKLYEVGTVTAICCACFLIRCIVVAISAFDSDVSLEVLDHPILDFFYYMLTEILPSALVLFILRKLPPKRVSAQYHPIN

SEQ ID NO: 176785 - protein, 89 aa, Oryza sativa
  unsure (1)..(89): unsure at all Xaa locations
  Clone ID: PAT_MRT4530_74500C.1.pep
PNKKNLFRQMFPNPGTKKGLGISPHFGPGQVSTMTRLKWCQPTSHVYTCSSHAPTLQLQLHQCMYVCTLIVCVCVPDQEDSQLXXXQXI

SEQ ID NO: 176786 - protein, 408 aa, Oryza sativa
  Clone ID: PAT_MRT4530_74501C.1.pep
MSIQANPLIKTLALSPRRRMAPPAPATARRPMAAVRCSAAKRSYNVTLLPGDGIGPEVVAVAKDVLSLAGALEGVEFRFQEKLMGGAAVDAYGVPLPEETLAAAQASDAVLLGAIGGYKWDNNEKHLKPETGLLQIRAGLGVFANLRPAAVLPQLVDASTLKKEVAEGVDIMVVRELTGGIYFGQPRGFGKNDKGEDTGFNTEVYSASEIDRITRVAFEVARKRRGKLCSVDKANVLEASMLWRKRVTSLASEFPDIELSHMYVDNAAMQLIRNPKQFDTIVTNNIFGDILSDEASMLTGSIGMLPSASVGESGPGLFEPIHGSAPDIAGQDKANPLATILSAAMLLRYGLGEENAAKRVEAAVTETLNNGFRTGDIYSPGTTLVGCKRMGEEVLKTVESQSAVALNS

SEQ ID NO: 176787 - protein, 306 aa, Oryza sativa
  unsure (1)..(306): unsure at all Xaa locations
  Clone ID: PAT_MRT4530_74502C.1.pep
RGIQVNADDGRGLRRARAAAEQRRAVGEAEAGIEXSVGEWTRESGVVETVSGRGRSAAGESGDGRAPPSXSFAPPPNHEDWVGADWPAASHADTPTSRVGAPPLLLSRCLRRADRLRLPLQLHSPTPALAAALACRSPSQPLSLTLPLRLPPPAPGEKKRTTEKLLNCCHNPEDPGTYHANELLHLAHLASAATLRGSEERPKQSATLSSNMKFSAIFMLFLALGILAIAVHGGRTHAIIEPAKKSAAAGVAQPQFDPITICSPSNFCIPEAWSSCYRCIVKPDDNPPFRTIDECNSNCPVPPANA

SEQ ID NO: 176788 - protein, 194 aa, Oryza sativa
  Clone ID: PAT_MRT4530_74503C.1.pep
DSRTLKPNPPEIDFDHRRTPPPPPPPPPKKQRWEKPPAGWMKLNVDGSFEERDGKGGIGAVLMDGAGKVIFVACGKLDRCGEPLEAEILACREGICMALQWTLLPVLVETDCHEAMNLIRSKQRVLSEMGFLVEEVQSLVTGRRDIKLTKVRCDQNIVSHFLANKGISESLTAFWPDNNCNFISHLLDVDVPHE

SEQ ID NO: 176789 - protein, 87 aa, Oryza sativa
  Clone ID: PAT_MRT4530_74504C.1.pep
CFFFFFFFFFFCFFFFFFFAGLSTMQETRYILFLFLFSSLHRWHHLLGSEIRGADRYQYSLRLPTGRQNRPQDGGQVPFRAGAPPGS

SEQ ID NO: 176790 - protein, 112 aa, Oryza sativa
  Clone ID: PAT_MRT4530_74505C.1.pep
MAVCDDDGGCSWCWCPRDGGDLARSGAGSDHDQIRTTATKVLDDCIIGKVATKQASTQRSGYGYVSIAVERLRQVLDCRGSACHAKRLHDALEATVISMVYRRWWWRSKDAS

SEQ ID NO: 176791 - protein, 174 aa, Oryza sativa
  Clone ID: PAT_MRT4530_74506C.1.pep
CPDGQQLVPDPNSPPSSNGCGPESIPFTGPSFSFGHCCEQHDLCYGACDATSKVTCDNDFYECMYCSCYDQYDAIQAELCLEIACTYYQLVDEFGCDAFQSSQENDCICEAEKDLARTYVEVPSKWGPAPEQAFRTRDLLCDAPVHTLVVVRGDSVEWQLQRRVVAISNGSGSQ

SEQ ID NO: 176792 - protein, 221 aa, Oryza sativa
  unsure (1)..(221): unsure at all Xaa locations
  Clone ID: PAT_MRT4530_74507C.1.pep
REKAAPPAAPLSPRGERDGDGVQGVQDLPRPADRDHPASSSXRLAGRDLPASSSPAPSRPQPPSELLPHVRAAATLRRAPPPRPGGLDLPVSSSHALLQSWYPGELLHRVRPTATSRRSWRAPPPRPAGRDLSASSSPNLRTSSSPAPGWPRPPGELLRHANLAVASRRASPPCPASRGLPASSSPAAATRADGRCNAVAVREEEMKERGGVIDGPHVDPT

SEQ ID NO: 176793 - protein, 117 aa, Oryza sativa
  Clone ID: PAT_MRT4530_74508C.1.pep
GSTLESVAAGVPMAAWPFTAEQFVNEKLIVDVLGIGVSIGVTKPTGGMLTAGGGGGEETAEVGTEQVKRALNSLMDGGVEGEERAKKVHELKAKAHAALEKEGSSYMNLEKLILSAV

SEQ ID NO: 176794 - protein, 86 aa, Oryza sativa
  unsure (1)..(86): unsure at all Xaa locations
  Clone ID: PAT_MRT4530_74509C.1.pep
MGRTLDXLLGRTTKXTARLXSMLGXAXTXLXVLRGHRQXRXXQAXDXXXXLXLXHPXXYLLRAEQVIRXQNTXDXXLMLXXYCNLI

SEQ ID NO: 176795 - protein, 160 aa, Oryza sativa
  Clone ID: PAT_MRT4530_7450C.1.pep
MAPPVSDEMELAPSAAAAPILLHVVVLHLATAAAGVPGYRAERAVLQGVAGEHEERGGGAGARGRDALASVAYEAEGRREKMERRAAAGEVAREGGGREAGNGGARRRRAEEEARSGRRPATVSALLAGRRLFASPCALAGEEGWPGGRKKEAPCHVTAT

SEQ ID NO: 176796 - protein, 689 aa, Oryza sativa
  Clone ID: PAT_MRT4530_74510C.1.pep
MEADGGAAGEEAEERRRRSELGSLVEAIKSSEVALKCSELDTTNCLGPFLTLGSKAGSWCVRHLLWSVESIDESEDAQEEEHSRLFPEIIALTLNISSKHLPVASKCIAEDTVHAVGDFILELLTLTESSILDKKLGTTGHVAKAAPVFLDETIKLCRVYSEAAKSDQCIMSMPKEETTEEHKETDLTSNIAQITACTIQSLCKIGTHAASSGGSQVILLNISWKGIISLLQLGKGMVEEKVNLFLLLKTLASPEEVLAPLSALRKLARASCNILSYASSATIDQIYTMLNDSSSKSSILYLALLMEGFPFDSLSRGVKEHAVKTLFTSFAGYLQNQNYFKNHGEINLPTSSSSGIIGFPVHALASAFQSCEIKDVTIDEKSIATMFKIATSLINLYRTSPDSSRNLLVKHISSILVIITHMRHLCAFSELEKLTLELHTLFMSSFDNSNTAISQCKPSMASFMAILGHLNTTEDDANPLCSAMWDLFHFLLRERHWALIHLAMGSFGYFAARTSFAQLWKFVPVDAALSYTCTGVDIDEDGFMSELKAFLQKEVALRDDKWSEEQICSLVSEGRMLKKLVESCLEIPLVPEPEKVSITNYVKTKKRKMPDGICEGMPENVSVTNDVETKKRKMPDRICEGMMLVQNGLKIMRSALSETDLAELKDRFAVHLSRLEDAVSHLASFSDKI

SEQ ID NO: 176797 - protein, 59 aa, Oryza sativa
  Clone ID: PAT_MRT4530_74511C.1.pep
MLMLPHRGEVTVARCRSSWSTVITRGGRRADLEVPELGQSRYGIGATAIANDDESVCGN

SEQ ID NO: 176798 - protein, 803 aa, Oryza sativa
  unsure (1)..(803): unsure at all Xaa locations
  Clone ID: PAT_MRT4530_74512C.1.pep
KKNPCASHNNKKKVKPKATTNFKKKDKEKAKGNCFVCGKPVHWVKNCPDHKDXKSANMVISDGGGTSGYGDFLPTVLFVXHSPDWWVHTGANIHVCANIFLFSSYQVGRGSSLLRGNGLLVAAHGVGTVNLKFTSGKTVQHVTSIXKKNLVSGSLLCRDDFRLMFEFNKCVVSKYXGKGYDSGGLLHFYLDDMCNKDVNHVSNDDESNEWHSRLCHMNFGCXRLANMSLILKFTLVKSSKCHTCVQAKQPRKPHKASEVRNLTPLELVYSDLCKMNSVLTKXGKKYFMTLIEDCTRFCYVYFMKTKNKALQYFKIYKVEVENLLERKIKWSRSKRGEEYFPNEFISSCEESGFIHERTHTYSPXSNGVAKRKNHTLNVFVNAMLDTVELSTEWWGEAILTVCHVLNRIPTKNKQVTPFEKRKKKKLNLSYLRIWRCLAKISVSIVKKCKLGPKTIDCVFLGYAIHNVRYKLLRVNFGVSDMRVGTITQYREVTFFENEFPMKDTHSTSSQEPIYPXSFVLIEHNEXTPEENPEEDNIVATRKSNRQRTTKSFGDDYIVYLVDDTPRTIEEAYSSPDANYWKEAVCDEMDSIMSNGTWEVVECLYGCNHVGCKLVFKKKLRPNGIIKNYKARLVAKGYTQKEGEDFFYTYSPVARLTTIRILLALGASHGLLVHRMDVKITFHSGVLEEKIYMDQPDXGYVLKGQEGLMCKLLKSFHGYREAPKQWHEKFNKTLIFVGFVLNEANKCVYYXYGWGETVILCLYDDDILISRTSLNVVEEVKDFLSKCFQMKDLRMASVILNIKL

SEQ ID NO: 176799 - protein, 122 aa, Oryza sativa
  Clone ID: PAT_MRT4530_74513C.1.pep
MAATAAQAVAVKGSVAVPPCGSRGRRRGAVASVRMAAAAATSALRIGRRSPFLGRRLAVGPRRSRPVPRNLVAPVQMNLAFAKATKWWEKGLQPNMREVESAQDLVDSLTNAGDNLVIVDFF

SEQ ID NO: 176800 - protein, 64 aa, Oryza sativa
  Clone ID: PAT_MRT4530_74514C.1.pep
QVRSLKVLNPITTSSMCSCTSMVDFNSSLRILKIKRCPVLKVFPLFENCRNLGCSWLPHLSNLT

SEQ ID NO: 176801 - protein, 126 aa, Oryza sativa
  unsure (1)..(126): unsure at all Xaa locations
  Clone ID: PAT_MRT4530_74515C.1.pep
MADARAAAAAIAARRGVGQNPIRRWASARRRAPLLGPPLLLCCRGDRMSSVLTRTRGVRXNASESVRLLIRLLLDVTGKAHISSMAFTGAVVVDDDAGRAVVSACVACGAGAAASSRCFRRNGHDV

SEQ ID NO: 176802 - protein, 363 aa, Oryza sativa
  Clone ID: PAT_MRT4530_74516C.1.pep
MGIDDEMSLADDTPTDMDIDGVAEDVVRKTVDADIPAMEILGDTAGEVKEKVLSTESEKPAPPLSRRERIALLPPNHPYHYTCGLPNFVFFAMAMVSFLYAVIVPFLLWRAAADKPTSLIWTWSILACSYGIFWIISLSEVLGVIVVFFRVSYVAFVAAASTQLVGSITGVSIVYLDTFYVAGMVGYAVAEYRMRRGIEECPSAVAAMPPLISQEQERNREVNVFYAAFMFGLVSLVTVGRMAWLVFFSNGGGGGGGRISSVLEELSVETCFVSFQWTAFVALPLSLVSFNALFCWVPICYVAWYVLGAILGALVGSVAIEVLFFWLAAVAMAGFFGYCLAVHARCKRLLAICLENVIELLMC

SEQ ID NO: 176803 - protein, 620 aa, Oryza sativa
  Clone ID: PAT_MRT4530_74517C.1.pep
IDTPGHVDFTLEVERALRVLDGAICLFDSVAGVEPQSETVWRQADKYGVPRICFVNKMDRLGANFFRTRDMIIANLGAKPLVIQLPIGSEDNFQGVIDLVKMKAIVWTGEELGAKFSYQDIPADLQEMADDYKAQMMETIVELDDDVMETYLEGGEIDEETVKRLIRKGTISASFVPVLCGSAFKNKGVQPLLDAVVDYLPSPLDLPPMKGTDPEDPELILERKPSDDEPFSGLAFKIMTDPFVGSLTFVRIYSGKLVAGSYVLNANKDKKERIGRLLEMHANSKEDITVAVAGDIVALAGLKDTITGETLSDPDKPVVLERMEFPDPVIKVAIEPKTKADADKMATGLIKLAQEDPSFHFSRDEETNQTVIEGMGELHLDIIVDRLKREFRVEANVGAPQVNYRESISKISEVQYVHKKQSGGSGQFADIIVRFEPLEAGSGYEFKSEIKGGAVPKEYVPGVMKGIEESLPNGVLAGYPVVDLRAVLVDGSYHDVDSSVLAFQIAARGAFREGLRKAGPRLLEPIMKVEVITPEEHLGDVIGDLNSRRGQVNSFGDKPGGLKVVDAFVPLAEMFQYVSTLRGMTKGRASYTMQLAKFDVVPQHIQNELSAAKQEEASTA

SEQ ID NO: 176804 - protein, 143 aa, Oryza sativa
  Clone ID: PAT_MRT4530_74518C.1.pep
IYTVRGEELFTPCVPRGVVVSVIWARGTKLRGKRPPPVSTWCSPKGVEPVDRWQPSPLSPRGSGCPDPSPQSPCGRHVCEVCPVHRDDERLWASHPNCSRFGRTRCALDCIPGSSRGICGNPLRYKRSSRPTEDGRILPPDCG

SEQ ID NO: 176805 - protein, 185 aa, Oryza sativa
  unsure (1)..(185): unsure at all Xaa locations
  Clone ID: PAT_MRT4530_74519C.1.pep
TGDIPLTHLLMEEDLXGMHVPGIQSRAHLVRPNRLQFXERPRASHHHDGXGHTCHTPPDVRPGRERLVAVPSVIRPMTDWSQTGRXACQARNMPHSMQRGALAPPASKVVRWTLDSVHLTSHTWRPHGDCGEGSGQPDPXWAQRGRLPPIHGLDPLGGAPRGHWGRPLPSKLGTPGPYHRHHHTP

SEQ ID NO: 176806 - protein, 767 aa, Oryza sativa
  Clone ID: PAT_MRT4530_7451C.1.pep
MAGRALVGGLRAERMANEHGATAHGPREVRLPAAPATTQEKGRALSAAGGLSFIGKGGDDCPSEDDEEAREIERHYKELKRKMRAGKVHELDEVVFEGFKSQSARTAGGPEDGNDTPYADSDDEDSYDEVGSDGELVRRNGKFPRFQKQPGVPVFELGMKFSSKHQFKKTIIKYALAERKVINFIKDDHKWVRAKCDWASCPWLRSPSPSLPSFLQPPHLRSICTAFSEEEQEARSRRVEERGRRSRCSRRGLTVELRASDRAGEMDEEEEEEMSEREVDSQVHMACVMQGRRVGIAYYDSSMHQLFVLEIWEDITEDFPLIDLDCNDEAPAVKLMKSSTFSYEQAWHRLMYLKVAAMDEGLSVKERICFLNSMMDLGSDVQVRAAGGLLAILDNERLLDTLDQMEGGASIAIDSVAQISFYPFIRNDIIRTKCANVLISMFLWFYFGNKLESYLCRIVVRHSYGKTSLEVTVTFYNHDCRFAKFNSPSSFCTSSDWHAFLKCICSLLHINKIFEVGISEHLAIKLQHMNIDLVGKANSSITEELDYVSDLVVGVIDVQRGKEKGYDTLVKDGLCEELDELRMVYEELPDFLEQVSANEIASFPFSFECRKAPLIVYVHQIGYLMCFFDEKISDALLIGLPDFEFAEMTVDTFVPNDTKIRSSGRINIITGPNYSGKSIYIKQVALVVFLAHIGSFVPADSAIVGLTDRIFCAMGSKSMTSEQSTFMIDLHQVGTMLRWYWSAWRNYQPFYRLRLSSKGASLEKCCY

SEQ ID NO: 176807 - protein, 221 aa, Oryza sativa
  Clone ID: PAT_MRT4530_74520C.1.pep
EFNRESGGEVYFTMPRLQSIAIQCLEALQFLHGLGLIHCDLKPENILVKSYSRCEVKVIDLGSSCFETDHLCAYVQSRSYRAPEVILGLPYDKKIDMWSLGCILAELCTGNVLFQNDSPATLLARVMGIIGSIEQAMLAQGRETYKYFTKNHMLYERNQESNRLEYLIPKKTSLRHRLPMADQGFIEFVAYLLEVNPKKRPSASEALKHPWLFFPYEPIFS

SEQ ID NO: 176808 - protein, 664 aa, Oryza sativa
  Clone ID: PAT_MRT4530_74521C.1.pep
MSPRSRELADPTKSPVESGSSSSMPQALCTNPGLPVASDPHHPPPDVVMAEAFAVIKSKSSLVVGATKREMENVGGADGTVICRLVVALHAALLDAGFLYANPVGSCLQLPQNWASGSFVPVSMKYTLPELVEALPAVEEGMVAVLNYSLMGNFMMVYGHVPGATSGVRRLCLELPELAPLLYLDSDEVSTAEEREIHELWRVLKDEMCLPLMISLCQLNNLSLPPCLMALPGDVKAKVLEFVPGVDLARVQCTCKELRDLAADDNLWKKKCEMEFNTQGECGCVVWKCIYSDQRKDIVLADKYTCGNYMQKPVTQPGRWLIILVYHSLLCQYITIGLSLLWYHLVDLVQDAPAAGIHFDCIIPLPINPYQLPPSAGACCSTTQASASAKDGGNMYSPPCSAAASSQGHCFAVGANQLASLDLAMDFDEPILFPVHNASLQEGIQFYNPTGDTQLSRNMSIDKCLKGSKRKGSGEGSSSLHSQEETGEMPQRELSMEHAGEKAGDADASREEYVHVRAKRGQATNSHSLAERFRREKINERMKLLQDLVPGCNKITGKAMMLDEIINYVQSLQRQVEFLSMKLSTISPELNSDLDLQDILCSQDARSAFLGCSPQLSNAHPNLYRAAQQCLSPPGLYGSVCVPNPADVHLARAGHLASFPQVYI

SEQ ID NO: 176809 - protein, 35 aa, Oryza sativa
  Clone ID: PAT_MRT4530_74522C.1.pep
YSVSREILKRLFMYINKLPVSVPDVIFSIYDFLIK

SEQ ID NO: 176810 - protein, 68 aa, Oryza sativa
  Clone ID: PAT_MRT4530_74523C.1.pep
RPIWCRGVCGDPLFVGGVWGCVGAFFFSRGAPLCGPGCTGVKNHIYTVGISPCVNPRCKGKGVRVGGP

SEQ ID NO: 176811 - protein, 479 aa, Oryza sativa
  Clone ID: PAT_MRT4530_74524C.1.pep
MAILPAIIAVHTYSLLYVVCSYIYNMINALLLFYKKKKKKNPQPPQNRGNVAALGKQKAVVAGRPDAKNRRALGEIGNVMNVRLPEGKPLQQAPAGRTANFGAQLLKNAQANAAANKQNAVAPAAVARPAQRQARKAPVKPAPPPPEHVIEISSDSDQSMRQQSEGSASSVRKCSRKKVINTLTSVLTARSKVACGITDKPREVIEDIDKLDGDNELAVVDYIEDIYKFYKVAENECRPCDYIDTQVEINSKMRAILADWIIEVHHKFELMPETLYLSMYVIDRYLSMQQVQRRELQLVGVSAMLIACKYEEIWAPEVNDFILISDSAYTREQILAMEKGILNKLQWNLTVPTAYVFIMRYLKAGASADNKSDKEMEHMAFFFAELALMQYGLVASLPSKVAASAVYAARLTLKKSPLWTDTLKHHTGFTESQLLDSAKLLVTSHSTAPESKLRVVYKKYSSEQLGGVALRSPAVELCK

SEQ ID NO: 176812 - protein, 67 aa, Oryza sativa
  Clone ID: PAT_MRT4530_74525C.1.pep
ADVPPTKHEEERDREITSAAPSAHPHWPRIPSRTTPKPVVRAAKERAVLARSIGVRLRRLRLVHRAG

SEQ ID NO: 176813 - protein, 50 aa, Oryza sativa
  Clone ID: PAT_MRT4530_74526C.1.pep
EDEEVRRAVAECPVVEVGMFAMCLSHVVKLLLQGMGETIVVHEVAGEAEL

SEQ ID NO: 176814 - protein, 297 aa, Oryza sativa
  Clone ID: PAT_MRT4530_74527C.1.pep
MANKSSLLQLLLIAAVASQFVSSQAGSIAIYWGQNNGEGTLADTCATGNYKFVNIAFLAAFGNGQPPVFNLAGHCDPTNGGCASQSSDIKSCQSRGVKIMLSIGGGAGSYYLSSSEDAKNVATYLWNNFLGGQSSSRPLGDAVLDGIDFDIEGGTNQHWDDLARYLKGYSNSGRRVYLTAAPQCPFPDACIGDALNTGLFDYVWVQFYNNPPCQYSSGSTSNLADAWKQWLSVPAKQIFLGLPASPQAAGSGFIPADDLKSQVLPVIKSSGKYGGIMLWSKYYDDQDDYSSSVKSDV

SEQ ID NO: 176815 - protein, 80 aa, Oryza sativa
  Clone ID: PAT_MRT4530_74528C.1.pep
MLQLRLQPPRFTPLPRRRVAGGGHHRRRRAAVPPPPLALRFQWRIPDVDADAVQERVRSWLSRARGAIADAANAAREKGR

SEQ ID NO: 176816 - protein, 336 aa, Oryza sativa
  Clone ID: PAT_MRT4530_74529C.1.pep
MAGRARWVAKYTKGLVDVLHENNISHYRTQNGWRTDGWRKIVSEFNDRYPDAKFTKVQIQEHETQLKRDYRLVKLILQREGVTWDQNASMIRTTDEIWDEIIEEMPKARKYQFKSFPLLQSLEVLFEGDIPEGEHNLMPSKPQLAGRNVDEGGNNMSTAPSIPGRPCSTVIAGIDDGENNIGILQRTPELGQQGLDDVDILQNPTEEVLERPQHGADPKPQSADEPAHSSSCIEPQKDKRKKRKVPDIQQTMEAFLEFRMKQARLKEQAKKEKKDGEPFSISTCIKALHSMTDVSDQVKILASDVFKDAANREIFLSYDLRLRTLWIKREVNRLLT

SEQ ID NO: 176817 - protein, 192 aa, Oryza sativa
  Clone ID: PAT_MRT4530_7452C.1.pep
MAAATEEQLRITGSVVPGVGEVEEVDEATEGGRLGRGDDDEILRFMDSVDGYLLLMDSLSSVLRPGWLDLASARHSMGTSRVSSTLFDHKEQSAASKLQVVDSADSQSSEPNPHFILSKWCLQEKSNSNDAVGVRDTTKPKLRYRGSAATPEDGSHDSDATPAESATSVDTSSHVQKARSKALSTFGALHLN

SEQ ID NO: 176818 - protein, 342 aa, Oryza sativa
  Clone ID: PAT_MRT4530_74530C.1.pep
MATPAASPLLLPLPLPLPASTFPPRRAVPCARRLVLRPPRAGRPRLRDPPPAAPPPAAEEVGEEEEDDDAPPLRLLEPPQEDDPFPPEVLNLFPPSCFRCSHLFCSRACMHDEQCRRVQMEPADPDFYRIGYARMMRAYGVEFLEGPDGMAVYASRDVDPLRRARVLYAYISSAAFYNAMQIIKYGVIMEIPLELMLTITQKRPWMFFPDIIPLGHPIFDIIESTDPETDWDLRLACLLLYAFDVEDNFWQLYGDFLPSVDECTSLLLAPKHKTIPLKLKRLAPDHERFLLGLRRRRRRRWARNRSNQRRRRRPPSRRRISSTPLGTMTWRTSSRCSPPVFP

SEQ ID NO: 176819 - protein, 292 aa, Oryza sativa
  Clone ID: PAT_MRT4530_74531C.1.pep
ATPAASPLLLPLPLSFPAFTFPPRRAVPCARRLVLRPPRAGRPRLRDPPPAAPPPAAEEVGEEEEDDDAPPLRLLEPPQEDDPFPPEMEPADPDFYRIGYARMMRAYGVEFLEGPDGMAVYASRDVDPLRRARVIMEIPLELMLTITQKRPWMFFPDIIPLGHPIFDIIESTDPETDWDLRLACLLLYAFDVEDNFWQLYGDFLPSVDECTSLLLAPKDDLMELEDQDLATKMLKNQKRAIDFWQKHWHKTIPLKLKRLAPDHERFLWALSIVQSRSVNLKLRMGAFLQDAN

SEQ ID NO: 176820 - protein, 56 aa, Oryza sativa
  Clone ID: PAT_MRT4530_74532C.1.pep
ESTPTLFSLRHCSKALSLWRTMKGASPHTKLKGKLGPLLQGIKHQSGCNVRNAAHL

SEQ ID NO: 176821 - protein, 157 aa, Oryza sativa
  Clone ID: PAT_MRT4530_74533C.1.pep
MGHFLGRKTSPCRMWAQGGADGIVGPSQPRDLLTWAGEKAGANDDDGDGFNEEKDEHLTIAAPPPFPPSSALPTDLDDVLFFLLSPETHGSREVMRPTAVAAAGNKLTSSIEQTFSMKAAEPTSTDPTGTPKPSYMHTCSANFRGTTCTALQRPTAA

SEQ ID NO: 176822 - protein, 99 aa, Oryza sativa
  Clone ID: PAT_MRT4530_74534C.1.pep
AELVTAPPSGAIPRSPGKGKNSGGGGGGGAPMTRGKQKIDAQRRNAEKNQKSKGSQLEARAVGLKVICPICKVQLANEKQLIDHYGSKHPKEKPPSPSE

SEQ ID NO: 176823 - protein, 119 aa, Oryza sativa
  Clone ID: PAT_MRT4530_74535C.1.pep
MAKIIDLSMEKVYLLHVVICLLHGEWYREDAEFGLIRFQDDNKPLVLSESKNSEQENLKNTKSLSQLSSAIARSGGARQWQGCGIFYAKEEVVPGGGHAWCAMCGVWIGDLATTVIGLT

SEQ ID NO: 176824 - protein, 1492 aa, Oryza sativa
  Clone ID: PAT_MRT4530_74536C.1.pep
MLDLLLKTLEDIEKMRTEAEERNRADLNEFMAAVEARLPQVEKRVGDLHSSLGDLSAKVEQLESAMLRQAKAEKAVGDIKEEPTAASPSPTPSFIHGMRDPMLNSISPFVVESAGVPEGGSGSTGIIVGSVPPMTCPQFNGDNPQMWKANCEVYFNVYGIPPGQWVKVATLNFVGNAAFWLQSVRNQLIGITWFDLCERVCARFTRDRHEAMVRQYIHIRQTNSVSEYVERFDCLMHRLLAYDQTVPALYFVTKFVDGLKDEVRRSVMMMRPQDMDVACSLALLQEEAMEGSRPTPYKRTEGSNYVKTSSKLTAPTLSMTREPNQINTEERRTADSNRPKEDRLAALKAYRRSKGLCFTCGERWGRDHKCATAVQLHVVQELLEVLQGDSGEDSPTESSPEREDIIVMAISQQALNGTESRNSIRLRGWIQGTELLMLIDSGSSHSFIDEKIGKSMSGVKLLTKPLKVQIADGGELVCSQVIPNCSWWTQGHNFSNDFKLIPLGGYDIILGMDWLEQYSPMKIYWVNKWVEFQYQNQWLRVLGISSSTTSYAEISVEQLMSLAKMGSIMYMVKITDHQNTEEQSYPDSIKQILLEYHDVFDEPSELPPERYCDHQIPLIEGAKPVSLRPYKYNPELKDEIERQVKEMLDSGVIQPSQSAWSSPALLVRKKDGTWRLCVDYRHLNALTVKSKYPVPIIEELLDELSGSKWFTKLDLRAGYHQIRMKPGEEHKTAFQTHLGHYEYKVMSFGLIGAPASFQGAMNDTLSSVLRKCALVFFDDILIYSPDLQSHCQHLTQVLQLLRRDHWQVKISKCSFAQQQVSYLGHVIGVHGVSTEPRKILDVQNWAVPTTVKKLRGFLGLAGYYRKFVKDFGLICKPLTQLLRKGVPFKWTAATEVAFQQIKQALITAPTDASDGGIGAVLSQEGHPIAYLSKALGPRSKGLSTYEKECMAILLAVEHWRSYLQHQEFMILTDHHSLTHLSDQRLHTPWQQKAFTKLLGLQYRIVYRKGSANSAADALSRKDLGDSAQILAVSSCSPSWLQEVIQGYEQDKFSSQLLAELSLNPKAREHYTLQQGLIRYKGRIWVGNNTDLQLKLIKELHDNPAGGHSGFPVTYRRIKHLFAWLGMKQQIQQQLKQCQICQQAKPERVKYPGLLQPLPVPKGAWQVISMDFIEGLPTSDKYNCILVVVDKFSKYAHFLPLTHPFTAFSVATVFMKNVYKLHGMPQVIISDRDRVFTSQLWEHLFTKSGTKLHMSSSYHPQTDGQTERVNRCLEIFLRCFIHVTPTKWANWLYLAEFWYNTSYHSSVHKTPFEVIYRYQPTHFGISMHDCEIPDLDLWLKDRDLINQLIQQHLHQAEQQMKAYADKNRTFREFQEGDWVYLKLQPYVQSSVARRANHKLSFKYFGPFQVLQRVGLVAYKLALPPSCHIHLVIHVSQLKVARGYNPHVLSTEPFQWNHWQSPQQFLDRRITKKGTGLGASRFPRKGECQDKQGS

SEQ ID NO: 176825 - protein, 605 aa, Oryza sativa
  Clone ID: PAT_MRT4530_74537C.1.pep
MADMKQEEDELAVDPGVGAVCDPVTKLRFEAIVCLLDRIPITLQQIDMFGQDVAFRTKRIGNIEALLDFLKGSAAATWGARAGAGEPIDASSPELHRLVEDAETAYRDVRGLQPRMVVQMPRVFHKVCLPKLHQLLVIARRLLAQNVALRRLLLQPVGCDVSPMALAEAAVSSDDFERHGRNKVVIDEFGYEDLLRRRHTGHESQNDADDAEQHGREVREGEYEDLILMRHRDTSHELLQDDARRRRADAEAEQQGGDGEVRDEYEDYLCRQLGAVYSGPDQIYEHDMRGPEPAHSPNTPDQIYVPCERMLPYPSNCDNAEDRIHMACLALKNLVKDMEGIYSPRGTLWQYLEDVISLAHALFLENTKLHRFTDQASHQDLPLQPPQGFPFQQQPQHDGYQQPGVPFQQPQQGGYYGHGQGIMFQRGGYLQDVPFQHWQWQQGGYGQGFMFPQAQHQGGYGQGFLSEQPLPGDPSFMNMQAPYDGDGGVLFQKPQHYHHGHVPSEKGAIQAKGKQKMREPKTVMCPDWCRTGHCSSGDGCEYAHSQDELRVIDARPKYRTEPCRYWLAGKGCWYGDKCRYKQHRLAREPLYVDPFLTGHELRNKT

SEQ ID NO: 176826 - protein, 57 aa, Oryza sativa
  unsure (1)..(57): unsure at all Xaa locations
  Clone ID: PAT_MRT4530_74538C.1.pep
VFNYCTITNGXPDEKPHQLGQYITGNHVKVQLCPTSLKISSPNQHLKFQSEAPSHLC

SEQ ID NO: 176827 - protein, 592 aa, Oryza sativa
  Clone ID: PAT_MRT4530_7453C.1.pep
GARTQPAPALRRLSCQQLRRATGGFAAGSKLGQGGFGPVFRGALPRSGQAVAVKVMDAAGSLQGEREFHNELSLASHLLGCGHGHGSPSILLPFAYSLSAQPRRRRMMLVYELMPNGSLQDALLGKRCPELVSEWPRRLAVARDVAAALHYLHSVAQPPVIHGDVKPSNVLLDGELRARLSDFGLAQIKSEERDELESAAIEGNGNESSNPCGGCDDDMSVADENATAVAVNGEDNAAKSPEDDEGFTMASPAEAASTSGCDKTSVSSGLNGRSCNGGGAAASGAGNDWWWRQDNGGGSGGVKDYVMEWIRSEIKKERPKNDWIAGASATTPATSTERKKTKRRAREWWREEYADELTKKQKRRALAKSRSEIGPMASMQWWERDCDLEEKGRSRWRMMKSWSRRSSNGNGSIDWWIDGVRRSSRDWASGEFVPKSGGAVSSTPSMRGTVCYVAPEYGGGGPLSEKCDIYSFGVLLLVLISGRRPLQVTASPMSEFEKASLISWARHLARVGRLLDLVDPALRDVNRDQALRCITVALLCIQRSPSRRPSSEEVLEMLSGEGEPPNLPVEFSPSPPGGFRFRSRKKDLDGEK

SEQ ID NO: 176828 - protein, 107 aa, Oryza sativa
  Clone ID: PAT_MRT4530_74540C.1.pep
MDPPPPGRGEDRSATAEPWGGWICRRQSIGSTDLPPPSRGGTDPPPPGSSNRLPTPRSGGCGSGHGLQRAMSRGDGVPELAFLSLFHHKHLIGFLGYCEENDKQLLI

SEQ ID NO: 176829 - protein, 1021 aa, Oryza sativa
  Clone ID: PAT_MRT4530_74541C.1.pep
MEDTATGELQRGAWSHGRQRILRGDRDGAGAEHQCGAWTAEDPAWYQVLIPYQYQAILARYQVILDTYKEHIPVEEVLDHLKCTREGLTSEVAQQRIHSFGYNKLEEKQESKLLKFLGFMWNPLSWVMEAAAIMAIALAHGGRDARGKRMRIDYHDFVGIVLLLFINSTISFMEENNAGNAAAALMARLAPKAKVLRDGTWDELDASLLVPGDIISVKLGDIIPADARLLEGDPLKIDQSALTGESLPVTKHPGDGIYSGSTCKQGEIEAVVIATGIHTFFGKAAHLVESTTHVGHFQKVLTSIGNFCICSIAAGMVIELLVMYAVHERKYRQIVDNLLVLLIGGIPIAMPTVLSVTMAIGSHKLAQQGAITKRMTAIEEMAGMDVLCSDKTGTLTLNKLSVDKNLIEVVFEKGIEKDDVVLMAARASRLENQDAIDFAIVSMLPDPKEARAGIQEVHFLPFNPTDKRTALTYLDAEGKMHRVSKGAPEQILNLASNKCEIERKVHHVIGNFAERGLRSLAVAYQEVPEGTKESPGGPWQFVGLLPLFDPPRHDSAETIRRALDLGVSVKMITGDQLAIGKETGRRLGMGTNMYPSSSLLGDRKDGDIAVLPVDELIEQADGFAGVFPEHKYEIVQRLQARKHICGMTGDGVNDAPALKKADIGIAVADATDAARSASDIVLTEPGLSVIISAVLTSRAIFQRMKNYTIYAVSITVRIVLGFLLLACFWKFDFPPFLVLVIAILNDGTIMTISKDKVKPSPYPDSWKLTEIFATGVIIGAYLAVTTVLFFWAAYKTQFFVHLFNVDTLNINKVDTTDNELVARNTEKLASAVYLQVSTISQALIFVTRSRGWSFLERPGLLLMAAFVIAQLIATVLAAIATWEVASIRGIGWRWAGAIWVYNIVVYLLLDPMKFAVRYGLSGKAWNLVIDNKVAFTNRKDFGREARVVAWAHEQRTLHGLQSAASREKAASTELNQMAEEARRRAEITRLRELHTLKGKVESVAKLKGIDLEDVNNQHYTV

SEQ ID NO: 176830 - protein, 131 aa, Oryza sativa
  Clone ID: PAT_MRT4530_74542C.1.pep
TRRPHLLSRIAPLLSSPASLLASPTSSRASLPSSPLPHRAAPPAHAHRLPSPASLLPSPASRAAAPPTPPPHPRRTASTLHPASPPPLAPLFASPLAPSAPPSPRFCDPHRPNDGCLSFSRAVPIPYPREA

SEQ ID NO: 176831 - protein, 406 aa, Oryza sativa
  Clone ID: PAT_MRT4530_74543C.1.pep
MEMAIDTPSPSPSASSAAAGRQTRAAESVRLEHQLLRVPLEALKSTVRTNHRLAEKEIAAVLSSAAAAPGGGGGGSGDAAAVDHLTSLVSRLHGLKRKMEEGARAEELQVQRCRARLNRLASASSGDDAEWEELRLKRILVDYMLRMSYYDTAANLAETSGIQDLVDVDVFLDAKRVIDSLQNKEIAPALAWCAENRSRLKKSKSKLEFFLRLQEFVELVKAKNFMHAIAYARKYLSPWGATHMKELQRVTATLVFRSSTNCAPYKVLFEQNQWDSLVDQFKQEFCKLYGMTLEPLLNIYMQAGLTALKTPFCFDGNCPKEDPLSLPGFRKLAEPLPFSKQHHSKLVCYITKELMDTENPPLVFPNGYVYSTKALDEMAKKNGGKVTCPRTGDICNYTDLVKAYIS

SEQ ID NO: 176832 - protein, 100 aa, Oryza sativa
  Clone ID: PAT_MRT4530_74544C.1.pep
MMVVTVGMVGNTLQQSLGLHLNRPAKTWIQRRQGMFGRTTRFGRTWGRPNTAKFELAASSVAPVRRLVNFGPIHHVNSEFLAHSYISLVLDTIRLIYRLC

SEQ ID NO: 176833 - protein, 76 aa, Oryza sativa
  Clone ID: PAT_MRT4530_74545C.1.pep
GGPLPSPKPKPFSKPKPKPEPSTWASTAYPKTKPKPDTNEKTNGFFKKKKNLNFFLGGKKKKGFSKGGKTNAKGEK

SEQ ID NO: 176834 - protein, 275 aa, Oryza sativa
  Clone ID: PAT_MRT4530_74546C.1.pep
MKRKRPAALRGGEEAAAAALKRGPWTPEEDEVLARFVAREGCDRWRTLPRRAGLLRCGKSCRLRWMNYLRPDIKRCPIADDEEDLILRLHRLLGNRWSLIAGRLPGRTDNEIKNYWNSHLSKKLIAQGIDPRTHKPLTAAADHSNAAAAVAATSYKKAVPAKPPRTASSPAAGIECSDDRARPADGGGDFAAMVSAADAEGFEGGFGDQFCAEDAVHGGFDMGSASAMVGDDDFSSFLDSLINDEQLGDLFVVEGNDHEHGNGEIGHGDVMESKQ

SEQ ID NO: 176835 - protein, 249 aa, Oryza sativa
  Clone ID: PAT_MRT4530_74547C.1.pep
MGSDRIGSSLCLTGGLAPRRGEAAADVAALRTARRRAEVGEDVGAAGEATAPGAPRGRRGARRPRARRRGRRRAAPPYSGGGAAAFEESGASVAPIAVDLAPIVKSLRGLDVDCQDLPRAGLRGVDGAMWKRRRTAPQFFSCNLFSQFDVHSECSDHEVSVETTKSQKHHLKKIKHNDVMEPGMRIHLPVSVAEGEIRDEIEKACHPQETGAGVVAGDLALRVTPIPAHKMAPLQGLRGDRNGEEGDDG

SEQ ID NO: 176836 - protein, 62 aa, Oryza sativa
  Clone ID: PAT_MRT4530_74548C.1.pep
EKPLTQYTIQKSSTKHVSRNSFTWKHLVPILFSSHLAFISTHGDDRNSCITAHVIIEKKGKK

SEQ ID NO: 176837 - protein, 116 aa, Oryza sativa
  Clone ID: PAT_MRT4530_74549C.1.pep
LAATVHCPTPVRHRPSPADQERIHPVPNPCSTAPVCRVHRIDLATTRRRAAPCLRTAGHREPRVEHFRASPTASHLCFVCTAPRVAALRRLSILATTQNQYHCRDKCDTSPTPWRS

SEQ ID NO: 176838 - protein, 57 aa, Oryza sativa
  Clone ID: PAT_MRT4530_7454C.1.pep
RSPVLRTHDKQTDSTTCRFVRCVCRTATRPSRLRLPRLLPRGRRHFVPLYRPLHLQP

SEQ ID NO: 176839 - protein, 87 aa, Oryza sativa
  Clone ID: PAT_MRT4530_74550C.1.pep
RRCAFLQESVRACTRCSRCTYGYRIYALIHLVPVHGCSLPCFVLLLPLSFPFFTSFYILFILIPLFISSLFPFDFFFPYSGMIFIFF

SEQ ID NO: 176840 - protein, 589 aa, Oryza sativa
  Clone ID: PAT_MRT4530_74551C.1.pep
MGDHKAVFISLQELFPQVDPRILKAVAIEHHNDVDSAVVAILDEVMPSVTSTSPPTVSSVRQEIAPCCIATSSASDGTSETGDSSSAGHGKQVEVDENVHSTQCKSSMEITNDRQRNVVDEVESHSSYPWMNEQLHLPIRNVPEPVDISYVGHDGHLLSEYLDAILNGESGNSSTQPNVAYVHKQDSDNPIPADGCVTKDNSITLPLDYVDINDVNYSLKSSAGVSNSEDSFGTCGTYQFAHVLNIPIPDARKSSKGLGGEQDTNSIGKADLLPDLNLNHLATIASTHSVSIESLDDSISDAKSNKNDLLPSLELVSKMIQDVEVLEEKAEVAKHESSIAGTSILTKVGKLKEMLNHAKEANDMHACEVFGEKSILTTEARELQSRLQRLSDERKNYLVVIEEIRQTLEHRLVAAQQEIDAAEEKKIQKEASAQALLDEQEKEMNLAVEESRKLQKEAEENLKLKAFLVERGQIVDTLQGEMTVICEDVSQLKQIVDERLSFCKLQRSKMSSLSSSLQSSLHKSGSSADRAIEAVESTDKHTVAEGANAAVGDDPNGSKRIIHVWNGSGMADKDNGTGGDTNEDGWEFC

SEQ ID NO: 176841 - protein, 207 aa, Oryza sativa
  Clone ID: PAT_MRT4530_74552C.1.pep
NGQTNSKDDFPLGPGESEVEAAIEIRRLGRPRLPSRGTTAGLRARAGQGPSPATSRSTACACPHGGETPPAAQRPSAVAAAPHRLERPGIRRGRRHLGTGSRCRCLTRLNAATLDGISLPRPHPLEKEPPLRTCVCIGGEEPSPMQRWIGDGWQSSLPRGKSEEEMKGEIWLRPLHTEEDGGGEEVWKTLLRRRGVGSGLVPNSCSP

SEQ ID NO: 176842 - protein, 539 aa, Oryza sativa
  Clone ID: PAT_MRT4530_74553C.1.pep
MAEERESFENQWAPSDVTEENLKEMVAHGVLPAKEIIGWRPAFGEAFPTSDTHETVPQPNKSKPCVVGGAGFQLRGTLGQKYFSMLFKTSNKGWHANWFYVQNLEPALPEYSCLPPVYQDTWNSLPMGDEAAQVLTLMDCMLKLKEQVSYSHALPVVPYNAFNPPSPEFTLIKSDPPTVQRRSSRQPTEVVKTVRTAVPTVMGGCEEPPTGNQSGTTQSEDIPKAEAQADSPPKKDANADPGSKSPVKVQGSSRPRPEIITGIVINKQKEDEELCMLKKALGQATRLVNRIHLRKEAKTATLEKLVPYLGTLKATRDQLHEAKELAKKTEHDLRDRIAELQDSNFELSGSSKGNDIAQAAKISELERRVKALEKDKAELTKQRDWAQKDVEDRKIKSQAQFDVLVSKIKKLEGARDEVANAATLLVQAMFFNNNGPSSFDADEIFDKLRIAPDTYFKNIKEAGSMGAGLSLAMTKSLYPKIDIEAVDGFADGTSEEAALDLISEAQNAADKIAADVVERFQDTDLRPTGSTNSDDEKAD

SEQ ID NO: 176843 - protein, 43 aa, Oryza sativa
  Clone ID: PAT_MRT4530_74554C.1.pep
SNDMPVIRRRAMQIRKAAVGSSIQDIHRRRDKRSNLKELLDAD

SEQ ID NO: 176844 - protein, 274 aa, Oryza sativa
  unsure (1)..(274): unsure at all Xaa locations
  Clone ID: PAT_MRT4530_74555C.1.pep
MAEERESLXNQWAPSDVTEENLKEMVAHGVLPAKEIIGWRPAFGEAFPTPNTHEAVVFSLFFYGGFSLPTSCFFRGILDFYGISLHHLNPNSIVHIANFIHPNKSEPCVVGGAGFQLRGTLGPTYFSMPFKTSNKGWHANWFYVQNPEPALPEYSCLPPVYQDTWNSLPMGDEAAQALALMDRMLKLKEQGLQGEQITRHFIKTWLTPIKERSRTAYEFDGKHDPNREDPESLEFKIMQERMYKIFSNAIVVSYSHALPVVPYNAFNPPPPVCM

SEQ ID NO: 176845 - protein, 118 aa, Oryza sativa
  Clone ID: PAT_MRT4530_74556C.1.pep
MASTGSRTLESISSDAGTSAELPAWGRGGPARCAAEGRRVPPLNGVRHNRMLEKIVSKETKTTAELFQLADKVARKEEAWAWNSPGTGAVAAATPESVPRSKRRDRRGKRKLARSDDT

SEQ ID NO: 176846 - protein, 76 aa, Oryza sativa
  Clone ID: PAT_MRT4530_74557C.1.pep
MAAPIPTLFPQPQATTAANASEGPLLSPPSATKAPSSNGRHHVLAESEAGGFGQRLAAVTGFPSLPYAYEEDNWIS

SEQ ID NO: 176847 - protein, 331 aa, Oryza sativa
  Clone ID: PAT_MRT4530_74558C.1.pep
MRRLLTSYPYSRPSPPHPQPCRDGSADVVPAADQQWRWSRRACSPHSPIVAAPTTVPSRIRRRRARHRSAVEVEPSRLPPPTPHPQSPVATVPAAEPSPPPLSKSLPPANSGKAAQPRPPSPSVAVAVVGFAKGGEKSVGVAGESIASGFEGEIMIQERCTVEAALKPTWLPPRGVEPGVKRRLPHPSLGSDCHDPLHPHHAAFNAACCASDRSVTGRMTDATATVYPRLVSVSGGVRRAPSRPIIMRSFTASYPGQSWSNHSELTRPHRRYHGSVNPSESLQIHATIIEAAWGDDRVKANFFPKALQGQARGSLMNLPPASVYSWENSCS

SEQ ID NO: 176848 - protein, 62 aa, Oryza sativa
  Clone ID: PAT_MRT4530_74559C.1.pep
KQNGLKTIGCPSMHFSVKNTRHWVSIYTNGSMFFSAMAQAQSYPLHTDHDFLLENSAHLQHI

SEQ ID NO: 176849 - protein, 91 aa, Oryza sativa
  Clone ID: PAT_MRT4530_7455C.1.pep
MALMLAAAAREWTPCAAMVAAQCIYAAMTLWAKAMFGRGVSPVIFVVYRQAIGTLVLVPITLLANRAKVKETRSLGTTGLFLVFVTALLGH

SEQ ID NO: 176850 - protein, 213 aa, Oryza sativa
  Clone ID: PAT_MRT4530_74560C.1.pep
MDANPPTTAMYPLHRCKTIYLVRHAQGVHNVEGEKDHSAYMSPQLFDAHLTPLGWNQVDCLREHVKKSGLAQKIELVITSPLLRTMQTAVGVFGGENSVDGIENDEDVLWEPNVREANSSVAARGMKFIDWLWTREEKEIAIVSHSGFLYHTLSMYSRECHPTIREEVGKHFANCELRSMVLVDTSMLGSDSPSYNYPGSIPAGLDLPSDAAP

SEQ ID NO: 176851 - protein, 54 aa, Oryza sativa
  unsure (1)..(54): unsure at all Xaa locations
  Clone ID: PAT_MRT4530_74561C.1.pep
YVTISRTANFHWCXDNSTRSLVLEPXVAISRTANFHWCSRDNSTRSLVSNQYAA

SEQ ID NO: 176852 - protein, 48 aa, Oryza sativa
  Clone ID: PAT_MRT4530_74562C.1.pep
MSRRSLKFHADVMFKRNATTNPKWPIFPSHPHERGNIRYIGHNPPGQD

SEQ ID NO: 176853 - protein, 330 aa, Oryza sativa
  Clone ID: PAT_MRT4530_74563C.1.pep
MVQLLQHSHLHTVFAAATTTIGVGQFPRRRAKFPTSLVLLPRCTSSSSSSSSGAPMDANPPTTAMYPLHRCKTIYLVRHAQGVHNVEGEKDHSAYMSPQLFDAHLTPLGWNQVDCLREHVKKSGLAQKIELVITSPLLRTMQTAVGVFGGENSVDGVSAPPLMVENAGHSSRPAISSLNCPPFLAFEACREHLGVHPCDKRRSITEYRALFPAIDFSLIENDEDVLWEPNVREANSSVAARGMKFIDWLWTREEKEIAIVSHSGFLYHTLSMYSRECHPTIREEVGKHFANCELRSMVLVDTSMLGSDSPSYNYPGSIPAGLDLPSDAAP

SEQ ID NO: 176854 - protein, 150 aa, Oryza sativa
  Clone ID: PAT_MRT4530_74564C.1.pep
PTRPEFWREAAIISKLHHPNVLALYGIVNNGPGGTLATVTEFMINGSLKKVLLHKNKYLDWRKRIMVAKDAAIGMEYLHSKDIVHFDLKCDNLLVNIKDPSRPICKVADFGLSKMKQATLVSGGMRGTLPWMAPELLTMSGTKVSEKNDV

SEQ ID NO: 176855 - protein, 255 aa, Oryza sativa
  Clone ID: PAT_MRT4530_74565C.1.pep
KKEETNPNLDLDGEGGAGAGASSGRSLLPKGSGRFRRSSARCSLPKGSDRFRRSLSPVNSRSLLEGRDVRDAVFPNKLFDKAFGQPLPAPLVGDGKMQMDVEGAPLVGDGKMHMVVESTPLVGDGKMHMVVEEEMTTALAVHQPSSQRSQRIIVIEMMADVGSPSSPGSPYSPSSPSSHRDAPSVRFSSRGIRNHKMPQCDIDRSDTEEDLYSSCEEDPYFNSLVDDFIGAVTSTDLLASSPEIDYMAANQSQSL

SEQ ID NO: 176856 - protein, 46 aa, Oryza sativa
  Clone ID: PAT_MRT4530_74566C.1.pep
LPTGYPEVVVYCAFSYFMLLGLINRPYHVFPSIHRLDHYSTRIAFC

SEQ ID NO: 176857 - protein, 269 aa, Oryza sativa
  Clone ID: PAT_MRT4530_74567C.1.pep
MSPPSVIGQFGDTTYTKVFVGGLAWETQKETMRKYFEQFGEILEAVVITDKNTGRSKGYGFVTFRDPDAAMRACVDPAPVIDGRRANCNLASLGVQRSRPPTPQHGGARSFRVMKSFSQQAGIQGGLGAAFPSHATFPHYAIPQGLPYHVYGYSPYSPDYSYPTNYYNIYGGAQYPFYGAAAAAAAAAAGMVTGSSPFYPYFQFGQSGSTTTNYASGQGYNLQYPQMFHFSTVASTAAAVTGFAQQYGGPLSLAASPQAQAVCVPIKQA

SEQ ID NO: 176858 - protein, 192 aa, Oryza sativa
  Clone ID: PAT_MRT4530_74568C.1.pep
GRDVRDAVFPNKLFDKAFGQPLPAPVTPSLARVPARVRRPNLPTPSEPHGLNFNAPLVGDGKMQMDVEGAPLVGDGKMHMVVESTPLVGDGKMHMVVEEEMTTALAVHQPSSQRSQRIIVIEMMADVGSPSSPGSPYSPSSPSSHRDAPSVRFSSRGIRNHKMPQCDIDRSDTEEDLYSSCEEDPYFNSLGD

SEQ ID NO: 176859 - protein, 193 aa, Oryza sativa
  Clone ID: PAT_MRT4530_74569C.1.pep
MPQCDIDRSDTEEDLYSSCEEDPYFNSLVDDFIGAVTSTDLLASSPEIDYMAANQSQSLFYAESALKHYNNNDENKIKYELISAITSNAIIDRSGYGHVNFVAKGDLPDSVDEFFFAEVRWDIDSYVPVCMVSLEGKEKSGGYRDIEVDYPRGGFVGVPVDKNHCYACGDGLKHPEDGTLYESGHIASGSYYD

SEQ ID NO: 176860 - protein, 56 aa, Oryza sativa; identical to SEQ ID NO: 127998
  Clone ID: PAT_MRT4530_7456C.1.pep

SEQ ID NO: 176861 - protein, 405 aa, Oryza sativa
  Clone ID: PAT_MRT4530_74570C.1.pep
MWPGCGGRFYWAPAPPSPSAAGARGVVVVFGWVWSDEAQLRPFVELYASLGWRCLVCHPDLVALYLSEKAASLASGVISELVKEFKVKPLPTVFASFSGGSKGCMYKVIQLLDGNCEGDATMKDYRLVRNCICGQIYDSGPVDFFSDVGTQFLQNPMIGNSSRPSMLLSWMTKALASGMDTLFPSRIEAQRAEYWHTLYSSAGLGPVLMLCSEDDDLAPCHVVCGFARRLIELGTDVKVIKWSDSPHVGHYMLHEAEYRSAVNDTLIKALVTFCHRSQLNATSDQEYKIAHSVCSLHNVAANSNERLRRVANGPSDHFFLPSSKDHNESRDPDSLIDEQRRQLSYPPSMEPQGVLGQILFDVCVPKNVEGWDIKPTVSPNGRPTLASARQLGPFNPIKYFRRSRL

SEQ ID NO: 176862 - protein, 258 aa, Oryza sativa
  Clone ID: PAT_MRT4530_74571C.1.pep
MPIEAVAVASLPMASRSAALCFSSAAAARSRSRSRHGRMAVSCDAGASDLLYSSLAAKLLGPPTSFDAGKLTVEFAHSHGNSSSGFPRAYTLTHCDFTANLTLAVSDTIAADRRLRADDVFAEWKQQQQQEGMALHVHCFVSGANLLHGLAAGFRYYVFSKELPLVLKAVVHGDALLFAEQPELLEAKVWVHFHSSSNAKYNRLECWGPLREAANAETTHKRHALEQLHNAITKGTRRRRRKWSSPDAIFSALLALLL

SEQ ID NO: 176863 - protein, 140 aa, Oryza sativa
  Clone ID: PAT_MRT4530_74572C.1.pep
FRGRLNTNDNRVRKCWASDPHCADCPAIESADHIVLRCKLASEIWKKINLFDQAAHRSNILQFVEEGLLVTPAHLKPGWPICFAACSHNLWKARNQKTFNQREYTAAAVMHQIRECLQMWENRVMPQCRTLMRSWAALLA

SEQ ID NO: 176864 - protein, 170 aa, Oryza sativa
  Clone ID: PAT_MRT4530_74573C.1.pep
MESHLNEQQISDFRDAFSLFDKNNDGCISREELATVLTRLGMAPSQEDLQDMIVAVDEDGNGTIEFDEFLAIMKKKLYENDKGDDEEELRKAFRIFDKDDNGFISRNELSMVMASLGEEMTEDEIDDMMKAADSNNDGQVDYEEFKRVMMSTWNITEIFKPHVTIWRYKP

SEQ ID NO: 176865 - protein, 49 aa, Oryza sativa
  unsure (1)..(49): unsure at all Xaa locations
  Clone ID: PAT_MRT4530_74574C.1.pep
AHACVNIVSGSCFPGNAVFLVXKKKKKKKKKKKKKKKKKKKKKKKKKKK

SEQ ID NO: 176866 - protein, 300 aa, Oryza sativa
  Clone ID: PAT_MRT4530_74575C.1.pep
MEITVKMSAKVKRIRFADSQTGCEGTTPTNLGSEVLLTLSLLGLLVSTNPGVEHCKLVASLFSVGFLTMDPMVKGPNLTRCSAALASEACRALSKTHHEKLEEIGLDAVACMKLESLEKPDLIQWLMDRTGPNSMCILIDDDRKIQITPRTVHLVMGNPLGGKDIVIPPNKVVRNTHDRITEELGIQRNAQLSSKMLIEVIKNREDDPTAVCFFVMVIMSKLLLPTTDFYIPKSDVWVAADLDRVASIDWSKAVFQALSHSLRCWRQNPGSSIASCVVCLVFMEVYDGKREPIEALQIPV

SEQ ID NO: 176867 - protein, 412 aa, Oryza sativa
  Clone ID: PAT_MRT4530_74576C.1.pep
MAFEKIKVANPIVEMDGDEMTRIFWQSIKDKLIFPFLDLDIKYYDLGVLHRDATDDKVTVEAAEATLKYNVAIKCATITPDEARVKEFNLKQMWKSPNGTIRNIINGTVFREPIICKNVPRLVPGWTKPICIGRHAFGDQYRATDAVLKGPGKLKLVFEGKDEQIDLEVFNFTGAGGVALSMYNTDESIRAFAEASMTTAYEKKWPLYLSTKNTILKKYDGRFKDIFQEVYEAGWKSKFEAAGIWYEHRLIDDMVAYALKSEGGYVWACKNYDGDVQSDFLAQGFGSLGLMTSVLVCPDGKTIEAEAAHGTVTRHFRVHQKGGETSTNSIASIFAWTRGLAHRAKLDDNARLLDFALKLEAACVGTVESGKMTKDLALLIHGSSNVTRSHYLNTEEFIDAVAAELRSRLAAN

SEQ ID NO: 176868 - protein, 554 aa, Oryza sativa
  Clone ID: PAT_MRT4530_74577C.1.pep
MAIPPLAVSGVAVATLAVLGLAVFACRRWRRGASPAPPPPASSQDDDINMPLISDNLDDYSVSSNSSTVDESGIRIDRIITSPKTHGIVGKGATYPTESHVIEGETHVIDVTNSKTEELYLGNTLKRPAVANGPTPDVKHIRRDSGESNHNGTIPDIIVGSNLALEVIAGPSHGINHYMQSGNKSMLPVTLGRVPPSHLVLKDSEVSGKHAQIDWNANKLKWEIVDMGSLNGTFLNSRSVNHPDVGSRRWGEPAELADGDIITLGSSSKVSVQIELQNQQPVGVGIASDPMTARRTGKKLHMEDVSCCQYPLIGVEKFGLFGIFDGHGGDGAAIAASRILPQNIANILSQQETKERVLSCHSASDVLRHAFALTEAALHHQYEGCTATILLIWFDQNEDCFAQCANLGDSACIMSVNGEIITMTEDHRVVSTTERARMANSGQPLKDGESRICGLNLGRMLGDKFLKEQDSRFSSEPYVSQAVRMTKACLASALIASDGLWDVISANRAAQLVLELISFVKVEPGAPVLQRMNATVLLVCKYPGSPLCGYACKL

SEQ ID NO: 176869 - protein, 578 aa, Oryza sativa
  unsure (1)..(578): unsure at all Xaa locations
  Clone ID: PAT_MRT4530_74578C.1.pep
MEQLPKRPANYVPLSPVGFLPRANAVYGDRTSVIYGRVRFTWSQTYARCRRLASSLLSLGVRNHDVVSVLAPNVPAMYEMHFAVPMAGAVLNTINTRLDARAVAGILRHSEAKVFFVDYQYVRLASDALQIVADEGRHVPLVAVIDDIDVPTGVRLGELEYEGLVARGXPAAELPSLADEWDAVTLNYTSGTTSAPKGVVYSHRGAYLSTMSLLMSWVVGDEPVYLRTLPMFHCNGWTFTWGMAARGGVNVCIRDARAADIYRAIARHGVTHLCCAPVVFNILLEGGEAAAKQLAAPVHVLTGGAPPPAALLERVERIGFRVTHAYGLTEATGPALACEWRAQWDRLPLPERARLKSRQGVSVLSLADADVKDAKTMARVPRDGKTVGEIVLRGSSIMKGYLNNPEANSDAFKGEWFLTGDVGVVHADGYIEIKDRSKDVIISGGENICSKEVEEVLFQHPAVADAAVVAMPHPHWGETPCAFVVARDKAAGVCEDDVVAFCRKHMARFMVPKKVVVYDAIPRNGNGKVEKNLLREAAKKLAPAAVPAQKTKVKTTTTTVGGRRGEHPVAHVMAVSRL

SEQ ID NO: 176870 - protein, 206 aa, Oryza sativa
  unsure (1)..(206): unsure at all Xaa locations
  Clone ID: PAT_MRT4530_74579C.1.pep
FTGGLSAAREGLARPGLAIGLAGLRGSPRGLSGRGGKREPLGRVHLAWSWXGPACRWLGSPXARCTRGVLGFGKGRRGARXAHGGCGXGGPTRSLTALGGARARAGLRGAADRGCLDPFAAEVAPTWPLCGSHAGRREVDDHVGRNGWRTAATNGGANHGDTGESEHTGWLYETRGDESTDQIHRREFVGGGLWRRPPAAREEGND

SEQ ID NO: 176871 - protein, 732 aa, Oryza sativa
  unsure (1)..(732): unsure at all Xaa locations
  Clone ID: PAT_MRT4530_7457C.1.pep
MPRMWVLLWSIMQNKDNPSSPTFNALTLHISSLLLIHWLCGSESKLDLCRCKNVEKASYASYYLQGAASAWWESYKTLIPPDELIGWVVFXEGFRFAHIHASLMEMXKKEFLNLKHGNMSFMEFLDCLNYLGHYATLEMPTKARKFELCRDRLNLELKHALFAHKISSMKTLADKALRVEASEKEVLEDRKWKWVARKDASSSSSTRXRLSQPTMVRYVASQPPTPQFAVSHHSAPTTVQLYSCGASSQGNQNRVANINATTYCGKLGHYSNNYPFPKTERLVPRLQGTKPQPHGPAQGHGGQQGGHIAAKPSQPIGWGRLNHVAVEETTDTSDIVLRTFHVHSAPTLVLFNSGSSHSFISTRLVNQQNLKVNLLKNAMLVQSPVATIKTNLVCNDVEILIEXVKFKANLIQLNYPSLDVILGMNWLSKQGTIDCTKNIMSLVKTDGRHITFTSDRATTSQQXITSFSINIELKSVPIVKEYPCVFPDELPGMPLDRDIEFVIDLIPGTAPIAKRPYCISSKDLVELKRQINEQLAXGFIRPSSSXVGMXLLFAPKKDGTMRMCVDYCPLNEITIKKXPLPRIDDLFDQLTGARIFSEIDLXLGFXQLKIEPEDIPKTLFTSRYGLFEYTVISFGLTNTRATFMNMMNTIFMEHLVKFGLVFIDDILIYSKNEXEHAHHLRLVLDKLREHQLYAKYSKCEFSLKEVSFLGHVLSKGGIALNRGNVLEIVRAP

SEQ ID NO: 176872 - protein, 289 aa, Oryza sativa
  unsure (1)..(289): unsure at all Xaa locations
  Clone ID: PAT_MRT4530_74580C.1.pep
MESMEERLMDDMKAVAAKVHGVDDITKHLXVDQPQVSAVGRALXDHVQTKVDCSMTSLGQVQQEXTQVARALKAAVVASPPSPSTPRQQXILPTPDSTSAASSSQPPPPLPSPPPRTPQRQVSHHDPQGHHHWTTKMDXFPMFDGTGVRMWIDNCKTYFSFYXITEGFMVSAAALNLIGXAANWYQAWKLEVGWHDLPIXKSTTSGEFDVYLRSVKMDELLLLTQTGTVNEYRSKFNELVYQIRLXLYDPLLCGLVLINHFILGLKDELLSFVQADQPTSLVQASFIHV

SEQ ID NO: 176873 - protein, 150 aa, Oryza sativa
  Clone ID: PAT_MRT4530_74581C.1.pep
MNLLGTSYVARSSHYKLALTPRYDKFPTHLCDLLSSNKDAAINYLPLTDAIGPLIDHQATSSLKEKAVSKQADVAAAWSSSGTKISKRKWVGISKPSPSVGTLVQTRSSEATLGAHYYKNRFCKRADCIFVVVAAPSTRKRDRLLKRLKP

SEQ ID NO: 176874 - protein, 71 aa, Oryza sativa
  Clone ID: PAT_MRT4530_74582C.1.pep
TDKFSRVDLWQLYEQNHGIYLPFNVQLGNYYPKKKWIPRAQRSLLNGDYRDEQIECHRKRPQIKSTAHKQN

SEQ ID NO: 176875 - protein, 96 aa, Oryza sativa
  unsure (1)..(96): unsure at all Xaa locations
  Clone ID: PAT_MRT4530_74583C.1.pep
NTPEQNMIPGSGLNHRCRTCTTLNSXFSXWTLPTPPATSIASKXRCLLIQCXXPXLHLPKXSLGCXXXMTXTXXPMXDPXDPXYSXLAKVXVXILX

SEQ ID NO: 176876 - protein, 49 aa, Oryza sativa
  Clone ID: PAT_MRT4530_74584C.1.pep
KYCLSLHHIFMFITINSSLLKISLRGSCIFLGIEFFIHTCQLSKTVFRI

SEQ ID NO: 176877 - protein, 88 aa, Oryza sativa
  Clone ID: PAT_MRT4530_74585C.1.pep
GLHPWCRISPKGRVSRNKCPPPPFLRPSFNFLAPPCVVPFPLHVLVGPPLKKPPWLWYFISPLWKACVSHPQSFVGGLLKNYFFSVVM

SEQ ID NO: 176878 - protein, 270 aa, Oryza sativa
  Clone ID: PAT_MRT4530_74586C.1.pep
MEREIVASYEPKKNNEIRMFESSDEMATDLAEYISQVSEISIKERGYFAIALSGGPLISFMRKLCEAPYNKTLDWSKWYIFWADERAVAKNHVDSYYKSTKEDFLSKVPILNGHVYSINDNVTVEDAATDYEFVIRQLVKIRTVGVSESNDCPKFDLILLSIGSDGHVASLFPNHPALELKDDWVTYITDSPVPPPERITFTLPVINSASNIAVVATGEDKAKAVYFAISDGTEGPDAPSIPARMVQPTDELAMFIRAYLDWLNSGDNSD

SEQ ID NO: 176879 - protein, 74 aa, Oryza sativa
  Clone ID: PAT_MRT4530_74587C.1.pep
MAVRRDQDDHGGAKEEEEAIHGVAATLGKPSSYVPRCWVPARAHVRHFGTVRLADARVVLLSRPVYDGIDSDQI

SEQ ID NO: 176880 - protein, 72 aa, Oryza sativa
  Clone ID: PAT_MRT4530_74588C.1.pep
AYSYTIIGRTQGRATFESSGGATTTTGDRLARRPALTRIRYRVNGRWAPTTRRKRPCTRSGTSSTSSRARAT

SEQ ID NO: 176881 - protein, 713 aa, Oryza sativa
  Clone ID: PAT_MRT4530_74589C.1.pep
MASAVERREHSRRSGRSRSRSPARDRGSPPRRRERSPAARSRSPRRRSPVKSTSSHRERSPVRRNGSPRRSPVRSIGRSPQRDRVKEQVRSPKQSWSRSPSPARKRESWSPSPQSKRLRRAQSEREGADATEGDRRKTTRERDEGKDVSRDRKAEREEGSFKDRKLDCDDDRDHSRDRRSDRSGASRETWSSRDYEGRDSRGRRSDGDDQKGICREQRADHDDRKDSARERRADRDESNGESGRSSRRGRSVSPEEHRHRGRHESQSHQSPRSSRSAARGEDFMPYDFFVQGHSDWKKFRPGLPEYLPEMDRMFEGVAVDGSASFVATAEEPIECDSSDEADGDEQEDELTPLSVGNKRTSPSKKSKSPAVRAMVSNMREYNDLQRSKISLMQSMLQVMQDVAEAKRKAAEAERRAAEAHMIAAEAQANAHEMKIKKDAGQSLSSSFSSRSSLFSSFSSWSLSASHNRRARRQRMDEDLNKMMLDLLDDDDEGFFHVMFQYAIHIDKHLTRSYGLKSSSKSTSVEALAMFLWMVGTPQSVRQAEDRFERSMGTSVVKLAVDVIKPVDPQFRTMHPRLRNRRFYPYFKDCIGAIDGTHVPCVVPNNKFMQYLCRKGMTTQNVMAACDFDMRFTFVLSGWAWFGKYYLVDSGYPNRPGYLAPYKGTKYHLQEYRDSPEPQGKEEKFNYAHSSLRNVIERSFGVLKMKWRMLEKGL

SEQ ID NO: 176882 - protein, 70 aa, Oryza sativa
  Clone ID: PAT_MRT4530_7458C.1.pep
AVFAQLVLLWSLLGSNDRCLGGIPLGPFVLSRQLSPFLCQGSRVRVRGASPCSPFLNSCLPKRTVCEAVP

SEQ ID NO: 176883 - protein, 91 aa, Oryza sativa
  Clone ID: PAT_MRT4530_74590C.1.pep
QVVYSSIRDGRFQSRVVKRFVIWLASLLAKRRTEESTGEGRNASNQMVTANTWFSYKGQELLVCDACHHTFSIAPLWNGSPLLQQVLGIAA

SEQ ID NO: 176884 - protein, 175 aa, Oryza sativa
  unsure (1)..(175): unsure at all Xaa locations
  Clone ID: PAT_MRT4530_74591C.1.pep
MQSQIVCHGCRNILLYPRGAPSVCCAVCHAVSSTAPSPGMDIAHLICGGCRTLLMYTRNATSVRCSCCDTVNLVRPVSSIAHLNCGXCQTVLMYPYGAPSVKCAICNFSTNTGMITMRHLPPNGNFIYCPIXPLLPTTSNSQNVTVVVGKSYGRVDAKGELVGDAVGGVTTGGKK

SEQ ID NO: 176885 - protein, 459 aa, Oryza sativa
  unsure (1)..(459): unsure at all Xaa locations
  Clone ID: PAT_MRT4530_74592C.1.pep
MDSAISTSSSFSPLRLSQNHGSIMSGSTRAQVLPVGRQQQQPPAGGATRLRAVSPSPSPTPPAPQPAETFGFDALKEAFSVDVVAAEARPLNVPLAAPFTIASSRLDAVSNVAVRVELRSGAVGWGEAPVLPSVTAEDQPGALAAATRACGALAGAPAAPLGAVLQDVASALPGHDFASARAGVEMALIDAIANSIRIPLWRLFGGASDSVTTDITVSHPIVTTNEAAQLAAKYRGQGFQTLKLKVGKNLNSDIEVLKAIRLAHGPXPDCSLVAYLGCTANQANEGLDRLXTANRLKQWKLLIYPVLNXIHRDDWEGLRDVSIVAKEKYRVAVAADESCRSLLDAQKIMDGNLAHVINIKLAKLGILGALDSVIERYRXCARIALMIGGYGHETRIAMGFAGHLAAGLGCFSFVDLDTPLLLSEDPVFGGYEVSGPVYKFTXNARGHGGFLHLDNNGLK

SEQ ID NO: 176886 - protein, 46 aa, Oryza sativa
  Clone ID: PAT_MRT4530_74593C.1.pep
PTRPVSGPVYKFTNARGHGGFLHLDNNGLVRSISLLLFKLNLHVLQ

SEQ ID NO: 176887 - protein, 77 aa, Oryza sativa
  Clone ID: PAT_MRT4530_74594C.1.pep
HQRARSAEVSDEKQARRLQLRSTTLLKKGNNSKAEYNHRTQQATPMMQTCKGIQEWLLAICIKAVVKYFIEQTIKLL

SEQ ID NO: 176888 - protein, 83 aa, Oryza sativa
  Clone ID: PAT_MRT4530_74595C.1.pep
PHAWRASTDKWGGEDLWKLEPVVDLINRGAIGIIPTASSPALPHRPPPPTAASSPVADRRTPASTSAATAVVPGPASALSNAA

SEQ ID NO: 176889 - protein, 695 aa, Oryza sativa
  Clone ID: PAT_MRT4530_74596C.1.pep
MVKGAARGTFSGRASAATTSTEKVSLRASDPNASAGAGGVGDGETARRRVAPAGGCCLLTPAAGAGRLQQGKGRRKLPLATGRDGAVAGPPADPVPDARQRRVPAGGGADPAAGVGPAIGAGARGYKAAVELVVHGRCPLDLHGLPCTVRKAAIGMYVDGTSSSDESSSTTTTPASKDVEASAGAASTVVVVVAASGKPEAEEEGWGMASAVERREHSRRSGRSRSRSPARDRGSPPRRRSPPARRERSPAPRSRSPRRRSPVKTTSSHRERSPVRRNGSPRRSPVRSIGRSPQRDRVKEQVRSPKQAQSRSRSPSPARKRESRSPSPRSKRLRRAQSEREGADATEGDRRKTTSREERDSGRYRERDEGKDVSRDRKTEREDSRGSFKDRKLDHDDDRDHSRDRRSDRSGASRETWSSRDDERRDSRGRRSDGDDRKVNSREQRADHDDRRDSARERRADRDESNGESGRSSRRGRSVSPEEHRHRGRRESRQSPRSSRSAAHGEDTSSVTDAASRSVDPDSLVKMNATAEALEAKEKQKPSFELSGKLAEETNRVAGVNLLHSEPPEARKSDIRWRLYVFKGGEPLEEPLYVHRMSSYLFGRERKVADIPTDHPSCSKQHAVLQYRLVEKEQPDGMMSKQVRPYLMDLGSTNGTFINENRIEPSRYYELFEKDTIKFGNSSREYVLLHENSKD

SEQ ID NO: 176890 - protein, 316 aa, Oryza sativa
  unsure (1)..(316): unsure at all Xaa locations
  Clone ID: PAT_MRT4530_74597C.1.pep
KGVTNMQFRFSEMEIATHHFATRIGQGGSATFYKSRLPSGNMKXAHPNRYDDKPEMHRLIHLCSMLEHKNIVKVLGYCDENRGLLLVEEYMANGNLSNFIYGTYAGEQLDWSSRFQIIQGITLGIIYLHTHSGKPTIVHLDLKPDNILLDSDMNPKIGDFGLAKVLEDDEINASVRGTLXDMGYMPPEYIVEGVISVKNDVYGFGVTLLETISGMSKSGRDTRHQASIEWVSNTAWGKRNSGVMNKLFDPSLCDNSQLKEIKRCIEIGLLCTQKKLTDRPTMPDVLQMLQGTKKVPTPKQPGYIKRVREAERYKQV

SEQ ID NO: 176891 - protein, 277 aa, Oryza sativa
  unsure (1)..(277): unsure at all Xaa locations
  Clone ID: PAT_MRT4530_74598C.1.pep
STDKWGGEDLWKLEPVVDLINRGAIGIIPTASSPALPHRPPPPTAASSPVADRRTPASTSAATAVVPGPASACVPNAAAPTRVGXRFTSGGDADAIRVREKRREERGVMERRGYYHRRVFTVIVLIYIRQADNHLTITDDHLPCPHLAMRKGQRTYPITTTQHHRYSPPPQREVAVEAVVAGRPSAPVMCNEGAMAVRAHDVSVQNTNGHHRCHHHYRTGKPLSDAAGTAWPSATGHCRHHHQHHHCRVTLQIQRHDGHQAAKNQATTPPRASRARS

SEQ ID NO: 176892 - protein, 173 aa, Oryza sativa
  Clone ID: PAT_MRT4530_74599C.1.pep
MTVMAAGVGEGGGLRRRRRRQPAAKATTAQDGLISILVTIACVELFEIEGQSKDASIHRSGTSRKSWTSGWLQAVLPLCLHTCTSTFNSKKASTIDKELVEAELVCFCSSSFQVVNNRTEVPRLGFAGNGGANSGAVIWCSRSSGTRPRQTRNTVALWTPLLRLCSSPSFPGS

SEQ ID NO: 176893 - protein, 139 aa, Oryza sativa
  unsure (1)..(139): unsure at all Xaa locations
  Clone ID: PAT_MRT4530_7459C.1.pep
NPLGMVAPLWGPGKKILSWELHPLERFLTPVEKYXVVGQILVDAPNQLGFGVNFAATHEGPFSTLHFVAGLGPRKVSALQKNCPCSGTQVICYGMPRVFYILGGRFFISCSVYAPKKKGKTPKKKKKNPKNKKKKKKKT

SEQ ID NO: 176894 - protein, 85 aa, Oryza sativa
  Clone ID: PAT_MRT4530_745C.1.pep
SDCRRRGDGAQPLRPAGPEAPCWRRPASAARPPPAEAIGLSGLRHLPPRRLLRISDIGTNSASTSSFSPAHLRLDHPFSAERRPP

SEQ ID NO: 176895 - protein, 67 aa, Oryza sativa
  Clone ID: PAT_MRT4530_74600C.1.pep
RASASRRVAGEGSGLSPTSSFLPRAATCCWSGARTTTVSTPTARPSPSPSPPPPPSPSPILPPSPSS

SEQ ID NO: 176896 - protein, 50 aa, Oryza sativa
  Clone ID: PAT_MRT4530_74601C.1.pep
TFTLYFQPPKQIHPTTPIYKILAKWTIVLYMKNEEGAYSQYMANMVTTHY

SEQ ID NO: 176897 - protein, 318 aa, Oryza sativa
  Clone ID: PAT_MRT4530_74602C.1.pep
MCGGGKVASPPGPRLPRLAGAGGEEEEEEAAAGMLSRHGQAREMSVMVSALARVVAGGGGGEAEEWWPPAYGAAPLPPSTSPASHEHAAAMAAGQYAPATSSAMASPREQASSPSSGDAAGGGGGGGRKRYRGVRQRPWGKWAAEIRDPVKAARVWLGTFDTAEAAARAYDDAALRFRGCRAKLNFPEDAALLPPPPPPPAPAPAPPQSQGMVGVGEEYSEYARFLQGAGEPPHFLEQIMEDSPRPSTAAGASSSSSGQSSFPLFYSFAGHELGGNEANLARPPESGGAGGDGGRGSSPPVTWPGYGWGAPPPWDPSR

SEQ ID NO: 176898 - protein, 197 aa, Oryza sativa
  unsure (1)..(197): unsure at all Xaa locations
  Clone ID: PAT_MRT4530_74603C.1.pep
NNFTFHYALYVLMNWLPTYFELGLQLSLQDMGSSKMLPYFNMFIFSNIGGVVADHLITRRILSITKTRKLLNTIGFVVSAVALMALPLFRXTPSGTVLCSSISLGFLALGRAGFAVNHMDVAPKFAGIVMGVSNTAGTLAGIVGVGLTGSILEGAKASNMDLTNSETWKTVFFVPGYLCIFSSIIFLIFSTGEKIFE

SEQ ID NO: 176899 - protein, 56 aa, Oryza sativa
  Clone ID: PAT_MRT4530_74604C.1.pep
GRVSLARWEVCGGHRHCSCRSYGGHHAGHQAGDVQASSCVTGCCSGCTQRKDSRCI

SEQ ID NO: 176900 - protein, 443 aa, Oryza sativa
  Clone ID: PAT_MRT4530_74605C.1.pep
MAAAAALELRLLAPLAAPAVVVYMLIIVMSSATQIFCGQLGNVQLAASSLGNNGIQVFAYGLMLGMGSAVETLCGQAYGAGRHEMLGVYLQRSAVLLTAAGVPLAALYACSERVLLLLGQSPEISRAAAGFARGLIPQIFAYAANFPIQKFLQAQSIVAPSAAVLAASFALHLPLSWAAVRVLGLGLPGAALALSATWWVLVAGQFAYIVRSPRCAATWTGFTWAAFHDLAAFARLSAASAVMLALEVWYFQVLILLAGMLPDPQIALDALTVCTSIQSWVFMISVGFNAAASVRVGNELGAGNPRSAAFSTWMVTALSAIIAAIAGVVVILLRDKLSYIFTQGEAVSRAVSDLCPLLVGTIVLCGIQPVLSGVAVGCGWQALVAYINIGCYYLIGLPLGVLLGFKFDYGIKGLWGGMIGGTLIQTLILIWITFRTDWNKEVP

SEQ ID NO: 176901 - protein, 140 aa, Oryza sativa
  Clone ID: PAT_MRT4530_74606C.1.pep
MSSGAVRRTSQSRMRDLTISSPYQPDEPRLCPYACYVIGAGIRIRIRCAAQSSERSRTDRRIAARVCIEIRAEALVRGGSGFGGARPAEARGRGAHLSVSGGARPARLPGSCHVGERKSDVARASFAGKPSSVVKIARCL

SEQ ID NO: 176902 - protein, 114 aa, Oryza sativa
  unsure (1)..(114): unsure at all Xaa locations
  Clone ID: PAT_MRT4530_74607C.1.pep
VGVGVILLRDKLSYIFTQGEAVSRAVSDLCPLLVGTIVLCGIQPVLSXSVAVGCGWQALVAYINIGCYYLIGLPLGVLLGFKFDYGIKVLLILDIPQFDTHSVDFSVVESTGKG

SEQ ID NO: 176903 - protein, 87 aa, Oryza sativa
  Clone ID: PAT_MRT4530_74608C.1.pep
MTDVELRVEALSLSDVSAIPPEYVRLEEERTDLGDSLEAAPGGARDNRRGVEAADSDSGPIAEVVRVPTVVRGAAPLEAPPTPEPMP

SEQ ID NO: 176904 - protein, 75 aa, Oryza sativa
  unsure (1)..(75): unsure at all Xaa locations
  Clone ID: PAT_MRT4530_74609C.1.pep
SHQMMIAIXNHIXRXILLPXSSSSSISLLLLVSTAARKEVSNNLIINSISQXQXASHRRSQISFQNQIKTIQFNQ

SEQ ID NO: 176905 - protein, 89 aa, Oryza sativa
  Clone ID: PAT_MRT4530_7460C.1.pep
CSHLFYLISTFQYTHGQGRNLKKPSTYFKSLTTPYSKHWVNMGIKRTGDSNLECSSITLGASLYETGEGAPAVDLGHAHSTWLDSARPR

SEQ ID NO: 176906 - protein, 184 aa, Oryza sativa
  unsure (1)..(184): unsure at all Xaa locations
  Clone ID: PAT_MRT4530_74610C.1.pep
TRPVLTPTKREAAKPCRWFKPGEGGGLGVSTAEAPGRGAKWWLVPAKLPGYSGRAVRRGVRVVFGSKRERTGANGTAAGLGLGRICCSVSGLFAGELARGGKPVAWHQRLFGLYAREVGAAWSSSGGGRSSPSSPPSPGCPPGPCPARAGFLSPGGPTQXELDPGGWLPPAPLSFXXFYFCIPA

SEQ ID NO: 176907 - protein, 95 aa, Oryza sativa
  Clone ID: PAT_MRT4530_74611C.1.pep
DLEYFYQSIDIYLITQTICRTVSVYSTSKQAKKCSSIMNISKQSIKSHQLISHLVPFRPTQTQYLSNSNRNTPHLRHEPKRGKFPHEHYPSKTAS

SEQ ID NO: 176908 - protein, 82 aa, Oryza sativa
  unsure (1)..(82): unsure at all Xaa locations
  Clone ID: PAT_MRT4530_74612C.1.pep
RWWCRRMGLGTAVNRRGVVERRRDAARTACGAAPDGMHSGHVDVADQNDGLCCCSXVLSFFFLLFFFLLTSARFLPSLLLTL

SEQ ID NO: 176909 - protein, 102 aa, Oryza sativa
  Clone ID: PAT_MRT4530_74613C.1.pep
MQPRTRRRRSAADVSVFVGLRLPDRIERRTWAWWYYSRLAQMRMSMGSTNDEAHRAEIEVLLVDIDDDDLAIVWDGEHRAGNETHQPAFSMLELYCPLDYHC

SEQ ID NO: 176910 - protein, 681 aa, Oryza sativa
  Clone ID: PAT_MRT4530_74614C.1.pep
MAKPLLLPATVAAAAAARLPSRLAVGAAPPFRVLPFFLCPPPQSRSLSFSPVSAVSTAGKRGRSPPPPPSPVISEGRDDEDAAVGRPVCPGCGVFMQDADPNLPGFFKNPSRLSDDEMGEDGSPPLAAEPDGFLGDDEEDGAPSESDLAAELDGLDSDLDEFLEEEDENGEDGAEMKADIDAKIDGFSSDWDSDWDEEMEDEEEKWRKELDGFTPPGVGYGKITEETLERWKKEKLSKSERKRRAREAKKAEAEEDAAVVCARCHSLRNYGHVKNDKAENLIPDFDFDRFISSRLMKRSAGTPVIVMVADCADFDGSFPKRAAKSLFKALEGRGTSKLSETPRLVLVGTKVDLLPWQQMGVRLEKWVRGRAKAFGAPKLDAVFLISVHKDLSVRNLISYVKELAGPRSNVWVIGAQNAGKSTLINAFAKKQGVKITRLTEAAVPGTTLGILRITGVLPAKAKMYDTPGLLHPYIMSMRLNSEERKMVEIRKELRPRCFRVKAGQSVHIGGLTRLDVLKASVQTIYITVWASPSVSLHLGKTENAEELRDKHFGIRLQPPIRPERVAELGHWTERQIDVSGVSWDVNSMDIAISGLGWYSLGLKGNATVAVWTFDGIDVTRRDAMILHRAQFLERPGFWLPIAIANAIGEETRKKNERRKKAEQRDDLLLEESAEDDVEVLI

SEQ ID NO: 176911 - protein, 82 aa, Oryza sativa
  Clone ID: PAT_MRT4530_74615C.1.pep
PSPPGKSKPPSALSSPGNFQKKPFPRGQKPSPIFPAFRGPKEKGVWKFSLRFRLKKSMEPVEVPPPNPNFFFLCQGSPSKAS

SEQ ID NO: 176912 - protein, 329 aa, Oryza sativa
  unsure (1)..(329): unsure at all Xaa locations
  Clone ID: PAT_MRT4530_74616C.1.pep
CRICASRNWGHHPPVSRWRAAACGEREKNRRLAQSSTTLAERLHFSLGPRLRSPLPRPPPPRVRVVLRLPLPRTSPIAALLPHGLRHVFRSGVVTAPPAEDEDFATAADLQFEPPLKVVKYPDPILRARNKRINTFDDNLRSLTDEMFDVMYKTDGIGLSAPQVGVNVQLMVFNPAGVKGEGEEIVLVNPVVYKMSKRLLVYEEGCLSFPGIYANVVRPDNVKIDAQDVTGAKIKVKLSGLSARVFQHEFDHLQGILFFDRMSLDVLESVREGLKDLEKKYEESTGLVXLKVLRTTKEERISLVSQDEXLSVLAVFQNILLSFTLKIVY

SEQ ID NO: 176913 - protein, 307 aa, Oryza sativa
  Clone ID: PAT_MRT4530_74617C.1.pep
MAARLHLRLGPRLRGFASSFAPLLAAHPRALPLSRMGSVAPLAAARARRGFGSAVATAPPAEDEDFATAADLQFEPPLKVVKYPDPILRARNKRINTFDDNLRSLTDEMFDVMYNASDSICVTLLNNQIKKGLLSTIAREDIPPIEPLVSCYRTDGIGLSAPQVGVNVQLMVFNPAGVKGEGEEIVLVNPVVYKMSKRLLVYEEGCLSFPGIYANVVRPDNVKIDAQDVTGAKIKVKLSGLSARVFQHEFDHLQGILFFDRMSLDVLESVREGLKDLEKKYEESTGLVSPESIENYKGRKDLISFSR

SEQ ID NO: 176914 - protein, 226 aa, Oryza sativa
  Clone ID: PAT_MRT4530_74618C.1.pep
MDKVLHIDIKYRTQIQRPGHQLQICSRQREMWERRGRPHAREAGRGRIWISANGEEAATMVDAWSEKMQGSGGAGHARGRRGEEGFGRKPSTGRRREKTFGLARYSYPPTASVISGRRSSTPTSSATHYHSSSAPTIASVEAGPLGRLPEASGAHATDLIGAALLSRAIADEAKAKGNVAFSAKWSIDCSKARPSSATTTTGSEDGATTGKPRTHMAAMGGDAVAK

SEQ ID NO: 176915 - protein, 148 aa, Oryza sativa
  unsure (1)..(148): unsure at all Xaa locations
  Clone ID: PAT_MRT4530_74619C.1.pep
MHGPGPVDFFDPATRVVKDHNRHDALKDGYSDELTPLGACLRRASVLDLAFVGGGTSKGWRPRRGEGAIHXLRTPLDDDLSGASKRVRCAGSEVCTWGTGKACTSDATMRCSGCAGGCMISTSQRLGACMTPEMQKARNERTATDESN

SEQ ID NO: 176916 - protein, 45 aa, Oryza sativa
  Clone ID: PAT_MRT4530_7461C.1.pep
LVAQPISLTRPLVRSGECAATTAATGPVFVYFDSDSSSSSSLCWP

SEQ ID NO: 176917 - protein, 72 aa, Oryza sativa
  Clone ID: PAT_MRT4530_74620C.1.pep
MQGFEGHADLQGQAIGEGSFQPFPRVLAERAHPSVRPVEAAQLHRPRQPAADSMKKKKKKKEKESYRFGGQL

SEQ ID NO: 176918 - protein, 53 aa, Oryza sativa
  Clone ID: PAT_MRT4530_74621C.1.pep
MASYVDRRKNKKASAMWCGEKVDADTESATRFKNDERKDNTFISTKIRDGETK

SEQ ID NO: 176919 - protein, 205 aa, Oryza sativa
  Clone ID: PAT_MRT4530_74622C.1.pep
AKYVCDYILEGQLDGPAQQKRSSLRYAVSPGFDPDIDLERVGVVNQTTMLKGETKEIGILIEQTMMSKYGLDQNNKQEHFVRVGTICNATQERQDAMYKLVEKEVDLILVVGGWNSSNTSHLQEIGELSGIPSYWVDGEQRIGPGNKISYKQKNGELVEKDKWLPHGAITIGVTSGASTPDKVVEDVLQKVFEIKRQELGEATEQ

SEQ ID NO: 176920 - protein, 428 aa, Oryza sativa
  Clone ID: PAT_MRT4530_74623C.1.pep
MAGDHSSPFPPPSSTRRRRPQERDEERGEGERGSRRGGGRHLHGYTTTPTEEEQEREKSPMAHARSTGSLPVANVQALAETCNDPDQQIPERYIRADANADEVISGDDCTAAIPTVDLSKLLDPLSSDEETEKLGSACQQWGFFQLINHGVSEDVIRDARKDIAEFFRLPMETKKAYSQLPSGIEGYGQAFVVSHEQKLDWADMFYLVLRPGESRNMALWPAHPPSFRNSIDRYSSETARVARCLLEFMAKDMGVRPGSLLERFQDQPQGIRMNDYPPCREAGKVVGLSPHTDAACLTLLLQVNDVPGLQIRSPGGRWLAVGAPPDDGAFIVNVGDILEIMSNGKYRSVEHRAVVRPDRERVSAAVFHQPCQDAVVGPLPELVGEGGGDNARYTSMGYLDFMKRYYSAKLDGRNHLDGLRIKLSSSKG

SEQ ID NO: 176921 - protein, 55 aa, Oryza sativa
  unsure (1)..(55): unsure at all Xaa locations
  Clone ID: PAT_MRT4530_74624C.1.pep
LQAVEQXVVVEXLHESLSVXXXXCGSPPLPPPPSLRRQPPQRAQEASARTSTGDD

SEQ ID NO: 176922 - protein, 83 aa, Oryza sativa
  unsure (1)..(83): unsure at all Xaa locations
  Clone ID: PAT_MRT4530_74625C.1.pep
EGIKFLTYFSFNKKVVYTWGASLTMFFFLFPVIFKSFLNKKKIVFFGPNLACPKFFPPINVMYGCTKKPLNNSXKKLHKKKKK

SEQ ID NO: 176923 - protein, 138 aa, Oryza sativa
  Clone ID: PAT_MRT4530_74626C.1.pep
MELESEQHGIRAPCCGEVFGCRHCHNEAKNSLEIHLNDRHEIPRHEIKKVSKNHFACPVCSRSACDMSDAWKKLDEEVAATPMPEFYQKKMIWILCNDCGATSNVNFHVLAQKCPGCSSYNTRETRGCGRPAAARSTV

SEQ ID NO: 176924 - protein, 163 aa, Oryza sativa
  Clone ID: PAT_MRT4530_74627C.1.pep
VEIGDLFCEPFPGTSWLMPSDFPLNYGEFTQSSPESYGNMLQNKVVGDNTDQSLAGSRPPYVFLYLDGNYEFHDKLFFCEDDQQFLQDVPWLIMRTDMYFIPSLFLIPSYQDELSRLFPEKDAVFHHLARYLFHPTNSIWYSVKGYYRSYLAKANKTVGIQIR

SEQ ID NO: 176925 - protein, 266 aa, Oryza sativa
  Clone ID: PAT_MRT4530_74628C.1.pep
MELESEQHGCEHYTRGCRIRAPCCGEVFGCRHCHNEAKNSLEIHLNDRHEIPRHEIKKVICSLCDKEQDVQQYCSGCGACMGKYFCEKCNFFDDDVSKNQYHCDGCGICRTGGVDKFFHCDKCGCCYSNVLRDSHHCVEGAMHHNCPVCFEYLFDSTKDISVLHCGHTIHLECLNVMRAHHHFACPVCSRSACDMSDAWKKLDEEVAATPMPEFYQKKMIWILCNDCGATSNVNFHVLAQKCPGCSSYNTRETRGCGRPAAARSTV

SEQ ID NO: 176926 - protein, 49 aa, Oryza sativa
  Clone ID: PAT_MRT4530_74629C.1.pep
INGGNHDDGRVIRKSTGYKINLLQTLRKDEANYAICRSTYNVFNYNGVN

SEQ ID NO: 176927 - protein, 453 aa, Oryza sativa
  unsure (1)..(453): unsure at all Xaa locations
  Clone ID: PAT_MRT4530_7462C.1.pep
MGGTSSGSARCWIQPNSGRSAAEAVMAETKIIHATKQAEVAVTKFIESDIRNEQTSQRNIAGNSVKTSSSNTIEAPGHVVVTNSSDAGQDTMVNNNVAGNYVLLPLSNRTEAPRHVIVTISLDAGQNTVVDDNGVRQGLTDEESDTKTKLLERGVLTAASATAAMLSPFLRGVFNHHQEDPPLAKVVVLLALVPQVIQMASLVLPDVSVCCVSPDEAALSILHSLKLSEESFKRVLEGSGGEDFLETLAPSAKAVKVALHVLCRLCPWSRNRVKAVDVGAVSALVHLLLNEGCGGDRRACELAVMAIDHICXLRGGALGTGGAPDGARXVACAATRLSTAGTESAMRALHVVATHTATSAVLQEMLAVGVGARLFFLVQVGASGKRTRARWTTRRSRSCRRRPHHPSAARAAVGALALVSPCPASVRAESEEGRRETEKEKGKRDRVRWTPDM

SEQ ID NO: 176928 - protein, 72 aa, Oryza sativa
  unsure (1)..(72): unsure at all Xaa locations
  Clone ID: PAT_MRT4530_74630C.1.pep
TPGFSPRLKTPGDGAAMSKRPKXKGVKRVPYQQAQQKYPVERFIQGQRGLPKLGVPVHXPGLFPQDQSGRIP

SEQ ID NO: 176929 - protein, 54 aa, Oryza sativa
  Clone ID: PAT_MRT4530_74631C.1.pep
RQGLVEFKNEIQLVAKLQHKNLVRLLGCCVHEEQKILIYEYLPNKSLASCRIPA

SEQ ID NO: 176930 - protein, 88 aa, Oryza sativa
  unsure (1)..(88): unsure at all Xaa locations
  Clone ID: PAT_MRT4530_74632C.1.pep
KGFSPPPVGKXXSRGXAAARRPGRLGRGTXPWGLXPLTWVGXXXGRRXRYASXXSNLXAFSHNPAHGSFRATGFXTKRDDQLFESTVT

SEQ ID NO: 176931 - protein, 99 aa, Oryza sativa
  Clone ID: PAT_MRT4530_74633C.1.pep
FLVNYFLEGKEHCEFLAPRSKKGHGQQQAAARRLAGVRRQEVRRLRRQGGGEGAVGPRERVVPGVLQPPRRRRAVPVGVVAGNAQGGPRLVAGEGVIIR

SEQ ID NO: 176932 - protein, 74 aa, Oryza sativa
  Clone ID: PAT_MRT4530_74634C.1.pep
FTVGGHLRVPVTVVIKFHRPCPRQPRRRYIFNSPDHHAVNFCPVVTPSRANLLPAVDSKRPLVHRPHPRHPQWC

SEQ ID NO: 176933 - protein, 49 aa, Oryza sativa
  Clone ID: PAT_MRT4530_74635C.1.pep
GSSRHNFQDLCVRVCASFPFDLTQRFLAPYDNPCRFLCHVPGLTSALKV

SEQ ID NO: 176934 - protein, 43 aa, Oryza sativa
  Clone ID: PAT_MRT4530_74636C.1.pep
NDRELRYPGTNLAPVKKTKWTMFRHSFFFRFLEWIVKYDGSNQ

SEQ ID NO: 176935 - protein, 1035 aa, Oryza sativa
  unsure (1)..(1035): unsure at all Xaa locations
  Clone ID: PAT_MRT4530_74637C.1.pep
MERARRLANRALLRRLLAAAASTTSPAPSRGISTLAKAPGAGSRPRAPRPAPHQYTTGRRPVSASALQPSDTFPRRHNSATPAEQAAMASECGFNTLDALIDATVPAAIRAPTMHFSGKFDAGFTESQMIDHMQRLAAMNKAYKSFIGMGYYNTHVPAVILRNLMENPAWYTQYTPYQAEIAQGRLESLLNYQTMATDLTGLPMSNXASLLDEATAAAEAMAMCNGILKSKKKTFLIASNCHPQTIDVCQTRAAGFDLNVIVADAKDFDYSSGDVCGVLVQYPGTEGEVLDYAEFVKDAHAHGVKVVMATDLLALTSLRPPGEIGADIAVGSAQRFGVPMGYGGPHAAFLATSQEYKRLMPGRIIGVSVDSSGKPALRMAMQTREQHIRRDKATSNICTAQALLANMAAMYAVYHGPEGLKAIADRVHGLAGTFAHGLKKLGTVTVQELPFFDTVKVKVADANAIAQEACKNEMNLRVVDATTITVAFDETTTLEDVDKLFKVFNGGKPVNFTAESLASEVSSSIPSSLVRKSPYLTHPIFNMYHTEHELLRYLHKLQSKDLSLCHSMIPLGSCTMKLNATVEMMPVTYPSFANMHPFAPTEQAAGYHEMFDDLGDLLCKITGFDSFSLQPNAGASGEYAGLMVIRAYHRARGDYHRDVCIIPVSAHGTNPASAAMCGMKIVAVGTDSKGNINIEELRKAAEANKDNLAALMVTYPSTHGVYEEGIDEICMIIHENGGQVYMDGANMNAQVGLTSPGFIGADVCHLNLHKTFCIPHGGGGPGMGPIGVKKHLAPFLPSHPVITTGGFPLPEKTDPLGTISAAPWGSALILPISYTYIAMMGSKGLTDASKIAILNANYMTKRLEKHYPVLFRGVNGTVAHEFIIDLRGFKTTAGIEPEDVAKRLMDYGFHAPTMSWPVPGTLMIEPTESESKAELDRFCDALISIREEIAEIESGKADVNNNVLKSAPHPPQLLMSDSWTKPYSREYAAFPAAWLRGAKFWPTTCRVDNVYGDRNLICTLQQGSQVAEEAAAATA

SEQ ID NO: 176936 - protein, 67 aa, Oryza sativa
  Clone ID: PAT_MRT4530_74638C.1.pep
KAPLVGLGGRSHHALRGKLAEGDFDGDGALNEKEFWVLMVRVSPDLMDEPCRWLEDPVAQASQFLFH

SEQ ID NO: 176937 - protein, 93 aa, Oryza sativa
  unsure (1)..(93): unsure at all Xaa locations
  Clone ID: PAT_MRT4530_74639C.1.pep
VGTQVNKFKSFIQDVCWERNXEHFVLAIVVMWSADVNGGWSNLLTVIHIVFVSAHKLSVLCEKYKDQVHDFPYNIIGVLRDQYHTLDHRCLEQ

SEQ ID NO: 176938 - protein, 53 aa, Oryza sativa
  Clone ID: PAT_MRT4530_7463C.1.pep
SSLRCVSHSDKEYEVGIRCFMLKEFKLQNWPHSIVREPIWQQSKPRVTGRVDG

SEQ ID NO: 176939 - protein, 129 aa, Oryza sativa
  Clone ID: PAT_MRT4530_74640C.1.pep
MEEGEAKKTGLEGTGLSLPGSSHGNLRSAGSDQQLKQMLDSLKSSKSPAVINYGASWCRVCSQILPPFCRFSNEFKNLTFIYADIDECPETTQNIRYTPTLHFYRDGEKVDEMLGTGEERLHDRLWLHS

SEQ ID NO: 176940 - protein, 131 aa, Oryza sativa
  Clone ID: PAT_MRT4530_74641C.1.pep
MDSAATVAAARLLGPPVIRAARPPHDAADAASHPFLQLLDANFNPPPPGPPAAFGSKTKATPRKARTENDSATYANSGNPCLDLFFQVVPDTPADRVRGLVAAAWAHDPLTALKLVCNLRGVRGTGKSNKE

SEQ ID NO: 176941 - protein, 651 aa, Oryza sativa
  Clone ID: PAT_MRT4530_74642C.1.pep
MRIRRYAARLLASSTATAPSSLPPPPAASAAWCHAAADDCAICDLTRSASPQVVAPDAIKQKGHIAGRALEPELRSDPRVGLAERTPVPEDQGRDIDDGPPAKRSLTFTDAAARLEGSGNVGAGVATEPAARLGAPVANGAVSGQEDRAATCLADESAAELIATGVTSLVTGATAEPEVLKGASFANTNVTEPRVSERVPLVREAATEPEAEVSMREVTEGALPDGEGAAKLEITGGLSRESADKMEVTKGISLVTEASADSELAQRVPTEPGVELSLPEVTERVPVVTEDFTELGDTFSGLHITGFASLDNEGSVEQEVTGSGSLVNEATEMEVKEGTCIFTRVATELGDTGRVSACSGDGDIALDEPRPPDCVSEVANVNVGNAGEAVASKVQPFRDNAESVGGSINSTGNGHVSSKSPTADEAAPPGGCTDTPSVSCLSDIVARSIGKSGRTDIICYVRRRGKRKLEMVEVKEENVEMDDSAICDQYDDKVASERTGPCESVTSTAVSVEIKIADIKRELEDNSTASKGKKKRAKRFQCEIDYCRMTFKNRAELSVHKKNTCTVKSCGRHFRSHKYLRRHQSIHNDDMPYKCPWEGCSMAFKWSWDRGEHFQVHAGKRPYKCTTPGCSKIYKFVSDFTRHKRRCKPQR

SEQ ID NO: 176942 - protein, 84 aa, Oryza sativa
  Clone ID: PAT_MRT4530_74643C.1.pep
MPAAPPHVGRSNITLREATRGRRAPAVADVDPAVEVCRRCEDGDMREEKLHRGEEELAGSAEEKLVGMGVAMWREKAWQPRNCG

SEQ ID NO: 176943 - protein, 49 aa, Oryza sativa
  Clone ID: PAT_MRT4530_74644C.1.pep
ALQPSDIQLRHNCFQDQQVVGTSSLTRPSHRFNNLGPFVSRGSLKEGQR

SEQ ID NO: 176944 - protein, 68 aa, Oryza sativa
  Clone ID: PAT_MRT4530_74645C.1.pep
PPRGDLEPPRCAFGTPPVGLLVKGIYPYIQWLLSLSLYGCMMDVPQTPFQFQKKKKKKKKNLKKPHTP

SEQ ID NO: 176945 - protein, 109 aa, Oryza sativa
  Clone ID: PAT_MRT4530_74646C.1.pep
FSTRSDGHRRRAAGRAAAAEGGEKRAALLREITDEGGFAFVASAVKAAADVGPPRGGGRSEYGVGAVPPVPADRGQSHSLGRLLPGMAQRGRPPGSHRVPAPFQVGALS

SEQ ID NO: 176946 - protein, 313 aa, Oryza sativa
  Clone ID: PAT_MRT4530_74647C.1.pep
MGNIASSGGASPRPPPPHLEAYRHGVPPPYYHSYPRPPPGAAAPPPVPVPAHVERHRAVAVSVGVNVKGDTLRLVPDDDDDDGRSLLLAFSFDADGPGSITVCFFAQEDKCALKTAKENLLQPVTVPFKEGRGQEFKQPSGSGIDVSRFEESELTNVGEGGVFPVAFKVQMDVSGNQESEGAHETEQSKYLVKYAIFVKKDNAEYGVHVVQQILWVNGIRYVLQEIYGIGNTADKNAHEDDSGKECVVCLSEPRDTAVLPCRHMCLCRECAQVLKYQTNKCPICRQPVEGLREIEVDNKPIPQQGSQQLTAPQ

SEQ ID NO: 176947 - protein, 96 aa, Oryza sativa
  Clone ID: PAT_MRT4530_74648C.1.pep
MVTQTFILVQALNARYRIGFPGCYPFPCITNNRMGLGNLAYPLRCSRRPPIGHPGSMSPTSCLEEAATLHRPQLPQLPSCAVQEFYKRAAAAEGRR

SEQ ID NO: 176948 - protein, 167 aa, Oryza sativa
  Clone ID: PAT_MRT4530_74649C.1.pep
MAAQYEVSDALGALGVAAISTATTLATAAFQPPPAPGGLRTTTTYNHLAVAGLAGTFLGGVVLVGASVWVSDNPAARRGTGKKLLYAAVPMLLAAVVLSVAALLWWGSSPPRVNFQKNYEFISPNLKYGDSKGSYAVLVFGLITFREEWIWSTPCISAPLAVAADAE

SEQ ID NO: 176949 - protein, 45 aa, Oryza sativa
  Clone ID: PAT_MRT4530_7464C.1.pep
VGPVSTLKPPLSHPVVSCLPLPTACDQLLPPPVIVYLSGKKVAVF

SEQ ID NO: 176950 - protein, 85 aa, Oryza sativa
  Clone ID: PAT_MRT4530_74650C.1.pep
YPKSFASISMSSTNQFPMFPIKSIKVHRFVEVMLVNHYHYLARSMSKLAFYHHQKLHVGADLCHITSSPSELTSSSIIEGPKNSL

SEQ ID NO: 176951 - protein, 354 aa, Oryza sativa
  Clone ID: PAT_MRT4530_74651C.1.pep
MLSFKQSHEGFGHVAAAGAGPQQQQQPWWAGSQLLYGEASPEEAALRDGGQFQVVPGGRAALDPAAPEPEKTAVPAMPKRGGGGGAPEVLKFSVFSGNLEPGDTGEKNREHSATIAMQSPLPEYNGHFELGLGQSMVSPNYPCIDQCYGLMTTYAMKSMSGGRMLLPLNAPADAPIYVNAKQYEGILRRRRARAKAQRENRLVKGRKPYLHESRHRHAMRRARGSGGRFLNTKKEATAAGCGGSSKTPLASLVSPADVAHRPGSGGRASSLSGSDVSSPGGVMYDHHRHDDADAADHYNSIDHHLRTPFFTPLPIIMDSGGGGGDHASHSAAAVAAPFRWATAAGDGCCELLKA

SEQ ID NO: 176952 - protein, 59 aa, Oryza sativa
  Clone ID: PAT_MRT4530_74652C.1.pep
MSTNFTLCSCYTEYTARLSGRCFGAGIVFTYAITLCHDDDIRIVSGSLDVFSRLRDIII

SEQ ID NO: 176953 - protein, 154 aa, Oryza sativa
  unsure (1)..(154): unsure at all Xaa locations
  Clone ID: PAT_MRT4530_74653C.1.pep
MLHWRLEISAKYGGQGSCGKDGHGLMEKMCLELDVYTVYIQYGRADRMHEAENLLHIMIENGVRPNNVRCTTLISIRCNEGGMVEARRLFQEMAGNGAKSSLVTYNVMIDXYIKKGSTCEAERFRKEMEKXYAAVVHWQCVSGKMDVPLGLFEL

SEQ ID NO: 176954 - protein, 107 aa, Oryza sativa
  Clone ID: PAT_MRT4530_74654C.1.pep
LSAKKARNPRDVVRIDVEEVVDHTGSTFSPSCVVLAVLPRRLAPQSSGASTGIHKGTPRAHMSPTRIPIRCSYTLGCNLKTPFRSTCQQRTLAERIDPPSIHKDHIG

SEQ ID NO: 176955 - protein, 99 aa, Oryza sativa
  Clone ID: PAT_MRT4530_74655C.1.pep
GPKLKPSHEESKLGFSLPEQRAKLESKRPQLNFYQASCHFIGNDHCGIDCFDATSFGCNNFIAIANQCLKSLHTPNHYRAIDHGNMHNFNRPHLPHFHF

SEQ ID NO: 176956 - protein, 102 aa, Oryza sativa
  Clone ID: PAT_MRT4530_74656C.1.pep
LEPLERYSVAPHYKWQPKSIFWCKPSTTFTSQRFSLIYPSTMDTIPSIRNSFIHNLLPYYYMHVSMCLLLAPMNSNLGYTFIKHSFWHNIISSGAKYDTIKQ

SEQ ID NO: 176957 - protein, 315 aa, Oryza sativa
  Clone ID: PAT_MRT4530_74657C.1.pep
MEKGKSVVAELAASLRDVEVTPRRKPASSLPAASFWCKSSILKIMSGKYKIVDDSWFLLNIEWNPISIYFDSWEILDISGSDVSDIGLATVANISNNLWAIDISRCERITAAAVSEVICHCPSLEILRCGGCPGSESTARRSVYLLKPKLNTLEEDSWEELDTVEIGGGAESLRWLVWPKIDDNSKEIISMECPRITVNPQPSPFDLRGHKVPAEALASVPLDHSIIADIDPKTWAVAAAPRRPTVPTNPNAPPEIPIAEKFRLAYVEREARLAPKRAKRERQQRRRAEREYLMNDINAKSVALAAQVSKYLRKS

SEQ ID NO: 176958 - protein, 63 aa, Oryza sativa
  Clone ID: PAT_MRT4530_74658C.1.pep
DFLGRNRTCSQGYICHEQLMHPAPHALLLDWCASSVLRTTDSCASPVALATVYDGLLCIPILL

SEQ ID NO: 176959 - protein, 286 aa, Oryza sativa
  unsure (1)..(286): unsure at all Xaa locations
  Clone ID: PAT_MRT4530_74659C.1.pep
KGKRDLLRQRLGFAVDRAHGGGTRKRTAEIDPSKTDGRDXVHGRLTADGPDDVSGDVITGGGSGGSGAHARRRTTALQRERRTPARSGRRGELTGDQSNGGGAADGDGDEVETAETFGSTTATVLRRSSATATATTGATAAHGSSGGDDGGARLHDARALRTTRGEGESGDGGXEAAAKDHGDRRREGNLGVRRKETDPIRPRIHELPKRLSRXFQKRKGGGDPGDCFPSKDFTGEGKERCAPPVSDRTRARGGCGLGRLGPGREKRVLGRLSAQSQKRILKNLFQ

SEQ ID NO: 176960 - protein, 77 aa, Oryza sativa
  unsure (1)..(77): unsure at all Xaa locations
  Clone ID: PAT_MRT4530_7465C.1.pep
GIPSTLGYTLCGNMGLMSPSPTWRPVDLWYKRDPPGGPKASNLRANTSTTAYEARAYRSQVAXGSSRIKLTTILSIP

SEQ ID NO: 176961 - protein, 157 aa, Oryza sativa
  unsure (1)..(157): unsure at all Xaa locations
  Clone ID: PAT_MRT4530_74660C.1.pep
CSGGLQQRRRSGRGRRRNGDHDGDLPERRXXLERRRRTAEVAAKTAARSGTALERYRRREAKARVATGSGDTGDPFKGVGERRRRPTTTGDAKETSGFRGKRPIRFDLESTNFQNDLADDSKREKVEEIPKIVSPQLISPETERRGRIWKETAAPLG

SEQ ID NO: 176962 - protein, 38 aa, Oryza sativa
  Clone ID: PAT_MRT4530_74661C.1.pep
RQRMLQLSLDQYLLHHIDELLVSPKALFQVYNTLDILT

SEQ ID NO: 176963 - protein, 35 aa, Oryza sativa
  Clone ID: PAT_MRT4530_74662C.1.pep
TRGEAREEELLKEPRGASSRFQRVLSEEKCFYFRG

SEQ ID NO: 176964 - protein, 38 aa, Oryza sativa
  Clone ID: PAT_MRT4530_74663C.1.pep
LFFSYYTFFIFKFQLFLNWIQALTLIFIYIISEFNFNF

SEQ ID NO: 176965 - protein, 292 aa, Oryza sativa
  Clone ID: PAT_MRT4530_74664C.1.pep
MAQIIDGKAVAADIRREVAADVAALSSAHNLVPGLAVVIVGSRKDSQTYVQMKRKACAEVGIRSVDVDLAEDISEAALVAEVHRLNADPAVHGILVQLPLPKHINEEKILNEISLEKDVDGFHPLNIGKLAMKGRDPLFLPCTPKGCMELLTRSGVTINGKRAVVVGRSNIVGLPVSLLLLKADATVSIVHSRTPNPESIVREADIVIAAAGQAMMIKGDWIKPGAAVIDVGTNSISDPTRKSGYRLVGDVDFAEVSKVAGHLTPVPGGVGPMTVAMLLKNTVDGAKRGIVQ

SEQ ID NO: 176966 - protein, 89 aa, Oryza sativa
  Clone ID: PAT_MRT4530_74665C.1.pep
GKKKNTIPFYGGTQEFLGNLQQATSFYLVKAAGPSFDFTMIWESYNVFRGVLILSTMLPPKASFRLTENTKNWHFPFTGIYLDAGFPTQ

SEQ ID NO: 176967 - protein, 45 aa, Oryza sativa
  Clone ID: PAT_MRT4530_74666C.1.pep
TPVPAHLPSTGGSPSRPVVLPCAICRTNLQGLQVGYQNWWRLERL

SEQ ID NO: 176968 - protein, 109 aa, Oryza sativa
  Clone ID: PAT_MRT4530_74667C.1.pep
FFFFFLRKYAILPCDRKEIDLVKYAKPYKAQLHSSRLYIPTTQHLKSQVPIIWVYKCFNFQPVTLGISLQQTIIPWTKNNLILTVEHKISGKPDMGYWFPFILKNALGP

SEQ ID NO: 176969 - protein, 241 aa, Oryza sativa
  Clone ID: PAT_MRT4530_74668C.1.pep
MGTNPSLHELAAGAAPRGRVVRILVRDADATDSSSSEDEAVAVAQPRPRRRGKVGGGGGGGGGVKRRVMEAGAGEARPTARFRGVRQRPWGRFAAEIRDPHLRRRLWLGTFDTAEEAAAAYDAASVRLRGSSAATNFASVRCYSLPPELPKPTISPPEAAVRPITLPIGTAKPTLLPRVKEEGESCGGRVKEEASSCEVQVLAPEPMWTMISGKRKKRSGCGTRVRAFHAVSACVEEVGGA

SEQ ID NO: 176970 - protein, 74 aa, Oryza sativa
  Clone ID: PAT_MRT4530_74669C.1.pep
MKIIFFFAPPAIAASRAFAQFDAVTQVYRQYQLQPHFMLQQQMLSPSGEFVRHQCSPVATPFFQSPVFQLRNRV

SEQ ID NO: 176971 - protein, 213 aa, Oryza sativa
  Clone ID: PAT_MRT4530_7466C.1.pep
MSRLGRYGPPAVRDSYSLLVLNVSFRTTADDLLALFDRCGEVLDIRIPRDRRTGDSRGFAFVRYKYEDEAQKAVDKLDGRTVDGRDIMVQFAKYGPNAERIHKGRIVEEISKPRGRSRSPSPKRRYRADYRDRGYRDDYRDRHYRDDYQDREYRRSRSIERYERERYQEKGYRRRSRSISPDYDRRHRKNGYACGDALPVSFLSYLTASMFKL

SEQ ID NO: 176972 - protein, 35 aa, Oryza sativa
  Clone ID: PAT_MRT4530_74670C.1.pep
GYLMAHISDVYDEPDLQSPAQLKNLKAVRLRSLVG

SEQ ID NO: 176973 - protein, 425 aa, Oryza sativa
  Clone ID: PAT_MRT4530_74671C.1.pep
MPAGDNPHSISEKKAALRESPKEPKNVGNQQPRTSPFPKDKAAGTVGIKRPQPNGPLNPTNPGTNGHLVYVRRRLETDHSKVSSYASADSISSLSSKKTVVDRPQEQGLKHQNSSLQTPLAPAAAAATSPVSPSGGSPPQNSLRKQSLGKVVVQPSIIVTASPPPRNVVSTTSVPQNSIAAKLACSSVAAASPPPRNLVSTTPVPRNSITANLASSSVAAASPPPRNLVSTTPVPHNSIAANLASSSVAAASPPPRNLVSTTPVPRNPIAANVASSSVAAASPPRNLASTTKVSQNSIAANLASSSVSATSTASRGAAPACYPVDPQRSSNQDWKERFIRLQAFLRNNEQSGQEEYIHMLRSLSSVGRSKLAIELENRAVKLLIEEGKELQKMKVLNVLNKLSPTDALPLPTQPASVRHLAFPPR

SEQ ID NO: 176974 - protein, 1294 aa, Oryza sativa
  Clone ID: PAT_MRT4530_74672C.1.pep
MASSSSNPSALNGQTVSEKLTKSNFVLWKAQVLAALRGAQMAGFLDGSNQAPAATIIVTKDDGKTTEKVANPALVQWKAQEQQVLSYLLSSLSREVLTQVATLTTAADVWEAIESLFASQSRARILNTRMALSTTVKGNRSMAEYVGKMKSLADDMASAGKLVDDEELISYILAELDFDYNSVVSSVTGRTGPISVSDVYALLVGFESRLELLQNAANPSANTASRGGRGGRGRDGRGRGGGNPGRGGGFGRGRNDGKPKPTCQLCDKIGHIVAKCWKRFDPSFTGEEKNANTAAVNSYGIDTNWYIDSGATDHITGEMEKLMVKDKYTGNDQVHNASGAGMNIDHVGHTAIRTPTRDLTLKNVLHVPDACKSLVSAHRFTRDNKTFVELHPFFFLVKDQVTRMPLLRGRCRSGLYPLPTDKLQTISNKQAFGVVKPSLFRWHSRLGHPSFSVVNRVISQNNLPVVRDSSQEFVCDACQKGKSHQLPYPKSSSVSIEPLQLVFSDVWGPAINSVGNKVYYVSFIDDFSKFTWIYLLKHKSEVFAKFQDFQNLVERLTNRKIKAVQTDWGGEYQRLNSFFQRIGIEHYVACPYAHQQNGSAERKHRHIVEVGLSLLAHASMPLKFWDEAFTTAAYLINRTPTKVINFETPLQRLFNLPPDYSLLRTFGCACWPNLRPYNARKLAFRSKQCAFLGYSTLHKGFKCLDISTGRVYISRDVVFDEQIYPFEKLHPNAGARLRAEINLLPVHLLPLLDHGGVQMHDQPLIDDSNPANPIIENSAGSSAGNGAKSGAQHGHDFMQSSGGQPTGGHHDSLTHSTIHGTDNQADQENSASSRSAEPVTPRHAASPSAAPTASPHAAAAPIASSHAAASSPSGDIVGPGSHGPSQEDQDTSASAPASSTSNDDDSAQFAAQPTRPVTRAQRGIHKPKKYTDGTVRYAGLTHTGELGNLQEALSNTNWKSAMDSEFAALVRNKTWHLVPPKQGVNVIDCKWVYKIKRKADGTIDRYKARLVAKGFKQRYGIDYEDTFSPVVKAATIRLVLSLAVSQGWSLRQLDVQNAFLHGYLEEDVYMRQPPGYEEKKMPYYLFASSSGQAVTVLLKELEKDFALKDLGDLHYFLGIEVKKTEKGLLLTQESAFSDADWAGCLDDRRSTGGFAVFLGSNLISWSARKQATVSRSSTEAEYKALANATAEVMWVRKLLEEIGLLHPGPSQLWCDNIGATYLSANPMFHARTKHIEVDYHFVREQVAQKMLEIRFVPSQDQIADGFTKPLPVRQLQLFCNNLNLGELRLRGSVR

SEQ ID NO: 176975 - protein, 83 aa, Oryza sativa
  Clone ID: PAT_MRT4530_74673C.1.pep
HDMAFKLHGRKSNRILTMNISINDIISGNIKVLSMCWMMTINMHPSSKNFGCHRLILLMFTHRRSRLKLSLMSIKFSPFLSLV

SEQ ID NO: 176976 - protein, 1437 aa, Oryza sativa
  Clone ID: PAT_MRT4530_74674C.1.pep
MASSSSNPSALNGQTVSEKLTKSNFVLWKAQVLAALRGAQMAGFLDGSNQAPAATIIITKDDGKTTEKVANPALVQWKAQEQQVLSYLLSSLSREMEAIESLFASQSRARILNTRMALSTTVKGNRSMAEYVGKPVDDEELISYILAGLDFDYNSVVSSVTGRTGPISVSDVYALLVGFESRLELLQNAANPSANTASRGGRGGGGRDGRGRGGGNPGRGGSFGRGRNDGKPKPTCQLCGKIGHIVAKCWKRFDPSFTGEEKNANTAAVNSYGIDTNWYIDSGATDHITGEMEKLMVKDKYTGNDQVHNASGAGMNIDHVGHTAIRTPTRDLTLKNVLHVPDACKSLVSAHRFTRDNKTFVELHPFFFLVKDQVTRMPLLRGRCRSGLYPLPTDKLQTISNKQAFGVVKPSLFRWHSRLGHPSFSVVNRVISQNNLPVVRDSSQEFVCDACQKGKSHQLPYPKSSSVSIEPLQLVFSDVWGPAINSVGNKVYYVSFIDDFSKFTWIYLLKHKSEVFAKFQDFQNLVERLTNRKIKAVQTDWGGEYQRLNSFFQRIGIEHYVACPYAHQQNGSAERKHRHIVEVGLSLLAHASMPLKFWDEAFTTAAYLINRTPTKVINFETPLQRLFNLPPDYSLLRTFGCACWPNLRPYNARKLAFRSKQCAFLGYSTLHKGFKCLDISTGRVYISRDVVFDEQIYPFEKLHPNAGARLRAEINLLPAHLLPLLDHGGVQMHDQPLIDDSNPANPIIENSAGSSAGNGAKSGAQHGHDFMQSSGGQPTGGHHDSLTHSTMHGTENQADQENSASSRSAEPVTPRHAASPSAAPHAATAPIASSHAAASSLSGDIVGPGSRGPSQEDQDTSQEDQDTSASAPASSTSHDDDSAQFAAQPTRPVTRAQRGIHKPKKYTDGTVRYAGLTHTGEPGNLQEALSNTNWKSAMDSEFAALVRNKTWHLVPPKQGVNVIDCKWVYKIKRKADGTIDRYKARLVAKGFKQRYGIAYEDTFSPVVKAATIRLVLSLAVSQGWSLRQLDVQNAFLHGYLEEDVYMRQPPRYEEKKMPHYLCKLDKALYGLKQAPRAWYSRLSKRLQELGFVSSKADTSLFFYNKKGLVMFLLVYVDDIIVASSSGQAVTVLLKELEKDFALKDLGDLHYFLGIEVKKTEKGLLLTQERYAGDIIKRTGMSNCKPVSTPLCVSEKLWLNDGEFLGANDASQYRSIVGALQYLTLTRPDISFSVNKVCQFLQNPTIVHWAAVKRILRYLQGTLGLGLKIDKSFSYIVSAFSDADWAGCLDDRRSTGGFAVFLGSNLISWSARKQASVSRSSTEAEYKALANATAEVMWVRKLLEEIGLLHPGPSQLWCDNIGATYLSANPVFHARTKHIEVDYHFVREQVAQKMLEIRFVPSQDQIADGFTKPLPVRQLQLFCNNLNLGELRLRGSVR

SEQ ID NO: 176977 - protein, 112 aa, Oryza sativa
  Clone ID: PAT_MRT4530_74675C.1.pep
LDISTGRVYISRDVVFDEQIYPFEKLHPNAGARLRAEINLLPAHLLPLLDHGGVQMHDQPLIDDSNPGELGVISICRTGHAATRSESLGRATRGNRANRVVTRGSLVSVGRH

SEQ ID NO: 176978 - protein, 1354 aa, Oryza sativa
  Clone ID: PAT_MRT4530_74676C.1.pep
MDTVEKIVEDFASDIAMGPFSSGTRLRDMIRAIRACKTAAEERAVVRRECAEIREAIGENQQEIRHRNMAKLMFIHMLGYPTHFGQMECLKLIAAAGYPEKRIGYLGLMLLLDERQEVLMLVTNSLKQDLNHSNQFIVGLALCALGNICSAEMARDLSPEVERLMRSRDVNTKKKAALCAIRIVRKVPDLAENFMGLASSLLKEKHHGILISAVQLCTELCKASKDALEYLRKNCVEGLVRILRDVSNSSYAPEYDVAGISDPFLHIRVLKLMRILGQGDADCSEYMNDILAQVATKNESNKNAANAILYECVQTIMGIEATSGLRVLAINILGRFLSNRDNNIRYVALNMLMRAITVDTQAVQRHRTTILECVKDADASIRKRALELVFLLVNDTNVKPLTKELVDYLDSADPDFKEDLTAKICSIVEKFSQEKLWYLDQMFKVLSLAGNHVKDDVWHALVVVISNASELQGYSVRLLYMALQAFVDQGSLVRVAVWCIGEYGEMLVNNVGMLQGEEPITIIIAIFFSAIIYLAVLGSWFCTYFGHLVEDNWRIKQIVSQNKKNIVLELQQRSIEFSSIIQRHQSIRPSLLERMPALDEASYLLRRASATQATLAADKPTPAVTPGGLKLPNGVAKPATSPLVDLLDLSSDDVPAITTASTTTAPNDFLQDLLGIGGISSSPAAAPSSASTDILIDLLSIGSSPSQNGPPAADSTPAQAITELFKINVPDTKPVSTISQVGAIVPEATDVLSSLSSSTSVSAFAKMSDTSIAGTKSAPAVPQDMDLLDGLPSNTSVSGPVNHSSITAFQSATLKINFNFKKQPEKPHETTVHATFTNLTSSSYTDFVFQAAVPKFIQLRLDPASGNIVPASGNGSVTQGFSVTNNQHGQKPLAMRIRMSYKVNGEDRLEQGQENFLDAVLNLTHAAVRDEILRLVFVSETALRLYCRRGRRKHTHDTLRASVAMVVDDGEQRACAAAAGDGDGGGDDHLSGLPDDVLLDILEKVVMDGDAHAAARTCILSRWWRHLPWHDITTVSLDVDDFIPDKENACRPVLQVHHRRATDNLAAALASFLAAPPSKRAIDKLHLKLVLTTDDDRVHRVGALVGDAFDTGRVKAGAVELEILAESACAFVDDDDEEQKRLMLGNGRRFTRLRRACPGAFRSLARLTVHNLWFDGGDTAATITHLLHGCPALEYLDMFYCGFVPFSVMTIDAPPESRLATLVFDQCHAAGVELVNAPKLLRVARRRAGGLVRRNTVAQSKLIPENPGQLERLCIKSFGTKTDNHVCSAEWRKRWPSPPARQPSPGFKHHHLAELRIRHAFGVAVDLPFARMAMEVAVNLELLAMGVESLECDG

SEQ ID NO: 176979 - protein, 129 aa, Oryza sativa
  unsure (1)..(129): unsure at all Xaa locations
  Clone ID: PAT_MRT4530_74677C.1.pep
MGKTSAPWGAGEDLASGSVRGGGRKRRPRGXRCIAAAAAADGDDVGSCCGRPRRMGKTTAPAVVGKTSPXVQCAAEAVECTAAAAEWDDDARRSESRVKRVMRRILCAETARGEXKSCVGDGWMVRITP

SEQ ID NO: 176980 - protein, 46 aa, Oryza sativa
  Clone ID: PAT_MRT4530_74678C.1.pep
LLHILTVQAIGKFVGLKVRSQVFLGKSWSKVIWFRLIIVAPQPFFF

SEQ ID NO: 176981 - protein, 318 aa, Oryza sativa
  Clone ID: PAT_MRT4530_74679C.1.pep
MDATAPLLSPASDDRFWDRLRTRVDTILEDRRLVAPPAATCGVESERGKRLREDSLMLVRGLDSVAASLAQLSDTLTAAQKGVNALATCSSQARECERGDEEEEPKAKRRCSLAETVSFDGETPVAGADSGEGSEKEELAADAKLRQENGGIQATSEVAKSTNLKRARNLAVSMAGRAAALARELKNIKSELHFMQERCGLLEEENKRLREGYDNGVPPEEDDLVRLQLEALLAEKSRLAQENANLSRENQSLIQLVEYHQLTSQDLAESYEDVMEGMRLDFSSPLGKIDSDEEGERENRRVAVTPSDKLEALESSDE

SEQ ID NO: 176982 - protein, 108 aa, Oryza sativa
  Clone ID: PAT_MRT4530_7467C.1.pep
MGEEVEEVREFGQTGRRRIRDRWKRGRRHAGSSTVISFDVFEKAKVAVLRTAAAAEAVNTPVFYPLPLHRVTAHHTTDKGLRRVGARPCTAAAAATDGPAVQAEGRAA

SEQ ID NO: 176983 - protein, 52 aa, Oryza sativa
  unsure (1)..(52): unsure at all Xaa locations
  Clone ID: PAT_MRT4530_74680C.1.pep
PCWRRPREEGASMAGAAASIXPPSHLSIAPPRQQGDGAREAGAVLLDDGASY

SEQ ID NO: 176984 - protein, 799 aa, Oryza sativa
  Clone ID: PAT_MRT4530_74681C.1.pep
MGHSNVWNSHPKNYGPGSRVCRVCGNPHGLIRKYGLMCCRQCFRSNAKDIGFIKAAACSGSLAGVGAQATMDLSLRGEAEAAPVYRPNSKHFTIEIHHGGFFCGMGVNRSYVDGKVSWFDYVNSREWGSSLHLLDLVAMLGYAAGPRLEVYWLLLGKRLADGLRIVDNEVEINVMNSVCNRVKNFVLYLDHSDHVSGSNHEDIVLSLISQLPKVMSPVRGCQQKEHGNQGGSNVGEPVCVVVDEEAEEIEDHGDYDSNDSEADDLDFVDIDYELQDDDDDLFEDNVDGDVLDQGLAPKKFNHKKVAGSKLKGKEVLREEGSDEESSDEEILELPDNTDEINLRFKSFNPEDMNNPVFKVGMVFPSLELLRKAITEYSLKNRVDIKMPRNDITRIKAHCAEGCPWNMADCKMTLPSFAKTVQKEWNLTPSRSKLARARRLALKEIYGDEVAQYNMLWDYGHELRRPIICLDGCHIKTKFGGQLLTAVGIDPNNCIFPIAMAVVEVESLTTWSWFLQTLKDDLGIVNTYIVDVMTKHCDCRRWSSLLAEVHDNMLDHMLLETPWLLAASSLNLADSGRNQPVSDRYLLVPHFAAAHRPLVASPASATNPRTILLAYKAIERFEYESIAFDVVFLHETEFIGLVITGNKRMFPMDEHFEQQQKKPKKKTRTSRSVSSSSTITDYETSSELVNPSCSSGSSVGEDSIAATDGSVVLKQSDNSRGHKQCSKDTQSLYAKRRRERINERLRILQQLVPNGTKVDISTMLEEAVQYVKFLQLQIKAKKTPPSPHLAALPPLPLRQI

SEQ ID NO: 176985 - protein, 88 aa, Oryza sativa
  Clone ID: PAT_MRT4530_74682C.1.pep
MVQLRAAVLGKYNKRCTPEHIITTPRRMGYVEDDKGYAEEESTHAQPAAFYANKKMVYAAKAQLPRLVRPSQSRDRVHGIHGWKEGQV

SEQ ID NO: 176986 - protein, 205 aa, Oryza sativa
  Clone ID: PAT_MRT4530_74683C.1.pep
MGSASRAVSCLCCPCKCLACGLFSCLCSILISLLVTLGVLALIFYLIFRPHMIAATVDSAALTQFTLSTNSALAYSLTVDLTVRNPNKRVGLYYDNVESLALFDGQRFGYAPLDSFYQSTEASTKLSPAFKGQQPLQGDITAANFRSQQTAGKFDIEVKLNAKLRVKVWAFKVPGPKAKISCPITVPASAPNAPAFQRTDCKVWF

SEQ ID NO: 176987 - protein, 131 aa, Oryza sativa
  Clone ID: PAT_MRT4530_74684C.1.pep
MGSVVSSANINARSMDRHEKSGFGSNKRVKISTYECDSFQRIIPTLPDELSFQILARLPRLYYLKLKLVSQAWKAAITSSELSQLRRELGLTEEWLYVLTKLEPNKLDCYALDPLFRKWQRLPPMPSFVSE

SEQ ID NO: 176988 - protein, 66 aa, Oryza sativa
  Clone ID: PAT_MRT4530_74685C.1.pep
QEQDSFGNGFLKCIRIAVLGISLFSFLVRLNPCYGRMHAWRKEGFFWILVFAFHRASPMVDHPVVG

SEQ ID NO: 176989 - protein, 109 aa, Oryza sativa
  Clone ID: PAT_MRT4530_74686C.1.pep
MAQGNCSASRVAFSTHDAEPLGLIAWMVFEVNRAVKVPSYGFFRFNRSGPFFALCAKARTGTTSTAKPVMASHPYAKMIRRWYICAQEFESNVFIQIRKKPSVFSKEIQ

SEQ ID NO: 176990 - protein, 338 aa, Oryza sativa
  unsure (1)..(338): unsure at all Xaa locations
  Clone ID: PAT_MRT4530_74687C.1.pep
LALLEILGLILEILALRVFGLRKLIDKIGSRLPGWKGHFFTSAGRQTLVTSILSATPTHHLTVFQAPKXVLKRIDRFRRSFMWKGKYPDHXNPSDSLINWQTVCKPKKLGGAGLPNLDRFSRALQLRWLXFKWKEENKPWVGINLLCDDLNKRLFQAATTISVGNGAKTSFWHDNWIQNRCLKDIVPNCFSLVNRKQRTMQVEMRDNKWLTSFRQFTYVEELHDLVQLGGLLQLVSLSXDPDDISWDWTEPGSYTTKSVSLSIXGSFARNDFVSLWRALVEPKMKFFGLLILYXKKTLIAQNLLRRHXSCNWICCLCTAFEDXHLFSECVFVRQVWSL

SEQ ID NO: 176991 - protein, 53 aa, Oryza sativa
  Clone ID: PAT_MRT4530_74688C.1.pep
IRSKMEGTRHGDHFNSQGPNAGSLKLLLYISHLDPRFNMERGKWAAPFKVPYE

SEQ ID NO: 176992 - protein, 73 aa, Oryza sativa
  Clone ID: PAT_MRT4530_74689C.1.pep
RVPLSRRKRSMTSRSPGRHGRHDRGAWQTAGQSVRSCPLYPRVGLKEKTNGVHSIRPKAGQGEPRREQQGAEG

SEQ ID NO: 176993 - protein, 85 aa, Oryza sativa
  Clone ID: PAT_MRT4530_7468C.1.pep
LVFSVRRRPGLLCAVSTPAGFGQPHDLARIWPAAWIRGRAASAFTPRVIVKVAVVEVVVMSHHRCRLCSRRRADIIASRVAGEEG

SEQ ID NO: 176994 - protein, 141 aa, Oryza sativa
  unsure (1)..(141): unsure at all Xaa locations
  Clone ID: PAT_MRT4530_74690C.1.pep
NPIQPLAAVLTSNGHQICIRDMFWVHEYLMESSRSLLSNGSNFISKFHLGXPQSHKQNRVSARPCNYLSSRTPXTICSQFLFVISYCFYLIFTCFFYLLVGIRIICTRKINNLCRGVSIAKVQHNTVSYGCSRIINVSLKS

SEQ ID NO: 176995 - protein, 279 aa, Oryza sativa
  Clone ID: PAT_MRT4530_74691C.1.pep
MEGSPRRRKLRRLSPGAAPQQPKPSLNSLPSEILENIVGRLPVRQAVRTSALSRDWRRRWESSPGIRFGWGSGEAGAAAAVGQILARYACPVRHFRHGWIESGGSARADEWFVVLAGRGVEHLALIFSEADNFLFHTLHAAIFSCRELTKLELGSCRLPAAPSDFSGFPNLTVLTLTMVAFPPHGERTLEAMISSAPLLQSLELKNVSMEGGEWDEWVIRAPNLKDLIIQLEFDFLWEIEQLPSIQTATISVDNESTDRDFVQLLTCFARPSYTGKLVC

SEQ ID NO: 176996 - protein, 75 aa, Oryza sativa
  Clone ID: PAT_MRT4530_74692C.1.pep
HCLRVLPPPPAGVHRGTSSRWEGRYQRHSIPELRQVSEAFHLIGLVNRPSVPSCLASHHTPYPCYACQAPRYRGR

SEQ ID NO: 176997 - protein, 43 aa, Oryza sativa
  Clone ID: PAT_MRT4530_74693C.1.pep
KVSTKKLGVWLGSCQKKVLFNIMLSTPAMLCFSKTKNKKNRKR

SEQ ID NO: 176998 - protein, 194 aa, Oryza sativa
  Clone ID: PAT_MRT4530_74694C.1.pep
MEAVVVAALVLLMSSSLVASDWCVCRSDQPQAALQKTIDYACGAGADCNSIHEQGQCFNPNTVVAHCSWAANSYFQRNRAMGATCDFTGTATLTTSDPSVSGCSFPASASGAGTSTTPTMGGTTGTMTPGTFTPGTGMGTTTGTGMGTGTTTGTGLGGLGPTGTSSMDTAAAGLHLRAGLATFCTVLLSFVAIA

SEQ ID NO: 176999 - protein, 116 aa, Oryza sativa
  Clone ID: PAT_MRT4530_74695C.1.pep
KVLLLETPASIQHHLFILASTKGQNHIYPKYKHQVSEPPQLPNPRAENQRSQFKALAFKQFVINHKEEHSQISIDVVCLSELHAFCPATLTHYGIEVCLLDQLLLSLASTNRPCCR

SEQ ID NO: 177000 - protein, 893 aa, Oryza sativa
  Clone ID: PAT_MRT4530_74696C.1.pep
MASPAAAAPAALLVLLAAALAATGVVADGSDHRYKANELVPLYANKVGPFHNPSETYRYFDLPFCSPEKVKEKSEALGEVLNGDRLVDAPYKLDFRVDYDSKPVCSKKLTKEEVAKFRNAVAKDYYFQMYYDDLPLWGFIGKVEKGGKTDPKEWKYYLYRHIIFDILYNNDRVIEINVHTDQSALVDLTEDKEADVQFLYSVKWKETPTPFEKRMEKYSSSSNLPHHLEVHWFSIINSCVTVLLLTGFLATILMRVLKNDFVKYAHDEEAADDQEESGWKYIHGDVFRFPKNNTTFIFLLALVGVFYPYNRGALFTALVVIYALTSGIAGYIATSFYCQLEGTNWVRNLLLTGCLFCGPLFLTFCFLNTVAIAYSATAALPFGTICVIVLIWTLVTFPLLVLGGIAGKNSKTEFQAPCRTTKYPREIPPLPWYRQTIPQMAMAGFLPFSAIYIELYYIFASVWGHRIYTIYSILFIVFIILLIVTAFITVALTYFQLAAEDHEWWWRSFLCGGSTGFFVYGYCLYYYYARSDMSGFMQTSFFFGYMACICYAFFLMLGMIVRPREGDTLPPAMSDGGAGAKGAGFGMPRVGMGTAVQGPRPEPIRRAVLKAIEAGYRHFDTAAHYETEAPIGEAAAEAVRSGAIASRADLFITSKLWCSDAHRDRVLPALRQTLWNLQMEYVDLYLVHWPVSMKPGRYKAPFTADDFVPFDMRAVWEAMEECHRLGLAKAIGVCNFSCKKLDTLLSFATIPPAVNQVEVNPVWQQRKLRELCREKGVQICAYSPLGASGTHWGSDSVMASAVLRDIAQSKGKTVAQARHVCLRWVYEQGDCLIVKSFDEARMRENLDIVGWELTEEERQRIAGIPQRKINRALRFVSDHGPYKSLDDLWDGEI

SEQ ID NO: 177001 - protein, 105 aa, Oryza sativa
  Clone ID: PAT_MRT4530_74697C.1.pep
FDFLGKDSIQYVNTVEVEPLVYKAIGQFQAGKSKTDDLFDELDTSKLNAHLKELVPGLTAKVFRTYNASITLDEMLSQETKDGDVTQKIVVYQKANKEVAILCNH

SEQ ID NO: 177002 - protein, 213 aa, Oryza sativa
  unsure (1)..(213): unsure at all Xaa locations
  Clone ID: PAT_MRT4530_74698C.1.pep
DAWGNLQMEYVDLYLVHWPVSMKPGRYKAPFTADDFVPFDMRAVWEAMEECHRLGLAKAIGVCNFSCKKLDTLLSFATIPPAVNQVGLHNSQCCNNQKCYNLFLMVDLLIVLGLRCVWFVTVRTYVQVEVNPVWQQRKLKELCKEKGVQICAYSPLGASGTHWGSDSVMASAVLRDIAQSKGKTVAXVCLRWVYEQRDWLIVKSFYEARMREN

SEQ ID NO: 177003 - protein, 525 aa, Oryza sativa
  unsure (1)..(525): unsure at all Xaa locations
  Clone ID: PAT_MRT4530_74699C.1.pep
MASPAAAAPAALLVLLAAALAATGVVADGSDHRYKANELVPLYANKVGPFHNPSETYRYFDLPFCSPEKVKEKSEALGEVLNGDRLVDAPYKLDFRVDYDSKPVCSKKLTKEEVAKFRNAVAKDYYFQMYYDDLPLWGFIGKVEKGGKTDPKEWKYYLYRHIIFDILYNNDRVIEINVHTDQSALVDLTEDKEADVQFLYSVKWKETPTPFEKRMEKYSSSSNLPHHLEVHWFSIINSCVTVLLLTGFLATILMRVLKNDFVKYAHDEEAADDQEESGWKYIHGDVFRFPKNKSFFSAALGTGTQLFALTTFIFLLALVGVFYPYNRGALFTALVVIYALTSGIAGYIATSFYCQLEGTNWVRNLLLTGCLFCGPLFLTFCFLNTVAIAYSATAALPFGTIXWTLVTFPLLVLGGIAGKNSKTEFQAPCRTTKYPREIPPLPWYRQTIPQMSMAGFLPFSAIYIELYYIFASVWCCRIYCSYAALSTLSLFLSLTHSPLLARLHLFYSSRPPRISLFLLLAWWWW

SEQ ID NO: 177004 - protein, 2027 aa, Oryza sativa
  Clone ID: PAT_MRT4530_7469C.1.pep
MAEQGKAHDLSPSVSGDDGEPNPRRRARTPPPPPRQSPKQGEALERVDKSVASPVAGDAGERRDGERRLLVYGDGSTPQGALQAAGALLRHPPVVHDPESPAQRWLEDVANLVMTAQQRLGAGGRSATTKTSGAATTGSVSSRRRARRAAAAARHSAATPSSTPPTREDQHGEPDARIDIERRRNNRRTPRATEGASSSRVSPRHGREDQPSVPPAGGVGCRAFVASLRNVRWPPRFRPTITEKYDGSVNPTEFLQVYTTGIEAAGGDDRVMANFFPMALKGQARGWLMNLPPASVHSWEDLCQQFTMNFQGTYPRPGEEADLHAVQRGDDESLRSYIQRFCQVRNTIPCIPAHAVIYAFRGGVRHNRMLEKIASKEPQTTAELFQLADRVARKEEAWTWNSSGSGVAASAAPGSAAQTGRRDRRRKKRSDRSGDEGHVLAVEGAPRATRKGRPASDKKKEAGTPSRERPAGRWCSVHNTSLHDLADCRAVKNLAERTRKWEEDRRQERREGKSPAVPSGKRRSEAKQKAPAVDIDDGDDDLGFQEPGATIATVDGGACAHVSRRSFKAMKRELLAMAPTHEAMRRARWSEVALTFDQTDHPPCIARGGQVAMVVSPTICNVKLGRVLIDGGAALNILSPAAFDAIKAPGMVLQPSQPIIGVTPGHTWPLGHIDLPVTFGGPANFRTERVSFDVADLSLPYNAVLGRPALVKFMAAVHYAYLQMKMPGPGGPISVHGDLKVALACMEQRADRLAAASKPEGGDERLGTSAPTAPRQRIATCDEVPEDALVSFLRANADVFAWRPADMPGVPREVIEHRLAVRPGARPVRQKVRRQAPERQAFIREEVARLLEAGFIREVIHPEWLANPVVVPKANGKLRMCIDYTDLNKACPKDPYPLPRIDQIVDSTAGCDLLCFLDAYSGYHQIRMAREDEEKTAFITPVGTYCYTSMPFGLKNAGPTFQRTTRISLGSQIGRNVEAYVDDLVVKTRNQETLLSDLAETFENLRSARIKLNPDKCVFGVPAGKLLGFLVSARGIEANPEKIRAIERMRPPSKLRDVQCVTGCMAALSRFISRLGEKALPLFKLLKRSGPFTWTEEAEHALTQLKAYLSSPPVLVAPEPNEPLLLYLAATPQVVSAALVVERDEDNPHSAHPHSVPTWPGSKQGGEAPESNGGLRPLTTGVGPLPACQTVLGAPDPQEGPEATAGRPHLSPFGPEANPVLTRPGREQGEEAPEPKGGLRPLTTGAGPLPACPMTPGAPDPQDGPEATVGRPLLSSSDPEVIGTEDECAPRGHLDEERPGGTAPSEEDRPRRKVQRPVYFVSEALRDAKTRYPQAQKMLYAILMASRKLRHYFQAHRVTVVTSYPLGQILHNREGTGRVVKWAIELSEFDLHFEPRHAIKSQALADFVAEWTPAPETVSIPEASTDPSQLPQTAHWVMQFDGSLSLQGAGAGVTLTSPNGDVLRYLVRLDFRATNNMAEYEGLLAGLRVAAGLGIRRLLVLGDSQLVVNQVCKEYRCSDPQMDAYVRQVRRMERHFDGIELRHVPRRDNIVADELSRLASSRAQTPPGAFEERLTQPSARPDPLGETDAPDRPPRPVGVQASGPEGSAPSSLRLIAWISEIQTYLTDKTLPEDREGSERVQRISKRYVLVEGTLYRRAANGILLKCIPQEQGVELLADIHEGECGAHSASRTLVGKAFRQGFYWPTALNDAVDLVRRCRACQFHAKQIHQPAQALQIIPLSWPFAVWGLDILGPFKRAPGGFEYLYVAIDKFTKWPEAYPVVKIDKHSALKFIKGITARFGVPNRIITDNGTQFTSELFGDYCEDMGIKLCFASPAHPRSNGQVERANAEILKGLKTKTFNILKKHGDSWIEELPAVLWANRTTPSRATGETPFFLVYGAEAVLPSELTLRSPRATMYCEADQDQLRRDDLDYLEERRRRAALRAARYQQSLRRYHQRHVRARSLCVDDLVLRRVQTRAGLSKLSPMWEGPYRVIGVPRPGSVRLATGDGTELPNPWNIEHLRRFYP

SEQ ID NO: 177005 - protein, 264 aa, Oryza sativa
  Clone ID: PAT_MRT4530_746C.1.pep
MKQLADHHASLARGTRCQCHAGSRRSSGSPSPSIVVSRPLPWRRRSGGVRRPDDLPVSLPRPPPVRRLLRLGCHRLSSSLRLGTTAARGDLSLPLPGGQPPLLDASGRQPPMLRRCRRGYGAAAWPAVGVAFPAPDLTAAAGGMELDPSGQPALRPPVGAGQPPPHDLLPPRPSACRRPGQRGVLPLLGSCPLCLSRCGNGRWEMIGWLVDLPVWTVLRRFHRLHRRSRIDNLVIRTGHRQPLRVFFLYFEHRRRVSKLPLSPL

SEQ ID NO: 177006 - protein, 713 aa, Oryza sativa
  unsure (1)..(713): unsure at all Xaa locations
  Clone ID: PAT_MRT4530_74700C.1.pep
MATKLRQPSTDAEKTEVGEIDTRAPFESVKAAVSLFGEVRFSSDKSAARKPKPPQAEVVNFVPKQGTGTTQDDVPNVDGSHPNIRRRIPESSFFSSTQTLKSELDSDISVPVRLDPVSNLRLLRVLAKETELHLAQKELNKYKDQLNNAETTRVQALSELEKAKKTVEDLTNKLDAINKSKELAIQATEDAKTRTKQLEGGDSLEAVGKDGPLKQELDVAREQYVVALADLDAAKQELRKLKKDFEASLDMRLAAAQQEEESLHLAETNKQKADQLRKEIATIQESLTHVKAATEQAHEEEAQILAEKDVTRKTYKQALEEAEKKLSSLKKDFDPAVYKSLKEKLDETNLEISSMQKKIEDARAQDLESIATVSTELDDAKEMLQKVAEEESSLRSLVESLKQELEAVKEEHDQLKQKDTETESIVGDLHVKLQKCKSELEAAVAAESKATSASDDLMLALQQLSSESKNALQEAEVMQKSAADLRDEAEAARVALAEAEQKLQSALKEAEEAKSAEAKALDQIKQLSERASAARASTSESGAKITISKEEFESLSRKVEESEKLSEMKVAAAMAQVEAVRASENEAIKKLEAARKEMEDMELATEEALKRAEMAEAAKRAVEGELRXWREKEQKKAAEAQPAPEAQAHGTASSPVQKASAGKANEKNDGPHKNSRTLLKKSFMLPNITSMFHKKKNHADGSSPSHLPGDKSV

SEQ ID NO: 177007 - protein, 445 aa, Oryza sativa
  Clone ID: PAT_MRT4530_74701C.1.pep
MGRQRWWLLLAVAAAAAVVVGAGAQETCSDMVPAAPRRGAWMSLASFGGGGGDGRTLSTAAFQAAVASIERRRAPGGALLYVPPGVWLTGPFNLTSHMTLFLARGAVIRATQDTSSWPLIEPLPSYGRGRELPGGRYMSLIHGNGLQDVVITGDNGTIDGQGSAWWDMWKKGTLPFTRPHLLELMNSSDVVVSNVVFQDSPFWNIHPVYCSNVVIRNVTVLAPHDSPNTDGIDPDSSSNVCIEDCYISTGDDLIAIKSGWDEYGMAYGRPSSHITIRRITGSSPFAGFAVGSETSGGVEHVLAEHLNFFSSGFGIHIKTNTGRGGFIRNVTVSDVTLDSVRYGLRIAGDVGGHPDDRYDRNALPVVDGLTIKNVQGQNIREAGSFKGIATSAFSRICLSNVKLNGGAAVRPWKCEAVSGAALDVQPSPCTELTSTSGMSFCTNSL

SEQ ID NO: 177008 - protein, 30 aa, Oryza sativa
  Clone ID: PAT_MRT4530_74702C.1.pep
MLNFRPIYSNSVAAILFKLTINNAPILKLN

SEQ ID NO: 177009 - protein, 102 aa, Oryza sativa
  Clone ID: PAT_MRT4530_74703C.1.pep
MEDNMEGNDDGGFLGMEASGCGLKGGGGQRWAASPEAGAEVDSVPSLVEVEVDRCGPPGRRGGRRWWLLCPSRAGRRGKPAMVHLRLQMVVENVKEQPNPRG

SEQ ID NO: 177010 - protein, 56 aa, Oryza sativa
  Clone ID: PAT_MRT4530_74704C.1.pep
ACSLKRARTLGSIVTKEQLVTRNHQHLEPPRLATGGEGCGKTSDFRSLSIHILNKG

SEQ ID NO: 177011 - protein, 743 aa, Oryza sativa
  Clone ID: PAT_MRT4530_74705C.1.pep
MMVKKKTSWSQIVKNGRPANTSVTTRNLRPQDLGAVIFGCTNNTIAECHSRQLFGLPRTHLSYVQNIKEGLPLFLFNYDDRKLYGIYEAASNGKFCPESNAWLQDGKGKTSYPAQVAMRIKVWCVPLAESQFRGAILANYYQRMPGAPGQKLHFFQFELDHAQTRALMDMFTPSPSTNNGWSPPVAQPADEHVRSSWAPVYAGNNGLKSEKIVKSYADVVNNNKFEQVRTGDVVHVDAEHASSGNEHVNGFDDLDCGDTTPESEEYALSGKEVEVQQQQQQQQQEQSGQQDKLSFKGVLEKLKMLSVQQRKSTFYANATETESIDAYSCKDVQDDLPENLDSEVDQFSWGHSKLLMHSLDSESCTEVKLVDIVKELYERIAIMEKKQAWSNKELKYLQGVNERLLKRVVELKGTVKTLNSKIDPLTLDDSLSQFVEQCLGSEDVIYLVGGFDGFSHLPSLDSFSPSLDVLTPLKSMAVGKSYASTVALDGKIFVLGGGDGVCWFDTVDCYDRRRDDWTTCPSFTHDKGSLAAVSFNGKIYAYGGGDGNECFSDVEVFDPAYGKWIKNQSMLDKRFALAGVELNGAIYAVGGFNGVQYLSSAERLDPREPSWKRLPKLSTGKGCHTLAVLDDKIFSIGGYDAEAKTMVATVELYEPRMPSWVMAEPMNYNRGYHSSAVLGGSIFAFGGVKGEGDAILDVVERYKEGCGWVTTESSSVFSYLFEDFTEADVGLAGFTIPAITNHI

SEQ ID NO: 177012 - protein, 156 aa, Oryza sativa
  Clone ID: PAT_MRT4530_74706C.1.pep
MATDHRRFPVFLAAALLTLLLLPASAAATDVEYCRQGRDYPVKVSGVEIVPDPVVSGQPATFKISASTDKSITKGKLVIDVKYFFFHVHSESHNLCEETSCPVTGEFVLAHEQTLPSITPPGSYTLTMRLLDDGNKELTCISFGFSIGFISPLALI

SEQ ID NO: 177013 - protein, 780 aa, Oryza sativa
  Clone ID: PAT_MRT4530_74707C.1.pep
MPKSKSFVPVAGHANYLHKGSSLSAKHASNVLRSTDGTFSFGFYNLSSTVFTLSIWFTNSADKTIAWSANQDRPVHESGSKVMLNKDGSMVLTDYDGTVVWQISSSAEAVRAELMDSGNLVVKDQGGSILWQSFDHPTNTLLPMQPVTATAKLVSTDPSHPTSYYTLRFDDRYVLSLAYDGPDIFNLYWPNPDQSSWTNYRISYNRSRSGVLDKLGKFMASDNTTFYASDWGLEIKRRLTLDYDGNLRLYSLNESDGSWYNSWMAFSQPCEIHGLCGWNGICAYTPKIGCSCPPGYVVSDPGDWSRGCKPAFNLTCSNDGQKMSFVRIPQTDFWGFDMNYVMSTSLHACRAMCLASCSCVAFVYKVYPNGCFLKSDLFNGKTVSGYPGAAYIKVPQSFLSRSQAHVSELANRHVCNASKTQTFNYATQSNKGTGMMWYYYYCFLAAFFLVELCFIAFGWWFMAKTHSARSAIWAAEEGYRVVTDHFRRFTYKELRRATRNFKDELGRGRYGSVYKGILDDNRIVAIKKLKDVKQGEAEFQTEVSVIGSIYHMNLVRVMGVCSEGSHRLLVYEYVENGSLAMFLFGSKGLLQWQHRYKIAVGVAKGLAYLHHECMDWIIHCDVKPENILLDQDFEPKISDFGFAKLLQRNQTDPNMSKIRGTRGYIAPEWVSGVPITEKVDVYSYGVVLLELVMGLRMSELPANGSADEGAALRQLVWTVTEKIKTGDQTLIDGVVDPRLNGNFVRSEVLLVLEFAVLCLEKERNQRPNMNHVVQKFLSYE

SEQ ID NO: 177014 - protein, 46 aa, Oryza sativa
  Clone ID: PAT_MRT4530_74708C.1.pep
LPFFFFLQLAKHRYSHWWGLTKRADVQPIQTNETCLMMHLCEKLNG

SEQ ID NO: 177015 - protein, 119 aa, Oryza sativa
  Clone ID: PAT_MRT4530_74709C.1.pep
RAMQVQPGERSHELLVLLWRPLARHETVPPLRVVVHRRQHLHAHIPHHHLQSPFSSSSSSSLPQLSSLQVDLCLGTRTRGDRSPSVLARILRGFLLSPHLSLSLSLSLAYLATAIAFFP

SEQ ID NO: 177016 - protein, 127 aa, Oryza sativa
  Clone ID: PAT_MRT4530_7470C.1.pep
MDATLGASTTHGYLLLLPANSTTFFSPLLAALLAVTSLLWLVPGGPAWALSRCRRPPPGAPGALAALAGPAAHRALADMSRSVPGGAALAFFSVGLTRFVVASRPDTARELLSSAAFADRPVKDAAR

SEQ ID NO: 177017 - protein, 50 aa, Oryza sativa
  Clone ID: PAT_MRT4530_74710C.1.pep
VLLFFLGGVCMYKMLMNWGKERDRYECDEINTKCESCGNCYVHAWIWMYR

SEQ ID NO: 177018 - protein, 178 aa, Oryza sativa
  Clone ID: PAT_MRT4530_74711C.1.pep
MGLSQLIRSARREVVVVTMLMLSWLSRENREEARPRGTKFEAPTIIWSRHPHSPALPNHRSLLPLAAPQAATRTNAYATSSSYSCGRHRRRCLLLFSPTNAGVAPVRVLFPQPGILDLLRGRPLVKSDGPNLRRGSSSSRMPWIYRDRPPHQATQPRSAMVASWPCKAGGASVVAEHS

SEQ ID NO: 177019 - protein, 216 aa, Oryza sativa
  unsure (1)..(216): unsure at all Xaa locations
  Clone ID: PAT_MRT4530_74712C.1.pep
GFQGDQGDGSQGVQGIGXKEFKVMVLRDFKVLQFNNFQDQDDYAIHHVLINQFGILVNTLSNMVKSMVDGSIAEYQTTGPVYLQGGTFPNYRPLITDNQQAVQSVPPNAPSTQPTAPVSAPAPAAPSSAPGQLINPWLLVREQPQHSGQNVNRLTXQQQPIQQTPPRLQVVQLVQQTPPIQQVVQPIQQTPPRQXVLQPIQQTPLRQQVIQPIQQQ

SEQ ID NO: 177020 - protein, 1699 aa, Oryza sativa
  Clone ID: PAT_MRT4530_74713C.1.pep
MESETEGQQFDDMDAMLRNGLGFNDFNAVEGDGDVGEHSEDAEKFYKLAADASQDLYPGSKMSKLQFIIKLLHKRLHRLFMSEKTASDMRWHAEGRTKDGLLRHPADSPAWKNLDQQCPIFGAESRNIRLTLAIDGFNPFGNMSVSHSTWPVVLIPYNPPPWLCMKQHNFILSLLIPGPTQPGNDMDVYFEPLVDELLDLFEQGVKTYDVSRDEWFQLRAAILYTITDLPRLGYVSGHPTSGKFACQHCHLNTCSLYLKKGMKTCYLGHRRFLPQNHSFRFDEKSFDGTKELRDAPVQPSGHDILKETENLNVVFGKAEKKKRKRKDDDNNDGGSTVIWKKRSCFFRLPYWEHLLVRHNLDIMHIEKNVCDNIVNTLLNVDRKSKDNLNSRLDLQSLGIKQDMHPVMQGTKVFLPPTAFSLSAHEKKLFYQVLKDVKFPDGYASNISNKYLLPLAIRRILPENVCVPLIRLSNFFQKMFSPVIRISEMEELEYEIAETICQLEKIFPLSFFDIMLHLPIHLAHEARLAGPVQYRNMFPIERKHREYILSTGIQRTRDIERVHHETFHDWFRTHVQDVMAKGENPSKEIQILAKGPDMHVITYNSYLINGYNFRTKSCDEGKSTQSSGLVVFAETSSFSSVKDINPVIGKVPYYGNITDIIELNYSGRGQVVLFKCDWIKLSRGKGVKKDKYGVTLVNFNHLSNNTNSLADEPFILASQATQVYYVRDPIDQDWYAVRESKSRDFYDMGILECESEKDVYQQKDQVDVMNNSVNIDVDCGNDYLTRNDINGTTIDLAAVSQRGNNGKRKKRNNEVLVQHLPHLAGKFKMNAQKTRQITSNMPSKSVDFQCHDAYFSEEDVQDQSYEENDLRELSEADDMDQSFEANMDSYDGKNVKLKVDYNEHFQPVGPYASKLANVIGNLAKGKFLSLAYEDWTDVPNKDDVWDNVKARSNRGKANRAKMVAVHTIGTRSLANVRHDMEKKKGRKVSRAEVFKVAYTRKDGRPQPAHEVTIIQPRIVEALQLNQKRPAMKVQPRIARELQLNLNKHARKVQPRIVEESQLNHNRHDGMVQPGVARESQVNQNMHVTKGVQKHMARYNNNKPTEIEGANVGTTKHANVKRAALACENVVGRDVFLKRIVRPYNRVARATIQSQDPLEMVGGTMLGRECYKVVIDSLICGDAELFRPHRNLNYIRDAIGHCIAWPSQLVEEVSPQCNGEVTKTGTWDRCLPYAEFSYNNSYQASIQMSPNEAMFGRKCRTPLCWTEVGEALVFGPDMLKAAEEQVKLIRERLKTAQNRQKNYADNRRRDLEFEKGDHVYLRVSPLRGMRRFGMSGKLAPRYIGPYLITARRGEVAYQLELPEGLADVHNVFHVSQLKKCLRVPEEQVPLGNIELEKNLTYKERPIKVLEEAERQTRRKTIKFYKATPHRGQLPLFPLGRRAKPSARPLPPRAATSPARAPPPRHCHFATTTVSTSGLHLGRTNRHRDHRRLRLARDHNHTASAGPHGRRLRDHPTPPPRPPLPGAAPAPPRCAGLFSPSTQCLPAEVELLPQAVAEWWSEDDGCIWLTPPPPTAIALASTIELAYAEAKGRVYRGHRVWQISFGSGFKCNSTVWRALRDVPPVSAFVTAAWPMALLGGSFAAGVARRCRRPPRCLPIHPTPPGRLQAATVASARATAAGVFTFDRVKKTASVDTSAWQTA

SEQ ID NO: 177021 - protein, 43 aa, Oryza sativa
  Clone ID: PAT_MRT4530_74714C.1.pep
MSAAGEEDKKPAGGEGGGAHINLKVKGQVCLSSCSQTRSLIIQ

SEQ ID NO: 177022 - protein, 117 aa, Oryza sativa
  Clone ID: PAT_MRT4530_74715C.1.pep
MEKAEQWQYHDLFETKFVVKDRACRTIIDSESCNNFVSSDLVEKLELLTQPHPHLYYIKWFNSCDNLQRMKNGIDEIFRDTRKDAIVMSSTKSELQNERIAVPIVLDTNVLQAFENN

SEQ ID NO: 177023 - protein, 73 aa, Oryza sativa
  Clone ID: PAT_MRT4530_74716C.1.pep
NEKQLKILGSILVERSILSSQLIHHSFGFSRSSRAAMAAALHRRRQGVNHQAAQAGLERTPPIPNPISGAAGL

SEQ ID NO: 177024 - protein, 364 aa, Oryza sativa
  Clone ID: PAT_MRT4530_74717C.1.pep
MAFATLFDSLYCPEEHLDLFHDTAADDDLHLDLHLHQPPPPPPLLDDDLPALFHALRGKEDPLRPAADDDGYGGVSAREAAVGWALRAVARLGFSALTAALAVAYLDRCFLGGALRLGDRPWMARLAAVACVALAAKVEETRVPVLLDLQLCAAERADPNEAYVFEDKTVRRMELLVLSALGWRMHPVTPLSYLQPLLGTAHAARLHHCDTALLALMPDWRWPRHRPSAWAAAALLATAGWCGGGGGDDAELLALIDAPKDEMAECAKIISEEAAAAAAGGIVIGGENKRKGAAGLYSAPASPSGVIGASACFSCDSSSSSVDSLFAALEPPGRPIKRGAAAATTADPLPADEESRDAWPPYAA

SEQ ID NO: 177025 - protein, 67 aa, Oryza sativa
  Clone ID: PAT_MRT4530_74718C.1.pep
TWTPCVNPKQFKLGAQIGQQGMCTHGYTYLFIALHKELTYKCESNPMFFGGMFPSTMNSLQACWPPW

SEQ ID NO: 177026 - protein, 139 aa, Oryza sativa
  Clone ID: PAT_MRT4530_74719C.1.pep
KKGALCFREESFPPPWLAKPPHGALLPGGGEFKIFLGNPESFLNLWPLPPRGGKPRLLLGGGAQATPINFFKGGVGVYLGPPPGLGFPFLWAAGGPFLGCPKSPPFFFRLNEGSGGPFFFKKKNHQKKKKKKGGKKTKE

SEQ ID NO: 177027 - protein, 65 aa, Oryza sativa
  Clone ID: PAT_MRT4530_7471C.1.pep
MSETQVVKSRQCAFQVRPGMDRETRGDLQGREGKLRRCRAPPPLSPFHLQSDLVGWKGGRGRDLP

SEQ ID NO: 177028 - protein, 286 aa, Oryza sativa
  Clone ID: PAT_MRT4530_74720C.1.pep
MGQARAHLLASLWAFYLILAISMVTGDLTNDLDILWGNSKVFYDNSGKQTISLTLDRWTTSAFRSKSTYLFSRIDMDIKLVAGDSAGTVTTLYMITEGLWQFHDEIDLEFLGNSTGEPYTLHTNLYARGKGGREKRYKLWFDPTADFHTYTIIWNQRNILILVDDKLIRQIKNNLMYSVPYPTYQPMRVYGSIWNADDWATMGGRVKTDWSQAPFTAYFRNYRAIACPPQQSSPLCGQSSGNWFNQELDVTRKQQLQEVDANYKIYDYCTDTKRFKDNLPKECTIN

SEQ ID NO: 177029 - protein, 64 aa, Oryza sativa
  Clone ID: PAT_MRT4530_74721C.1.pep
IYIFLAFMGFIYICLTQQHKILSLYHSYIKSVREKKNKTNFYPGPQIKRPPKNCHTPKKEGHII

SEQ ID NO: 177030 - protein, 45 aa, Oryza sativa
  Clone ID: PAT_MRT4530_74722C.1.pep
PPPPCRGAGLSACWVSPRLRVVCEGDERTERAMRQRTARGAGIGR

SEQ ID NO: 177031 - protein, 481 aa, Oryza sativa
  Clone ID: PAT_MRT4530_74723C.1.pep
MGKGIINIFKNLNQPLSNLCRPGLPLHLLVLAPKSASSYATNPERAIHFIPFHQPTYPTEHHSHPIQMIRDLNLLPEEEGDGGALPDLNGEADMEEDGRAAVILGDNLLGVDGQEHEGFLDLNLHPFDLNMEAIEEEQMQQDDHDALQFELEALEDDLREYGVYAEVVNVVFDVEELPDSDDDQEEHANDNVAIAQEFHVSIRTVQRIWKRAKICHEQGITVNVDSRKHGNSRRKKVEIDLSVIAAIPLHQRSTIRSLAQALGVSKSTLHRWFKEGLIRRHSNSLKPYLKEANKKERLQWCVSMLDPHTLPNNPKFIEMENIIHIDEKWFNASKKEKTFYLYPGEKEPYFTVHNKNAIDKVMFLSAVAKPRYGDEGNCTFDGKIGIWPFTRKSLTHNRISRNMDELIENVHKEYRDYNPNTLNRVFLTLQGCYIEVMRANGGNKYKIPHMNKERLEALGVLPKALSCDRGLYERVVESLAN

SEQ ID NO: 177032 - protein, 50 aa, Oryza sativa
  Clone ID: PAT_MRT4530_74724C.1.pep
MGRLSSCGGVQAKLRKGLWSPEEDDKLYNHIIRHGVGCWSSVPKLAGLQR

SEQ ID NO: 177033 - protein, 53 aa, Oryza sativa
  Clone ID: PAT_MRT4530_74725C.1.pep
RVADEKVKQKPAGAPPCTTPSSSPRPRGGWLAGRANRPRFFSFLSQKRAHRRW

SEQ ID NO: 177034 - protein, 680 aa, Oryza sativa
  Clone ID: PAT_MRT4530_74726C.1.pep
MTALETEAATPSTAATRAQLLPRWLRLGETSTPSSSASSTTTCRHRPSRCPSRACLLGAATTLGCHRPSLFPCCRRRVAGVPLHLLVLAPKSASSYARGHERAIHFIPFHQPTYPTKHYTHPIQMIRELRELQEEAGEEGDGGALPDLNGEADMEEDGRAAVILGDNLLGVDGQEHGGFLDLNLHPFDLNMEATEEEEMQQDDHDALQFELEALEDDLREYGVYAEAVNVVFDVEELPDSDDDQEEHANENVASKSKDLTNIQRRGIYQLLLQKSKDGKLEKHTTRLVAQEFHVSIRTVQRIWKRAKICHEQGIAVNVDSRKHGNSGRKKVEIDLSVIAAIPVHQRSTIRSLAQALGVPKSTLHRWFKEGLIRRHSNSLKPYLKEANKKERLRWCVSMLDPHTLPNNPKFIEMENIIHIDEKWFNASKKEKTFYLYPGEEEPYFTVHNKNAIDKVMFLSAVAKPRYDDEGNCTFDGKIGIWPFTRKEPARRRSRNRERGTLVTKPIKVDRDTIRSFMISKVLPAIRACWPREDARKTIWIQQDNARTHLPIDDAQFGVAVAQAGLDIRLVNQPPNSPDMNCLDLGFFASLQSLTHNRISRNMDEVIENVHKEYLDYNPNTLNRVFLTLQGCYIEVMRANEGNKYKIPHMNKERLEALGVLPKALSCDRGLYERVVESLAN

SEQ ID NO: 177035 - protein, 431 aa, Oryza sativa
  unsure (1)..(431): unsure at all Xaa locations
  Clone ID: PAT_MRT4530_74727C.1.pep
MAAAAAEGAAAKALRAVLGRAAKAAERSGRAAEAVRVVAVGKTKPVSMVRELYDAGHRCFGENYVQEFVTKAPQLPEDIRWHFIGHLQSNKVKSLLAAVPNLHMVEGVDNVKIANHLDRAVSSLGRDPLKVLVQVNTSGEESKSGIDPSRCVELAKHVKLACPHLIFSGLMTIGMKDYSSTPENFKALVNCKLEVCKAIDMPAEQFELSMGMSGDFEQAVASSMAGSEDLSGLTASLGELHVESSALKDSEISHPGNAFDDDAIADDDVWDDVSDSPGHGSTLDREWAHRQNQFHKMGYRDGIAEGQKDIAQEGFNVGFGQSVHVGYKWGLVRGITSALASLPDNLKEKMFPNVQCRGQLQDLNNSXVKNFHAEDALQMFHESILRSSHSSEEPDATFKRATDSSRLQSLSXKDLVILLHECPDVKVSEET

SEQ ID NO: 177036 - protein, 108 aa, Oryza sativa
  Clone ID: PAT_MRT4530_74728C.1.pep
DFKLSLRIGTIYTATLVKVPHINCTCCTYRCAFPVDMVWLEQTSCYITRLFLGPKGQPRNDPGLLFGESGSAHKITSYGRLSHIPHATYILRLVKKISTSSYVLYGMD

SEQ ID NO: 177037 - protein, 76 aa, Oryza sativa
  Clone ID: PAT_MRT4530_74729C.1.pep
LLDFNHHCCSFPRHISFKRLRRSMPPGLPGLCPKLHPRLEFYCMRRSFAKRWHRISFFEAAMTFRHNQQYVIASIS

SEQ ID NO: 177038 - protein, 74 aa, Oryza sativa
  Clone ID: PAT_MRT4530_7472C.1.pep
MAMWAPRALITVVGGGSSGPATGDPRAHVETPRGAGTPHPADVAVRGGRTSRHAFGAGPHVADLFRCGETQQQI

SEQ ID NO: 177039 - protein, 146 aa, Oryza sativa
  Clone ID: PAT_MRT4530_74730C.1.pep
KMLERDFAPPTRSCVLPPGCCILVLCPPRSRGPLSPPSTLPLPTPTCCPAGAGPIRRGRHRGRPLAPVPSPPSPRCTPPLGSRWPSHSAPTKPRGCLARGTDRGELPPMPQEPCQAFAISQGFLATTLPLYKFQVSKSFSTILLAR

SEQ ID NO: 177040 - protein, 114 aa, Oryza sativa
  unsure (1)..(114): unsure at all Xaa locations
  Clone ID: PAT_MRT4530_74731C.1.pep
TCQPQRAFGTNRPTHFYSLLDEHGFASDDLQKLVYNLWFVFAPCTKPVSLAPPVYXADLAAYRGRVFYEGMIMLQPPPFFPGLGLLASSSGAGAFDFRSFPALPEDLVGNMFFI

SEQ ID NO: 177041 - protein, 125 aa, Oryza sativa
  unsure (1)..(125): unsure at all Xaa locations
  Clone ID: PAT_MRT4530_74732C.1.pep
RIEVLDRNQREQDERCREQAQRARELEEHARAXLAAHERTAAEAESSLRLREDAAAEHNRTTFVAEAPVARRAEELRLREEACRERDAVLAVREAKVNRREVAACRQGEQLAMREEAVAGREARH

SEQ ID NO: 177042 - protein, 682 aa, Oryza sativa
  Clone ID: PAT_MRT4530_74733C.1.pep
MSEDATVRVGESRPRPRYPERSVHLLSFAMVGLVPPFSRFFHEVLDFYKFHALHLAPNAMITLAIFAHLCEMFIGVRPMVRLFQSFFVPQLQQGAAVGGCYLQPRPGTAGQYIESHLRKKWEDWKKYWFYTTLPDHPQLWLPAPPPERSAAWLAVSELGEEYDAVRDRLRGLRDQGLTGAMVFGDYFRRRIAPLQERSRGAWEYTGHNDPMRTHVGERWDWGEEDAKTGSKSERPDRPGPGRLDATGPSQYPGGAHGPHAGSGSESATAEVQPSAGDGSGGGVPPGSDPEGATYEERHSGAEAEAGRGLEAKVERAPWAEAGRGSEVLATADSTVREGLNAQVQALVDERAALEAEWAQLVVDRARVDEGRRAVDNMVEVGHKMRQAQLAEIQREQDERCREQAQRARELEEHARALEERTRVLEERARMLDQRETTLAAHERTAAEAESSLRLREDAAAEHNRTTFVAEAPVARRAEELRLREEACRERDAVLAVREAKVNRREVAACRQGEQLAMREEAVAGREARHLESAHAERAAMAARASLEAREKELVAGGQFGGAELVNQLTAAQNTLVDLGRLVQDQAGEIAALRLTNEIGPGQLSDAVERLECAGRRDFPLGTEARAREQVREAADAIISSFEGSAPRLNLALALDEESGCEDGGGDDGGKDWDEVVSGPGTP

SEQ ID NO: 177043 - protein, 73 aa, Oryza sativa
  unsure (1)..(73): unsure at all Xaa locations
  Clone ID: PAT_MRT4530_74734C.1.pep
IRVNVVTQCPIWMQLIPAXVPXDKISQFVSQVPMGRPVHLXQVAPRLVFLANDDASYMSDQMLHVNGVVIDND

SEQ ID NO: 177044 - protein, 62 aa, Oryza sativa
  Clone ID: PAT_MRT4530_74735C.1.pep
PLVLFKNFCQICKIICPHKNIFNNELNEWKKINNYLNFLNKTNGQTCDKKSTASNISKRMEY

SEQ ID NO: 177045 - protein, 149 aa, Oryza sativa
  Clone ID: PAT_MRT4530_74736C.1.pep
PESTGRSEPARQATTAADDDDVDGDEETMSYQKVPPPQDGYPPPGYSQPYPPPPSGGQYPPTQYYPPPNQPPPGYQGYFSEGQQPPYYYPPPHDPHHHHGHHHHHEDHHHHGHHHHGHHDDDCCLGFLRGWLAILCCCCVLEECCCCCC

SEQ ID NO: 177046 - protein, 69 aa, Oryza sativa
  Clone ID: PAT_MRT4530_74737C.1.pep
PGGVPPPRACAPAMADPLTPPPGTCSRTERRPRHGKVSFELNCGWHQKVFIFVLLVAALKISRPLICRC

SEQ ID NO: 177047 - protein, 830 aa, Oryza sativa
  Clone ID: PAT_MRT4530_74738C.1.pep
MAGDGAKCSDEVNDGTYFMAGVMAVTGLMATVLALSGIFHCALRRVGQPSIISHILAGVVVGPTVLGRAVDLRPLGMQDAGSALSDTIYFVRIIFMFFIGLEMDLRYLRHHLRRSLAIACGGSGLCLLLAALAGPFFYGLLHPGQGPFKPEKLYASTALFMLVLTTTASPVLIRIVTELKLTGSEAGQLAIGAAFANDMASLSVFSIMVVGTTAYGPDGQPTPSFPDMSIVMSMAFTACLAVLAAARAARLLNRLKRGRRYVSKYELCAMLLLIIALSLLEQVFGYSASMTAFLIGLAMPRDGPTARTLVDRLTYPVHQLVMPLCFGAIGARLDFAAVGSFTAMQFAVAVAFTTLLGAVGKVGGTVLAGRMLGISARESLVLGFLLNVKGYCDILAINFGNQAGIWGQTAQVVLLLSSILNTFMAGPAAAAIVRQQRAASRYRSRCLQDLKVDHELRVLVCVHGAGGVHTMLTLAELSKGTAPLAVYLLHLVELMAARKYAITHLYHDADADDDEWGYAREIEQVAAAVNTFTYDAGVPVRQMTAISSLGSMDADVRNGVEDSRASLVIVPFHKEQRYDGRMVCRREGRRQLNQRILQRLPCTVGVLVERRLGGGGDKGAEDVVKNQVVAVFLGGPDDREAVAYATRLAAHPWVSVTVVRFLPARQDDITIGIDEQLLATTKSHGGEGAMEVAVEDEEAMADEEFMADVYARLVLAGQVEYTERYVSNGAEMVNSLSAMVGTYSLFVVGKGGGGSAAAAMTSGMGGLLEDECPELGPVGEVLASDDFTACGSVLVLQQHSAHVHRRMRRWNPNIHITTTPSSSDHHSHPP

SEQ ID NO: 177048 - protein, 890 aa, Oryza sativa
  unsure (1)..(890): unsure at all Xaa locations
  Clone ID: PAT_MRT4530_74739C.1.pep
MDDAGEIHALGGSLRREASSARSGDAAVFFSRSSSRDEDDEEALRWAALEKLPTYDRARTAVLAMPEGELREVNVQRLGPQERHALLQRLAWVGDDHARFLSKFKDRVDRVGIELPTIEVRYENLNVEAEAYVGSRGLPTILNTYANVLEGLANTLHITPNRKQKISILHNVSGIIKPHRMTLLLGPPGAGKTTLLLALAGNVPSGLKVSGQITYNGHTMDEFEPRRSAAYVSQHDLHMGELTVRETVNFSAKCQGIGHRYGCCNRRAESRGVTNHILKVLGLDICADTIVGNNMLRGISGGQKKRVTTAEMIVTPGRALFMDEISTGLDSSTTYNIVDSIRQTIHIVGGTAVIALLQPAPETYELFDDIILLSDGQVVYNGPREHVLEFFESVGFKCPERKGVADFLQEVTSRKDQRQYWMHGDETYRYVPVKEFAEAFQSFHVGQAIRSELAIPFDKSRSHPAALKTSKYGASMKELLKANIDREILLMKRNSFVYIFKATQLTLMTFIAMTVFIRTNMHHDSITNGGIYMGALFFGILMIMFNGLAEVGLTIAKLPVFFKQRDLLFYPAWTYSLPSWIIKTPLSLLNVTIWVFITYYVIGFDPNVERLFRQFLLLLVMNETSSGLFRFIAGFARHQVVASTMGSFCILIFMLLGGFILSRENVKKWWIWGYWISPLMYAQNAISVNEFLGHSWNKTIPGFREPLGKLVLESRGVFPEAKWYWIGVGALLGYVLLFNILYTICLTFLNPFDSNQPTISEETLKIKQANLTGDVIEASSRGRITTNTNTADDSNDEAISNHATVNSSPGKKGMVLPFVPLSITFEDIRYSVDMPEVIKAQGVTESRLELLKGISGSFRPGVLTALMGVSGAGKTTLMDVLXGRKTSGYI

SEQ ID NO: 177049 - protein, 286 aa, Oryza sativa
  unsure (1)..(286): unsure at all Xaa locations
  Clone ID: PAT_MRT4530_7473C.1.pep
SRRTLGPSGSQRLPRRRAAAVVHGGGGGCRRGGGWTRRRARRRSRTRRRLRTEAEAVAEARRGPDERRRSVAEAEAEAVEDEAAAGRGGGGGRGRGGSRSRRRRRGEARMSGGSRXGGGGGCGRGGVGRGGGGGRARRRRPGEARTSGGSRSRRRRRSRTXGGRTRRRRRSRMRRRPRTEADARRGADERRQSVVEAEAVADEAAAGRGDGGGRXEAAAGPGGGGGRGGKAAAGADEAASVADEWRQSRXADAVRSSQVGRVRPALFPGSIGPGSERNIPLQGPIH

SEQ ID NO: 177050 - protein, 1444 aa, Oryza sativa
  Clone ID: PAT_MRT4530_74740C.1.pep
MDDAGEIHALGGSLRREASSARSGDAAVFFSRSSSRDEDDEEALRWAALEKLPTYDRARTAVLAMPEGELREVNVQRLGPQERHALLQRLAWVGDDHARFLSKFKDRVDRVGIELPTIEVRYENLNVEAEAYVGSRGLPTILNTYANVLEGLANTLHITPNRKQKISILHNVSGIIKPHRMTLLLGPPGAGKTTLLLALAGNVPSGLKVSGQITYNGHTMDEFEPRRSAAYVSQHDLHMGELTVRETVNFSAKCQGIGHRYDLLMELSRREKEENIKPDPEVDIYLKAAATGEQKAEVVTNHILKVLGLDICADTIVGNNMLRGISGGQKKRVTTAEMIVTPGRALFMDEISTGLDSSTTYNIVDSIRQTIHIVGGTAVIALLQPAPETYELFDDIILLSDGQVVYNGPREHVLEFFESVGFKCPERKGVADFLQEVTSRKDQRQYWMHGDETYRYVPVKEFAEAFQSFHVGQAIRSELAIPFDKSRSHPAALKTSKYGASMKELLKANIDREILLMKRNSFVYIFKATQLTLMTFIAMTVFIRTNMHHDSITNGGIYMGALFFGILMIMFNGLAEVGLTIAKLPVFFKQRDLLFYPAWTYSLPSWIIKTPLSLLNVTIWVFITYYVIGFDPNVERLFRQFLLLLVMNETSSGLFRFIAGFARHQVVASTMGSFCILIFMLLGGFILSRENVKKWWIWGYWISPLMYAQNAISVNEFLGHSWNKTIPGFREPLGKLVLESRGVFPEAKWYWIGVGALLGYVLLFNILYTICLTFLNPFDSNQPTISEETLKIKQANLTGDVIEASSRGRITTNTNTADDSNDEAISNHATVNSSPGKKGMVLPFVPLSITFEDIRYSVDMPEVIKAQGVTESRLELLKGISGSFRPGVLTALMGVSGAGKTTLMDVLAGRKTSGYIEGNITISGYPKKQETFARVSGYCEQNDIHSPNVTVYESLAFSAWLRLPAEIDSATRKMFIDEVMELVELSPLKDSLVGLPGVSGLSTEQRKRLTIAVELVANPSIIFMDEPTSGLDARAAAIVMRAIRNTVDTGRTVVCTIHQPSIDIFESFDELFLMKRGGEEIYVGPVGQHSCELIRYFESIEGVSKIKHGYNPSTWMLEVTSTVQEQITGVNFSEIYKNSELYRRNKSMIKELSSPPDGSSDLSFPTEYSQTFITQCLACLWKQSLSYWRNPPYTAVKYFYTIVIALLFGTMFLRLYLTNQQDLFNAMGSMYASVLFMGVQNSSSVQPVVSVERTVFYRERAAHMYSPLPYALGQVAIELPYILVQSLIYGVLVYAMIGFEWTAAKFFWYLFFMYFTLSYYTFYGMMSVGLTPSYNVASVVSTAFYAIWNLFSGFIIPRTRIPIWWRWYYWVCPVAWTLYGLVTSQFGDVTDTFDNGVRISDFVESYFGYHRDFLWVVAVMVVSFAVLFAFLFGLSIKIFNFQKR

SEQ ID NO: 177051 - protein, 639 aa, Oryza sativa
  Clone ID: PAT_MRT4530_74741C.1.pep
MLGRAGALSAARWRGGAGTGTGIGIDLRAALRSGGNLLFALFVAAVLAFTLLAAVHSPDDPLLHPSSHQLTAFLTSATSNSTFLADDSVLRTGEDFAAAIGANSSDAAAAAEATVVAEAVPFIKLEDVATKEESSGAERAVTVDTDASSDAGAAAEENPIVEAVSCDTEAPVDCTGDKDLFNLLMRTAIEKFSDLHFYRFGRPVAVPGSPMECDLAWRFRPAEDTNGRTTYYKDYRRFTLTRDVNTCNLVVGNVGEYHSGTGAKRSGRRKGKKGKKGKREAPVTDFVPAKTQMRLDENAANADTTAASEPELVVGEAVNDNLPVVESESEFSRGKYLIYMGGGERCKSMNHYVWGFLCALGEAQYLNRTLVMDLNVCLNSRYTSSGKDEERDFRLYFDFEHLKQSASVIDQSQFWTDWGKWHKKDRLKNHYTEDIKVTPMQLRDVKDTLIMRKFGNVEPDNFWSRVCEGETEAVIKRPWYLLWKSRRLMEIVSAISSRMDWDFDSVHVVRGEKAQNKQLWPNLDRDTSPDSLLTTLNDKVGAGRHLYIATNEPDKSFFDPMKGKYRTHFLDDFKDLWDENSEWYTETKELSNGNAVEFDGYMRVAVDTEVFLRGKRKLETFSDLTRDCKNGVNTCPASS

SEQ ID NO: 177052 - protein, 217 aa, Oryza sativa
  Clone ID: PAT_MRT4530_74742C.1.pep
MTATGTDMTAALQALLDPTALSLGLPTPAINKEEYLAICLAALAGTRAKALVGVGRRAAGAGLQAVVPEARGGERRRAWRRRGLVATLRNIVRRPLAFPSASGSCGPADADACALIARLLAKDPAARCPRPRRRAAALVAVVQGGADNAATADDEGGLLRVQRGGEEKKGEAGLLKWPPEMWGPRGSHADLVVTSNKTGSKPSEVKEPSVYFIGPNL

SEQ ID NO: 177053 - protein, 170 aa, Oryza sativa
  Clone ID: PAT_MRT4530_74743C.1.pep
LARSRPSPFPAYPSSSSSSSSSACPVLVLVLLCSTPSDFLEAIAVLSPEKGKRRKEKAFLPPVLPRQHRVESRRYIFCSDWCLFLLEFCVLFLCVGGRPRLSILPSSCCPPLDSLLLLLLRKKEIKYYYLFDLFLLAISANPQVQYLVSIRADFSALPLPLFVPCLPSIF

SEQ ID NO: 177054 - protein, 85 aa, Oryza sativa
  Clone ID: PAT_MRT4530_74744C.1.pep
GGVKRSVCTRRPRQSGGMHKQNSSFGLMTDLFCHIVLILVLDLCCIIIRHLSLAVMQLQLQAGFACTNLVHLVLLLYVFPPQNIV

SEQ ID NO: 177055 - protein, 168 aa, Oryza sativa
  unsure (1)..(168): unsure at all Xaa locations
  Clone ID: PAT_MRT4530_74745C.1.pep
FEXVPNSGPIGXRILXLHVRSLXRDGRLXRXKVPEFXXXTGPRXTTATXLLASAXTXGGXXVPXPXADXCXVGDARRRPVXXXRSPXXXWXXTXAXXPPGXXPAPPXFLCXXFXLNPCGNXVPISPXLPRRXPRQSXXXRXXTPXXXXAXSLXTXXPXPXXAPXXXXG

SEQ ID NO: 177056 - protein, 196 aa, Oryza sativa
  unsure (1)..(196): unsure at all Xaa locations
  Clone ID: PAT_MRT4530_74746C.1.pep
MTRKRSNGGGAQAVAVCKRWIRWLLSVRAADPAAAAPLSRELXAFLPPSACRLLSSSARAPPPGRRDTSRRHRRFGEGGRGAPPPDPSGGEEPLRGECGMAIVCLRSGHLLLLVGGGGVDSRGQRRYSRPPRRRWPSGAAPTAARVHERRGDGVGGVDKDQESVGNQSYSLTQSHKNFRTQRVCNVRPLPAPGRVL

SEQ ID NO: 177057 - protein, 71 aa, Oryza sativa
  Clone ID: PAT_MRT4530_74747C.1.pep
MNIQNLIHFFKWKRTEYAARLVGLGRKGQLITVVAIASPFFAVDAANPSSSPSAETSIYGMQQSRALQHLQ

SEQ ID NO: 177058 - protein, 71 aa, Oryza sativa
  Clone ID: PAT_MRT4530_74748C.1.pep
FFFFYFFYFIFFTIFWVILTIHIHLSYIFYINFTPNIVLLKEGNQTNTNPEHYLLLHKKNPQNRTATTYKY

SEQ ID NO: 177059 - protein, 378 aa, Oryza sativa
  unsure (1)..(378): unsure at all Xaa locations
  Clone ID: PAT_MRT4530_74749C.1.pep
MAAARPCIPACQRLLGSRAALPSFGRALSTQTGFASCRKTASAGPFVSLNHKRFAVRAMSAQGLPIDLRGKRAFIAGVADDNGYGWAIAKALAAAGAEILVGTWVPALNIFETSLRRGKFDESRKLPDGSLMEITKVYPLDAVYDSPEDVPDDVKANKRYAGSSNWTVKEVAETVKNDFGTIDILVHSLANGPEVKNSLLETSRKGYLAAVSASSYSFISLLQHFLPIMNPVRSESRGATISLTYIASERTIPGXNTLSMFITSKLYGGGMSSAKAALESDTRVLAYEAGRKGKIRVNTISAGPLGSRAAKAIGFIEKMIEYSYVNAPLQKELLADEVGNTAAFLASPLASAITGSTIYVDNGLNTMGLALDSPTLST

SEQ ID NO: 177060 - protein, 82 aa, Oryza sativa
  Clone ID: PAT_MRT4530_7474C.1.pep
TSKGRKNNKGNDNRFNNSNGPPLTYTTAFFEGCKFYPGLSRFHFKVLTLEPPYLFFFFLPDNEPKIDKWSAQALIPKKNKKG

SEQ ID NO: 177061 - protein, 78 aa, Oryza sativa
  unsure (1)..(78): unsure at all Xaa locations
  Clone ID: PAT_MRT4530_74750C.1.pep
WARSRRRRRRQPSPPRRPPXTISPTTVRQGDRRPPPAAAAAGGAXRRRRRWTPPLPVGCRCSSARPSPPAPIPSLPRR

SEQ ID NO: 177062 - protein, 313 aa, Oryza sativa
  Clone ID: PAT_MRT4530_74751C.1.pep
MALSAALRLPLPRLLWGPTGSLLAAAAAASRRRAAVVAVPAVRFLSSSSSSSDGSRSVQPLRAGRDERAAAGEGGAAVKERVVPVELHKEATEAYMAYAMSVLLGRALPDVRDGLKPVHRRILYAMHEMGLASRRPFRKCARVVGEVLGKFHPHGDSAVYETLVRMAQDFSMRYPLVQGHGNFGSIDADPPAAMRYTECRLDSLTEAMFLTDLELNTVDFVPNFDNSQKEPSLLPARVPSLLLNGSSGIAVGMATNIPPHNLGELVDVLSVMIENPEATLQELLECMPGPDFPTGGTIVGNQGILEAYKTGRG

SEQ ID NO: 177063 - protein, 140 aa, Oryza sativa
  unsure (1)..(140): unsure at all Xaa locations
  Clone ID: PAT_MRT4530_74752C.1.pep
LLTVKFSKXRSSHRFRVSIGFEVLRLADESCQVVSCRILAIFACFLTANKGFIGVSADFMTSDLQPMYALAFXQCLFYHIDSQLVSIGLYCCCILSSSADCLYIIIYIRHIADCLNPIAIGWYRHRXWNHYIGLSADRLF

SEQ ID NO: 177064 - protein, 29 aa, Oryza sativa
  unsure (1)..(29): unsure at all Xaa locations
  Clone ID: PAT_MRT4530_74753C.1.pep
VDVXNXRXIXPVXPLLIXPCXSEVXSYKF

SEQ ID NO: 177065 - protein, 185 aa, Oryza sativa
  Clone ID: PAT_MRT4530_74754C.1.pep
MGPEVMQKAQAEIRHALQGKSRVTEDDLINLKYPKNIIKETMRLHPLASLLVPRKCQESCKILGYDIPKGTILIVNVWTIGRDHRYWDDAEVFIPERFEDTTIDFKGTHFEFISFGAGRRMCLGMTFAHATIELALTALLYHFDWHLPHGVTHDGMDMEEQFSVTVSRKRDLYLHPIQHVGVEEI

SEQ ID NO: 177066 - protein, 284 aa, Oryza sativa
  unsure (1)..(284): unsure at all Xaa locations
  Clone ID: PAT_MRT4530_74755C.1.pep
MDQEGAYFYQHVFHVGAKGQYARESDIKWASRXGWDTYLLMTDDQIHWFSIVNSLMIILFLSGMVAMIMLRTLYRDISKYNQLGTQEEAQEETGWKLVHGVQFIGMLLVTMVFAVLGFLSPSNRGGLMTAMLLLWVFMGLLAGYSSSSLYKLFKGAEWKNIALRTAFTFPGSVFAIFFFLNSLIWGQKSSGAVPFTTMFALVLLWFGISVPLVFVGSFLGFKKPAIEDPVKTNKIPRQIPEQAWYMNPIFSILIGGILPFGAVFIELFILTSIWLHQFYYIFGF

SEQ ID NO: 177067 - protein, 268 aa, Oryza sativa
  unsure (1)..(268): unsure at all Xaa locations
  Clone ID: PAT_MRT4530_74756C.1.pep
MSSMLEPKDNMQGVKHEYEGQWNDKKTRLTTCDPHAKHIITSSDSPQEVEVGKDIIFTYDVDFKESDIKWASRXGWDTYLLMTDDQIHWFSIVNSLMIILFLSGMVAMIMLRTLYRDISKYNQLGTQEEAQEETGWKLVHGDVFRPPSNSDXLCVYVGTGVQFIGMLLVTMVFAVLGFLSPSNRGGLMTAMLLLWVFMGVXAGYSSSSLYKLFKGAEWKNIALRTAFTFPGSVXAIFFFLNSLIWGQKSSGAVPFTTMXALVLLWFGI

SEQ ID NO: 177068 - protein, 91 aa, Oryza sativa
  unsure (1)..(91): unsure at all Xaa locations
  Clone ID: PAT_MRT4530_74757C.1.pep
MVRSNKKSISMPLEQGWXSCSSRSNXGGKGLLSDQGYYEKGLLKKVYFGEKKQKRGMTRVRLSRGRQXGGQLQSMCRVKPKQCSIFAAGQY

SEQ ID NO: 177069 - protein, 360 aa, Oryza sativa
  unsure (1)..(360): unsure at all Xaa locations
  Clone ID: PAT_MRT4530_74758C.1.pep
SFWIWEDHISAQVYDGCQSWETSFIVQAYCSTDLVNEFSQTLIKAHEFIKMSQVLENTPDNEAYYRHRSKGSWTLSTADNGWCVSDCTAEALKALLMLSKISPDLAGDAINGERLYDAVDGMLSFMNKDGTFSTYECERTTHWLEVLNPSKTFLNIIVDYPSVECTSSVLQALIMFSECYPVYRKEEIGKCIKNASKFIENKQRKDGSWFGTWGICFTYGTFFAIKGLVAAGRTYENSSSIKKACNFILSKQLSTGGWGETYLSSETEVILTIHFHRSHVVNTAWAMLALIYAGXVERDPSPLYHAAKELINMQLETGEFPQQEHVGCFNSSIYFNYSNYRNLFPIWALGEFRRRLVLRK

SEQ ID NO: 177070 - protein, 613 aa, Oryza sativa
  Clone ID: PAT_MRT4530_74759C.1.pep
MYAKQNRLQVDVPASKLVDSTQVTEQIILASLRRALTQHSSLQAHDGHWPGDFSGIMFIMPILERSIDALTKGRAWIISRGSAAAVPQWGKIWLSFIKLYDERVNASYSYILKVIGLYDWSGNNAIIPELWLVPHFLPIHPGRFWCFCRLVYMPMAYLYGKKFVGAITPTILEIREELYSVPYNEINWKNARNNCAKEDLRYPRSFVQNVIWTGLNKVVEPILSLWPFNTLRHAALNNLLKHIRYEDESTKYIGICPINKALDMICCWIDNPNSDAFKLHLPRIYDYLWLAEDGMKAQFHGCGHNGGDGLGIGAHSRWSWRGRQQAHGAGGAGSFKIKLEMVYDGCQSWETAFIVQAYCSTDLVNEFSQTLTKAHEFIKKSQVLENHPDYEAYYRHRSKGSWTLSTADNGWCVSDCTAEALKALLMLSKISQDLVGDPIDGERLYDAVDGMLSFMTYQLWGLIQILEADMNEDGTFSTYECKRSTPWLEVSTIKSYFLFKVKWFCTWGICFTYGTFFAVKGLAAARRTYENSSSIRKACNFILSKQLSETYLSSETKVYVEASRPHAVNTAWAMLALIYAGQVEIDPTPLYHAAQELINMQLETGEFPQQVSI

SEQ ID NO: 177071 - protein, 110 aa, Oryza sativa
  Clone ID: PAT_MRT4530_7475C.1.pep
MVENLSTCRLWLVREQRRRSPEDDTTTTELVTVATSAAAPSQARGGLPLPPLGIRSGVPNLRGAGSGRGDGQRQEAAAAGSDRAARGEDMVVGGIGAQEVDQETTVELHE

SEQ ID NO: 177072 - protein, 142 aa, Oryza sativa
  unsure (1)..(142): unsure at all Xaa locations
  Clone ID: PAT_MRT4530_74760C.1.pep
XXXXXXXPNRNGAAKTRGGHAAGPGARARAPXXPPRXXPXXXXXXXPDGWWAVPSRAERAFWPSILTSVPRRRPWSVRPVHQTEPLTNGPATPVHVPAHEPWAEPTTSSRRALRRPGLLCAGRLVQLTDGPRKNIPSEYSFQ

SEQ ID NO: 177073 - protein, 36 aa, Oryza sativa
  Clone ID: PAT_MRT4530_74761C.1.pep
KYNDASTASSGFIIPDMVKTLHSIKLDDVKKCLTSA

SEQ ID NO: 177074 - protein, 136 aa, Oryza sativa
  unsure (1)..(136): unsure at all Xaa locations
  Clone ID: PAT_MRT4530_74762C.1.pep
SNPTRPVRRMLVFGLGLMFIQQATGVDCVLMYSPRVFXRATLTRKSHWLAACMAVFRCKILLILIATLXMDRVCQRPFQLASGSWMGILLFTLATCLLMMDRRPEGQANXSWRLKILSKLSFRAFFAFGLGPVPWV

SEQ ID NO: 177075 - protein, 104 aa, Oryza sativa
  Clone ID: PAT_MRT4530_74763C.1.pep
RHLTADQSASPSRFSLDQLLSARHLSACVGARPVRPSVRVGRTGCHLTRRRPPMTDVASRRRRHTLETALHLMEYTQVHEEIWGIDINLDHLRANWNNPTTVHE

SEQ ID NO: 177076 - protein, 55 aa, Oryza sativa
  Clone ID: PAT_MRT4530_74764C.1.pep
TNRGGAKTDETGSGRGGVCPPPSRTHRCHRLRRRRRQGSRSCSCRSHRSEPPSAA

SEQ ID NO: 177077 - protein, 1273 aa, Oryza sativa
  Clone ID: PAT_MRT4530_74765C.1.pep
MVCELQELEATILPQFQLVIEAAEKSPHKGKIERWLRKLKAAFYDTEDVLDELEYDILKRVAEKGAQASLMVASSNSVPKPLHAASNKMSNLRPKNRKLISKLEELKEILVEAKAFHDQLGIQAGNSTELMVTAPIRPNTTTSFSSSNVVGRDEDRDRIIDILCKPVNAGGSMARWYSSLAIVGVGGMGKTTLAQHVYNDERVAQYFDARIWVCISRKLDVHRHTQEIIESAGKGECPRIGNLDTLQCKLRDILQESEKFLLVLDDVWFDESKSETEWDWEQLLAPIASLQRGSKILVTSRRNALPAVLDCKKIFPLESLKDTDFLTIFKSHAFSGAETSDPWLREKLEIAKKISRRLGQSPLAAKAVGSQLSRKKDIATWRAALKNGNLSETRKALLWSYEKLDPRLQRCFLYCSLFPKGHQYEIDELVHLWVAEGLVDSCYQNNRMEDIGRDYFNEMVSGSFSQPVSKTYVGTRYIMHDLLHDLAEALSKEDCFRLDDDKVKEMPSTVRHLSVCVQSMTLHKQSICKLHHLRTVICIDPLTDDGTDIFNEVVRKLKKLRVLYLSFYNTTNLPESIAELNHLRYLNIIKTFISELPRSLCTLYHLQLLQLNNKVKSLPHRLCNLSKLRHLEAYDNRIDILIKADLPQIPDIGKLSSLQHMNDFYVQKQKGYELRQMRDMNELGGNLRVRNLENVYGKNEALEAKLHQKTRLKGLHLSWKHMGDMDIEGVSHFEILEGLMPPPQLERLTIEGYKSAMYPSWLLDGSYFENLESFRLVNCSELGSLPSSTELFGRCMALTLWDVPNVKTLSFLPEGLTSLSIDRCPLLLFSTNNELEHHDHSESSMRTDHLAKHVLIAEAGSGSDTRSALLSEHSSMKQLATLMCADISENLQTIKSNLEKERDEALVKEDTIEAWLCCHKERMRFIYSAKSGLPLVPPSGLCELYLSSCSITDGALALCIGGLTSLRELSLTNIMTLTTLPSEEVLQHLANLNFLAIRSCWCIRSLGGLRAVSIKEMRLFSCPSLELACGAEFIPLSLRRLCIYRCVVGADFFCGDWPQMREILLCRCRCSASLHVGGLTSLELFALYHLPDLCVLEVSSSPRLHQVHLINVPKLTAKCISQFRVQHSLHISSSLILNYMLSAEAFVLPAYLSLERCKDPSISFEESAIFTSVEWLRLSKCEMRSLQGNMKCLSSLKKLDIYDCPNISSLPDLPSSLQHICIWNCKLLEESCRAPDGESWPKILRLPISAGRNSDELCIRITTTQQWLRWLLG

SEQ ID NO: 177078 - protein, 73 aa, Oryza sativa
  Clone ID: PAT_MRT4530_74766C.1.pep
MAPPRNRSTPPSFRCLEEAAGQIGEADESGEELGTGRGSEEEQWADLKRGFGGGEENPTETPSSGVKRKRKGL

SEQ ID NO: 177079 - protein, 50 aa, Oryza sativa
  Clone ID: PAT_MRT4530_74767C.1.pep
VWPYILLSVGRFFAYKTGLYQVQILLINILSLLLFHVQNPWDKLLGSTRN

SEQ ID NO: 177080 - protein, 76 aa, Oryza sativa
  Clone ID: PAT_MRT4530_74768C.1.pep
EVFPSPEPCAAVVPAVAATREDRRRHRQVAAVLVRPFAAVGDRRSIVAVVKPKTAAVSTSSLSPSVGPPPSLWSPV

SEQ ID NO: 177081 - protein, 247 aa, Oryza sativa
  Clone ID: PAT_MRT4530_74769C.1.pep
MGLLLVLNLRSATSLSGSGGLIAVHYTFLALNLVLGARVRVFAGKSQVLMASIIHGAFGYGTVLIFSGKMEAFWRVPKWKIEKAKVKVVFRLQFHATNIPSTGWDKLFLSFISADTGKVSAKTNKANVRNGSCKWPDPIYEATRLLQDSRTKTYDDKLYKIVVAMGTSRSSILGELDVNLAEFAEALKPVSIALPLRGCEFGTILHVWEFEQQRETGAKSTQQLVNQRSHDPSEIGVASSDIYSHKL

SEQ ID NO: 177082 - protein, 233 aa, Oryza sativa
  Clone ID: PAT_MRT4530_7476C.1.pep
MGTPEIVVGEGGGDFCRKISADMGTKCSSLSVEGVVVVVLFGVGGCIALHPFATSLTPPLLTPARVAGDAGPIPPASAAAASALLVAASDVGMVLQCRSHFVGIESSPPSAESNCLCTAKLPRDGLRTSEKETKPAVLTSTAMVMAKVVTSEKLCGACSRRRRWTPTAGGGRLLSHASEKKLGWRPAASGQRGPHRRGPRGDGSGKLNPWAVELQDGRRRQDKVVFSGGADRR

SEQ ID NO: 177083 - protein, 39 aa, Oryza sativa
  Clone ID: PAT_MRT4530_74770C.1.pep
MAKLTWTWLGATTVEEKEYEDAVWVVPGGDARLCCPGGQ

SEQ ID NO: 177084 - protein, 284 aa, Oryza sativa
  Clone ID: PAT_MRT4530_74771C.1.pep
HDSQIHTCCNACCYCNEVVVPYPSLFLSIDHWICTVPLAVCAAAATDWPRVLHLFCRRRHFAASSSTTLAAVSTAAFLIHRRSHFRRHLLPLKRRHRCLHAPPWFRYDQILVAREWGSVESLASAATLIEVRKERLVVMERRRTGPAATPSPVRDHTACQAVSPPPSIHGGHSTVPPAQGSGEVLRQPEAEEEVRQGQAGEPQLELQSHGGEGSGGGHNPSPASAGSPTRPPHRSTKKIAKLACALMAREAENGIHDPMKGRHRTFRCFSIRFSCRSKSDVLPS

SEQ ID NO: 177085 - protein, 192 aa, Oryza sativa
  unsure (1)..(192): unsure at all Xaa locations
  Clone ID: PAT_MRT4530_74772C.1.pep
MRESAVETALEVVKKEAPKWTVAAEEVQEAAPPRRHHVRRRRHKPRGRLWRKSNGRQKGKGKGQAPQPRXNSNRHYNKCGSDYHVTKDCRIPKXHLVLMYQKSLKEKNKSSKELRFEAHFNLTKERPEIESSHQVEAHFNLTKEKPEIESSHQAPIEPENNLALLLEDTAALSAMDDMLIEYCSTDPVGDLL

SEQ ID NO: 177086 - protein, 118 aa, Oryza sativa
  unsure (1)..(118): unsure at all Xaa locations
  Clone ID: PAT_MRT4530_74773C.1.pep
MAMAYKMETEGMNVYDECQRRLLEMKCENVHRLEGYKIYXRQRAVLXDKVRGPGEGFKELEPVLSTDDCPYTVLDFNYVIEDNWQNSKIFFIAWVPTASRIPAQIVFPHFEPWAVVGV

SEQ ID NO: 177087 - protein, 240 aa, Oryza sativa
  unsure (1)..(240): unsure at all Xaa locations
  Clone ID: PAT_MRT4530_74774C.1.pep
VTLQKVFILVWMIWKARNDFYFKKKVWGPIQVNIAAQIMSSNFVCDLNAQNEDHDSQIHQVNNCSALNFASVIRCYIDASWKDGSTGIGLFIHNSATHKALFFFKLHLNSXSSSLPAELAAIITTISIYQKLKITDVTLLSDNQELVNLLQVQDNDSQPHHWSLNPLLPKLIFHAGTQALNIKWISRQVNKIAEFLAMKARGKIGQSQNQIVCQDIXHLHSHSNCPTKDALESSPLMENV

SEQ ID NO: 177088 - protein, 72 aa, Oryza sativa
  Clone ID: PAT_MRT4530_74775C.1.pep
TGPPFFFPFNTLNSCFLQPQRAQALCACLAQMCYGHTYFSVCSCLCASIWVSQLQHKCRVLVDVACVLVYTL

SEQ ID NO: 177089 - protein, 187 aa, Oryza sativa
  Clone ID: PAT_MRT4530_74776C.1.pep
GRLIRPPVSPLRAPISIADYRAGLRFSRRRAHPPPSPLMAPGIVSAGAGLLVVLRLRSSRRPVLARSRSTRLPASPTPSGSGAADLPTTMLPDLGRQWHAAAVPDTVRGQRADPSTECITCLLPIYHALRLGGRSPLLFCALDGSLVYLHVHQVRALCRVLSCSSVNTDGCAHATHRSHVRCSLSLA

SEQ ID NO: 177090 - protein, 57 aa, Oryza sativa
  Clone ID: PAT_MRT4530_74777C.1.pep
FFFFFWKQKSKAPPLSITRNISVQLQGNKTRKAGKHSLADHTTNGDIPPFCVISTTT

SEQ ID NO: 177091 - protein, 130 aa, Oryza sativa
  Clone ID: PAT_MRT4530_74778C.1.pep
MTQTLLCARVQLGGPSWAVPLGRRDALSPSRSAVSTDLPGPEADISALVSAFAAKGLSSRDLAALSGAHTVGRASCVNFRTRVYCDANLYSSNAAAFSSDFAASMIRLGNIGPLTGSTGEVRLNCRKVNS

SEQ ID NO: 177092 - protein, 341 aa, Oryza sativa
  Clone ID: PAT_MRT4530_74779C.1.pep
MARRVGRAVPTRLILGRAPVPGHAHAGPGWVAHLAIIVQGDLVREAKTLWEKFRDGIVGTNHEVMATVDFLREKNVYKKDVRANAGAAVYLFPAVHLSTPLSLHTIINCCSCRMRTLNRYPPQSSMPITSQWQGEFVLYAQKFVKAGSHLRKEIDTLSERRSGFVQPHEDRVEKRPGSLQASRRRLESPQGFELRKIHHHFTGTSMEIPRMSNEAGPSQVVLPCIHQQMVPTHGKDNTWIMLTDEVGGLEGNDNNQHRINHERREPNRVSLLAPDMPQVQGNRQRKCKLHTVGTLMRDVRSENLAFRFVSMPVDLILQSTRNKDRKIVVKSINDSRSANRR

SEQ ID NO: 177093 - protein, 133 aa, Oryza sativa
  Clone ID: PAT_MRT4530_7477C.1.pep
ESNVAEAPKTTLPLLSSSPWPPQRQPPRKLGEASRCRPWASDPASPTSAALDLAEEMARVGLGGRGRAWSRRPAAGGVCAQAGQEAAAAGSDRAARGEDMVVGGIGAQEVDQETTVNSTNERWSTAHWRERWC

SEQ ID NO: 177094 - protein, 283 aa, Oryza sativa
  unsure (1)..(283): unsure at all Xaa locations
  Clone ID: PAT_MRT4530_74780C.1.pep
CVKYIANVHTLHKDRSDRVSLEYRMGVADFLNAAEQDKXRENSQYMTCLCVDCKNKNMFADRAXIHTHLIYRGCTNGYTRAAEYXEMKRATNKTRNDXEDNMFVPSPLGGYRVHVDNDSLNTMLYGVEDPACNEYXGWLSVLLDLMKLEIKXWMNKLLKDLFLEENVLPKTTYEAKQVVFPLSLEVXIHAYPNDCILFYKEYANLYACPICKVYXYKQKNSSKSGTMXRRAGGSWRGGPTKVLCIPILDRFKKICQSXKAELVRWQAIDQKADGMLRHPTNSM

SEQ ID NO: 177095 - protein, 326 aa, Oryza sativa
  Clone ID: PAT_MRT4530_74781C.1.pep
MAVGGRGRRPLLLLLLLLAVALALAARARAQLSPGFYSASCPTVHGVVRQVMSQAVMNDTRAGAAVLRLFYHDCFVGGCDASVLLDDTPAAPGEKGVGPNAVGSTTVFDLVDTIKAQVEAVCPATVSCADVLAIAGRRQGHPGGGPSWAVPLGRRDALSPSRSAVSTDLPGPEADISALVSAFAAKGLSSRDLAALSGAHTVGRASCVNFRTRVYCDANVSPAFASHQRQSCPASGGDAALAPLDSLTPDAFDNGYYRNLVAGAGLLHSDQELFNNGPVDSVVQLYSSNAAAFSSDFAASMIRLGNIGPLTGSTGEVRLNCRKVNS

SEQ ID NO: 177096 - protein, 41 aa, Oryza sativa
  Clone ID: PAT_MRT4530_74782C.1.pep
FGLSTAQGLVEFECENSTSKQRWVDDVKNLLRQVAGREEQD

SEQ ID NO: 177097 - protein, 211 aa, Oryza sativa
  Clone ID: PAT_MRT4530_74783C.1.pep
MAQGLSSRFSSGAVQRNFKDDHAFSENLMAAGRRGVRTSLPLARGPLLLYDDGHRFPYGYLVTTSPQSKTPPWYAPIRPPKAQYGGFPLDVGVDRSSQSPSAAPAAMAEAAGTRASQQQEEAAGIENGGGKDQLPEDTSKLNITVLWLAIYFRLMDGFGKLALAWATVVLLGGFSTLIKPKDFWFVTIIVVMQITRCVSIRHPYIYKVEVN

SEQ ID NO: 177098 - protein, 79 aa, Oryza sativa
  Clone ID: PAT_MRT4530_74784C.1.pep
VRPDPLVFFRSGNELAPWTCMINAVNGGSLRTSGVGRHTKATHFPNSPSPPTGMLDQRISEQQHITIRHGTGLLLFSWS

SEQ ID NO: 177099 - protein, 224 aa, Oryza sativa
  Clone ID: PAT_MRT4530_74785C.1.pep
MFEEEVNAKIMVIVENLTEEQRQQMEQFVADFQMRCLQCFIMTPEGQTQKTRFPKPIVEILQDTVDEAVHRALFNHSGVLADTLQNLIKPYPEWFDRVPLPHRYKILDFSMFLGQDDVSTKEHISRFLAQCGEASAEEALKVRFFPLSLTGSAFTWFSSLPPDSIQGWADLEKQFHEYFLAGIDELKLSDLISVEQQEGESAMEYIQRFRNIRSRCYGLSLSDS

SEQ ID NO: 177100 - protein, 37 aa, Oryza sativa
  Clone ID: PAT_MRT4530_74786C.1.pep
MGSSWSHVSIPRDGICCGDASPNCRGYHVEHASVGGE

SEQ ID NO: 177101 - protein, 94 aa, Oryza sativa
  Clone ID: PAT_MRT4530_74787C.1.pep
MGEDLWVFSCAGKWKPYPDQVRQTVSGCDEGLSSLSSSRCDRGCTPPDKQPVCKHTTSVTLVIRPVADQSQTGQAHHAPHLMQRGVPAQAALNA

SEQ ID NO: 177102 - protein, 69 aa, Oryza sativa
  Clone ID: PAT_MRT4530_74788C.1.pep
PGLYHQLRWFPTESPSLTTLVFLPAWSTTPRRSKASFWKRPRGASRNGFSSKGIINPSTAFSGVRDRRD

SEQ ID NO: 177103 - protein, 47 aa, Oryza sativa
  Clone ID: PAT_MRT4530_74789C.1.pep
QLFGGFGYPPKKVLSCILQSNLFVAASYLNYLYCTWRVYKSLYVFFF

SEQ ID NO: 177104 - protein, 80 aa, Oryza sativa
  Clone ID: PAT_MRT4530_7478C.1.pep
CPICCKSLGDMAVYFGMLDALLAAEELPEEYRDRCQDILCNDCERKGRSRFHWLYHKCGSCGSYNTRVIKTDTADCSTPN

SEQ ID NO: 177105 - protein, 603 aa, Oryza sativa
  unsure (1)..(603): unsure at all Xaa locations
  Clone ID: PAT_MRT4530_74790C.1.pep
MHAYVSLDPLERRSEEVMALLLQQRHGAGSAGHRHQVAGIIQHEQCNLLEVTAERNTVLHVAAEKGHVELINXLYHRFIKDNNFLSRRNSVLNTPLHCAAREGHTGTVTTLVHLAQDRXQNIMGCQNTAGDTALHLAARHGHGATVEALVAAHAKATELNKVGVSPLYLAVMSRSVPAVRAIVTTCSDASAVGPSSQNALHAAVFRSLEMVHLLLQWKPELASQVDCNGSTPLHFAASDGNSKIIRAIMATAPPGTVYMKDSDGLSALHVAAKLGHADVVKQLIGIRPDAVELRDSHGETFVHSAVREKRSSIVSLAIKKHKQVGGLLDAQDGDGNTPLHIAVVAGAPGIVNALLQKGKVQTDVLNDDGHTPLDLASTSPSLFNMVREGDREDFGQPRGGGRAHRHRCLAAGFNMPGGYTNDGSASLEGMSLFRWFVVLDPIAVASSVIAVILLVYGKASRSTGSWKSFVAALHCIWVSLVSLILAFFAASRAVMRTSTAESIVYIVIYVGIIVLSLFVAQWIGPVTTARAFWRFLWLSHRAHTVRRQYPFAVASIYNWLLFLHITYIMFAGLGVVHNHSNSDRGGLSSSWNPNHISPAPAPM

SEQ ID NO: 177106 - protein, 94 aa, Oryza sativa
  Clone ID: PAT_MRT4530_74791C.1.pep
MEVESAECECCELREECTRGYILGVKADFGGRWLCGLCSEAVRDEAAKLGRNRGGGGMEEAVRDHMSFCGKCRKNPAFRVADGMRQMLLRRRSK

SEQ ID NO: 177107 - protein, 402 aa, Oryza sativa
  unsure (1)..(402): unsure at all Xaa locations
  Clone ID: PAT_MRT4530_74792C.1.pep
MAAAVVCVTGAGGFIGSWIVKLLLARGYAVRGTSRRAGMGFFLFDSPPPRRRRRRRGLGGDELLDSCADDPKNAHLWALDGAAERLTMVSVDLLDRGSLRAAFAGCHGVIHTASPMHDDPEEIIEPVITGTLNVVEVAADAGVRRVVLSSTIGTMYMDPRRDPDSPLDDSFWSDLDYCKNTKNWYCYAKTIAERKAWEVARGRGVDMAVVIPVVVLGELLQPGMNTSTKHILKYLTGEAKTYVNESHAYVHVVDAAEAHVRVLEAPXAGGRRYICAERTLHRGELCRILAGLFPEYPIPTRTTALVTCHEVLESQVSQWLEDHFRMPWCRDEINPPKKGYKFTNQPLKDLGIKFTPVHEYLYEAVKSLEDKGFIKKTSNTKELHRQSSPPQNSPASMLMSKL

SEQ ID NO: 177108 - protein, 69 aa, Oryza sativa
  Clone ID: PAT_MRT4530_74793C.1.pep
MAEIGERRRLRRPLARRVRHGSAGALIPRQLGTKNGRHGRARHVLPGAMGSASVAMTMSKVDLKGSCTY

SEQ ID NO: 177109 - protein, 38 aa, Oryza sativa
  Clone ID: PAT_MRT4530_74794C.1.pep
AIHFKLGPRHMCAWMIIDGLKLTAQSKGKEDGKTSALI

SEQ ID NO: 177110 - protein, 115 aa, Oryza sativa
  Clone ID: PAT_MRT4530_74795C.1.pep
MEEEAAASGDHTIKASVVLLFRRQLLAQAALIRCICLVPPIWFEFETSAFMQGTRRTGKENQKAQLDWTRARLLEPRFRKGYTSEICRPDAESNRIASNRRHGGRGSRAESSSEQ

SEQ ID NO: 177111 - protein, 53 aa, Oryza sativa
  Clone ID: PAT_MRT4530_74796C.1.pep
SKYLDLRHRHDQWFRLAVKKGGILFLPPGMERPLSLDSGAYIKERRLFGAYPV

SEQ ID NO: 177112 - protein, 1137 aa, Oryza sativa
  Clone ID: PAT_MRT4530_74797C.1.pep
MAALRVFSTGVICHLIFHFLFFQPLAISDETETDRDALLCFKSQLSGPTGVLASWNNASLLPCNWHGVTCSRRAPRRVIAIDLPSEGIIGSISPCIANITSLTRLQLSNNSFHGGIPSELGFLNELQNLDLSMNSLEGNIPSELSSCSQLQILDLQNNSLQGEIPPSLSQCVHLQQILLGNNKLQGSIPSAFGDLPKLSVLFLANNRLSGDIPPSLGSSLTLTYVNLGKNALTGGIPKPMLNSSSLQQLILNSNSLSGELPKALLNTLSLNGIYLNQNNFSGSIPPVKTVSPQVQYLDLGENCLTGTIPSSLGNLSSLLYLRLSQNCLDGSIPESLGHIPTLQTLMLTLNNFSGTIPPPLFNMSSLTFLTVANNSLTGRLPLEIGYTLPNIEGLILLANKFKGSIPTSLLNSTHLQMLYLAENKLTGIMPSFGSLTNLEDLDVAYNMLEAGDWGFISSLSNCTRLTKLMLDGNNLQGNLPSSVGNLSSSLQRLWLRNNKISGPIPQEIGNLKSLTELYMDYNQLTGNISLTIGNLHKLGILSFAQNRLSGQIPDNIGKLVQLNYLNLDRNNLSGSIPLSIGYCTQLEILNLAHNSLNGTIPETIFKISSLSMVLDLSYNYLSGSISDEVGNLVNLNKLIISYNRLSGDIPSTLSQCVVLEYLEMQSNFFVGSIPQTFVNMLGIKVMDISHNNLSGEIPQFLTLLRSLQVLNLSFNNFHGVVPSSGIFANASVVSIEGNDHLCTETPTTGMPLCSKLVDKKRNHSRSLVLVLTIVIPIVAITFTLLCLAKIICMKRMQAEPHVQQLNEHRNITYEDVLKATNRFSSTNLLGSGSFGTVYKGNLHFPFKEKGNLHLQEEHIAIKIFNLDIHGSNKSFVAECETLQNVRHRNLVKIITLCSSVDSTGADFKAIVFPYFPNGNLDMWLHPKSHEHSSQTKVLTLRQRINIALDVAFALDYLHNQCELPLVHCDLKPSNILLDSDMVAHVSDFGLARFVYTRSNAHKDISTSLACLKGSIGYIPPEYGMNEDISTKGDVYSFGILLLEMVTGSSPTDENFNGDTTLHDFVDRALPDNTHEVVDPTMLQDDISVADMMERCFVPLVKIGLSCSMALPRERPEMGQVSTMILRIKHAASNMGVR

SEQ ID NO: 177113 - protein, 41 aa, Oryza sativa
  Clone ID: PAT_MRT4530_74798C.1.pep
STCQMVSKKHQHDGVLAPHSFVEDRSCIHEHEQHSPEQRRK

SEQ ID NO: 177114 - protein, 40 aa, Oryza sativa
  Clone ID: PAT_MRT4530_74799C.1.pep
ILKLEVKLREIFKCYICKGQSPLKKNTDIYMVEFLNKKKN

SEQ ID NO: 177115 - protein, 59 aa, Oryza sativa
  Clone ID: PAT_MRT4530_7479C.1.pep
GKSCRLRWLNYLRPNIRRGNISYDEEDLIIRLHRLLGNRWSLIAGRLPGRTDNSIKNYW

SEQ ID NO: 177116 - protein, 275 aa, Oryza sativa
  Clone ID: PAT_MRT4530_747C.1.pep
MKQLADHHASLARGTRCQCHAGSRRTSSGSPSSFIVVGRPLPWRHRSGGVCRPDDLPVGLPRPPPVRRLLRLGCHRSSSSLRLGTAAAWGDLSPPLPGGQPPLLDASGRRPPMLCRCRQGYGATAWPAVGVAFPAPDLTAAAGGMGLNPSGQPAPRPPVGAGQPPPHDLLPPRPSAYRACVTYRLVDFYASPTSAPILLRLHHSVPRIFGLITRSVLRGALLSMATSPRRPSRRHHRHMRIDTLVVRTGHRQPLKVFFLYFELRCRISKLPLSPL

SEQ ID NO: 177117 - protein, 74 aa, Oryza sativa
  Clone ID: PAT_MRT4530_74800C.1.pep
MQRETKREVHNCTHKTQSTGMSPCPAGHVTMSSDCGKTLHITPSDQSMPHLRFHPSPSRQQAVPPRATVNPEAA

SEQ ID NO: 177118 - protein, 142 aa, Oryza sativa
  unsure (1)..(142): unsure at all Xaa locations
  Clone ID: PAT_MRT4530_74801C.1.pep
HPHIALATIAFSRKSIYFCVLLLCHGSMAQLSGPNVNAXHNPRQGGFMECRFDRLQSSEPLRRVRSXAGVTQYFDEKNEQFHCTGTFVIRRVIEPQCLMVPRYSNTAGMVHTIQGIGSMGLTVPCCPVTYQHQLQQFLPEGQ

SEQ ID NO: 177119 - protein, 108 aa, Oryza sativa
  unsure (1)..(108): unsure at all Xaa locations
  Clone ID: PAT_MRT4530_74802C.1.pep
MRRPVPGRTPSPSPEPASPPRXLLPLCTGRVSAAPLTFLPPTPVPPPGPPTPPPTPPPLPPPLCAMAILIGTFTSSWCLWLSVSVSVSVSAACPSFLPSVTCNSSNWR

SEQ ID NO: 177120 - protein, 329 aa, Oryza sativa
  Clone ID: PAT_MRT4530_74803C.1.pep
MADTTLRPSGDAAKKIADALRKTRGVFSNAYRTVRIRVKGTKVEEILDKLEKLLNLYKIVHSDTSDSTRTQNRAGHPRLPARHPSVRPKLVFVFNGRALKLWIERLRLKLASYATPSKRMFLIVSAGVAVSVFALYAVHCNYRGRLGGGGGGGGGGGGGDVGGDGGGGGDGNVGGGGGGGGGGGGGGGGGGGGDGVARDDDAPKGLRLILVAAPSSMPWPRYLAVKNSGEKLVPRQDGGGGGGGDQVKIDKLRTAAGEFVSQKSSSVFGKKKVEPVVKDAAVPGETSSISTLFAKKNVGAVLMDKEAPWKASPVAIESQYSRTGDPDCF

SEQ ID NO: 177121 - protein, 1058 aa, Oryza sativa
  Clone ID: PAT_MRT4530_74804C.1.pep
MGGDGDPPHLVFFLPDHVLVFLLSDPGISILSAPARLPLEATASTGAHADRRCSRSIPLRPPPALPDLLGACFCVDEGRKTPKTLIFPRDERNASSVCRCCREVGVRYKAANDIQELNKKLERITPTLLQELCREDRQSNITTPQHDEFITIGRNIANECDNLFRLLRGNQAGQCLFAIVGAVGVGKTTLAQKIYHDTKNNFRTRLWVHVSNDSRNLGIWRGESFLGTGETAVQRVVLREYLINDRYRRLLLVIDNVWEENGWNQFLGQDFCRGGDTVLLVTTRHECVARTMGIARCHRIRRLSEDDGWLLLRTTANLRETEATGNIQDVGRRIVQKCSGLPVAVRTIGYHLRGKTLEDEWESVYLEDFVATYPEIRNSIDASYMKLSYRLKRCFLYCSLYPEGNVIEKQCIMQQWIAEGFFSEVPLQVQEEEAERCYQELIDRCLLLPEDEAHGVTGAKMLNLFRSFAIYRSQDENYVSNPRNIGRNFKPWRLCVTNGGRVEDIPDDATSLRSLFLFGSPQINGKSLEFIFSKLTSLRVLDLRHTQVDNISTYLKKLHKLKQLRYLNLSNTRISSIPASIGSLTMLQFLILKNCPLLESLPRCVGHLKKLRSLDISGTPMLNVIQFNLLELTELNCLQGFVPTTSVQQNNNGDGWKFEEVRPLGNLRNLQMVKLERASSSRGDLGQLNLHEKPNLKELELCCSSADPQNRDRDAEHIKAVFEALKPAQCLVSLKIANYYGDQFPSWFSNSHLTVLQRLTLDLDDCLPSWDLPPLGQMMNLKFLKITASNLLPDANNRQLRGEPRNGKAFPRLEQLVLGKMESLAPWSVLQEGDLPLLRVFHLDGCSQLNSIPSWLQSCSKLTSMKIKNIDTLQEIASLPSLKELEVHNSGRLQTVLNIRRLEDLTISDCPVLAAVDGVPLLCSVHIKEQSAQLPQWLQQKSFVLRRLDIIGTEVLLDRCSSPIAQYGSIIQAAAEHVYAKLVDGSFYFSYNKSTSSFQRSRRCIERLTVDGLHNNAVPPDNWRAWMVYTLYAILVIASSFLFSGLLRPMDETPQHPQ

SEQ ID NO: 177122 - protein, 155 aa, Oryza sativa
  unsure (1)..(155): unsure at all Xaa locations
  Clone ID: PAT_MRT4530_74805C.1.pep
KDSARRPVGKGASRRPAAARRPGRLGRWHGPLGACAPNVGRGGRRAQAPLASLDSDLEAFSHNPAHGSFAPLAFQPSAMTNCVNQRFLSYXVELLSRHGHQXRGKTNLXSHDGLNPAHVXYWWVNNPTLGEXCFTMIGRADIEGSKSFVPNSARA

SEQ ID NO: 177123 - protein, 80 aa, Oryza sativa
  Clone ID: PAT_MRT4530_74806C.1.pep
AAGSLIFLRISHFNPLRILTYTRLAVDIFTYRYCTVDHFSVDPLLLFLPSLLLYMAGSWVRTITSPFRKVFGAQPHKDGG

SEQ ID NO: 177124 - protein, 108 aa, Oryza sativa
  Clone ID: PAT_MRT4530_74807C.1.pep
TSGSLALIWDDLRSLCLFSYHRLRDLLLIVTRIVELLGRRGWEALKYWWNLLQYWSQELKNSAVSLLNATAIAVAEGTDRVIEVVQGAYRAIRHIPRRIRQGLERILL

SEQ ID NO: 177125 - protein, 179 aa, Oryza sativa
  unsure (1)..(179): unsure at all Xaa locations
  Clone ID: PAT_MRT4530_74808C.1.pep
MDGFILTVSAVXGRRSSATGAAVVLVEVAAAAVADEAEVAAVVEARRLPDLRRAAAVLVDEAAAFADEAEAAAGADEAAALAEVALVEAEAVALAEVADGAVTPFARPRWDKFVRQFFMDRLVLDLRGIFLSWDQPIAPTPKPNTPKSRFALSHSRWRKDRLLGRNYSRLRASTKARST

SEQ ID NO: 177126 - protein, 89 aa, Oryza sativa
  Clone ID: PAT_MRT4530_74809C.1.pep
GFAPKTFKWGGFRGGTPRGLPFFQAGGLTIGALGANCLGPAPGPQRLAPSLQVSFIIKVAFFFQVPSLLLKRVPLLCLSGARFWGIPFP

SEQ ID NO: 177127 - protein, 110 aa, Oryza sativa
  unsure (1)..(110): unsure at all Xaa locations
  Clone ID: PAT_MRT4530_7480C.1.pep
CLRKGSSTSCEXIIITISTRMPPSEKKKYQNATALNVQHICGTEREKKKGNWYYETKRTKTAQXHQRKLGISFCELCTSQLLDHVIHDSLCWVPTMKPYVSSNHSSPXLM

SEQ ID NO: 177128 - protein, 54 aa, Oryza sativa
  Clone ID: PAT_MRT4530_74810C.1.pep
PSFKRWFQLCLDLICNSLHYVAGRSTVHDPSFSGRLCRTPPILARRFIQFRHAR

SEQ ID NO: 177129 - protein, 187 aa, Oryza sativa
  Clone ID: PAT_MRT4530_74811C.1.pep
MMGGPLRAKSLKGRDMQASSILALRQALGFVDVWGPLCWLFRSGWLWPHRLATPCVELWSPSTPGPPVLTLPQQLALAPPAGYGAQPSLIANEVERKKRLTKGRGKQGLTPGATVGEMGPGVSCLEGGGCPSQCHVALPQGESGPKWGGRHSYPKTNWRRLPEGGSGPRSGGGGPLPRSRPSRSDQS

SEQ ID NO: 177130 - protein, 117 aa, Oryza sativa
  Clone ID: PAT_MRT4530_74812C.1.pep
PPPSRLLRAQEGQAASPLWGPGQFLLVTPHGLHPQFSPLFGVGGPPSSSRGLVMVQAFVQRPPVGGGGGFFFDRQWGPAPAVSALNLPPRGGFWPAPTLAPRGLPPVGGVWSPLVMG

SEQ ID NO: 177131 - protein, 93 aa, Oryza sativa
  Clone ID: PAT_MRT4530_74813C.1.pep
MQTRKCNAFPPIDDGPRHMRAHACDGSVAAGSRKRERCARGCFGLPLTTGLYCPPMQVATHKRKSSCWCLWLYSDFLQVFGLLLPTGKWSIQV

SEQ ID NO: 177132 - protein, 64 aa, Oryza sativa
  Clone ID: PAT_MRT4530_74814C.1.pep
QNGSGEVTLNGCGPKWGRQYFYMFSGYKLILRGKTLRSFFMNKGFHGGGGCYSYLSRWWCFFFS

SEQ ID NO: 177133 - protein, 91 aa, Oryza sativa
  Clone ID: PAT_MRT4530_74815C.1.pep
LPGEAADTSWVTHNSPRRTCESPLDMMREGADIDVATRIDYGKLTTLPVPPMKAGRGRATDVEHKMAPASPASLALVRGPSPHMITVEKGP

SEQ ID NO: 177134 - protein, 31 aa, Oryza sativa
  Clone ID: PAT_MRT4530_74816C.1.pep
ASCYMRAPCRSRHASPWHLTLSPTSIKLSYQ

SEQ ID NO: 177135 - protein, 50 aa, Oryza sativa
  Clone ID: PAT_MRT4530_74817C.1.pep
ERVSSRSQSPTYPSFLPSYSSSLLLRLRLRLPLAIYPPFLPLDLTCSWRS

SEQ ID NO: 177136 - protein, 36 aa, Oryza sativa
  Clone ID: PAT_MRT4530_74818C.1.pep
MAVLQEIEEGRTCRLCIAAYFGNGQSSILKTYGYNT

SEQ ID NO: 177137 - protein, 79 aa, Oryza sativa
  unsure (1)..(79): unsure at all Xaa locations
  Clone ID: PAT_MRT4530_74819C.1.pep
LMEHHRHIRYLHDHRRPGAQHGVKSXGSAVWPXGTADFXWXXFTFFTWIISVENFPGGDNIPARPLRVARRPTFCISTV

SEQ ID NO: 177138 - protein, 208 aa, Oryza sativa
  Clone ID: PAT_MRT4530_7481C.1.pep
RVRRMFAMWPSMGSSPCAAGTSEDMPLDAYSGLGEAVEEPSQIMSVNPTEAEKTGKSSGELGSDDGAHQGSSMVPRSVVGSSLADRMLMALSLFRESLGSGALAQVWMPVEQEGHVVLSTCEQPFLLDQVLAGYREVSRHFVFSAKEEPGLQPGLPGRVFISGVPEWTSSVLYYNRPEYLRMEHALHHEIRGSLAMPIYDPSKDSCCA

SEQ ID NO: 177139 - protein, 547 aa, Oryza sativa
  Clone ID: PAT_MRT4530_74820C.1.pep
MAGELKVLNALDSAKTQWYHFTAIVIAGMGFFTDAYDLFSISLVTKLLGRIYYFNPASKSPGSLPPNVSAAVNGVAFCGTLAGQLFFGWLGDKMGRKKVYGMTLMLMVICCLASGLSFGSSAKGVMATLCFFRFWLGFGIGGDYPLSATIMSEYANKRTRGAFIAAVFAMQGFGNLTGGIVAIIVSAAFKSRFDAPAYRDDRTGSTVPQADYAWRIVLMFGAIPALLTYYWRMKMPETARYTALVAKNAKQAAADMTQVLNVEIVEEQEKAAAATAAAAEEEAARREQFGLFSRQFLRRHGRHLLGTTVCWFVLDIAFYSSNLFQKDIYTAVQWLPKADTMSALEEMFKISRAQTLVALCGTIPGYWFTVFFIDIIGRFVIQLGGFFFMTAFMLGLAVPYHHWTTPGNHIGFVVMYAFTFFFANFGPNSTTFIVPAEIFPARLRSTCHGISAAAGKAGAIVGSFGFLYAAQSTDASKTDAGYPPGIGVRNSLFFLAGCNVIGFFFTFLVPESKGKSLEELSGENEDDDDVPEAPATADHRTAPAPPA

SEQ ID NO: 177140 - protein, 57 aa, Oryza sativa
  unsure (1)..(57): unsure at all Xaa locations
  Clone ID: PAT_MRT4530_74821C.1.pep
MKIIFVFALLAIVACNASARXDALSXSYRQYQLQXHXLLQXPXLSPCXEVXRQQXXI

SEQ ID NO: 177141 - protein, 740 aa, Oryza sativa
  unsure (1)..(740): unsure at all Xaa locations
  Clone ID: PAT_MRT4530_74822C.1.pep
MAGGQLNVLSTLDQAKTQWYHFMAIVIAGMGFFTDAYDLFCISLVTKLLGRIYYTDDSKDTPGALPPNVSAAVTGVALCGTLAGQLFFGWLGDKLGRKSVYGFTLILMVVCSVASGLSFGSSAKGVVSTLCFCRFWLAFGIGGDYPLRDTIMSEYANKRTRGAFIAAVFAMRVFGILFVAIVVHTNTGGLVFFPELCEQSRSAMARQEQQQHLQVLSALDAAKTQWYHFTAIVVAGMGFFTDAYDLFCISLVTKLLGRIYYTDLAKENPGSLPPNVAAAVNGVAFCGTLAGQLFFGWLGDKLGRKSVYGMTLLMMVICSIASGLSFSHTPTSVMATLCFFRFWLGFGIGGDYPLSATIMSEYANKKTRGAFIAAVFAMQGFGILAGGIVTLIISSAFRAGFPAPAYQDDRAGSTVRQADYVWRITIVPAEMYPARTPVDVPQALSAAPGKAGAIIGAFGFLYAAQDQHKPEPGYPRGIGIKNALFVLAGTNFLGTIMTLLVPESKGMSLEVISQEVADGDRTRRRPTRSNLTAMREWLPLSRCCPLRLPNTIIALFATXPCYVFHLFFLIDIVGRFXIQLLGFFMMTVFMLGLAVPYHHWTTKGNHIGFVVMYAFTFFFANFGPNSTTFIVPAEIFPARLRSTCHGISAAAGKAGAIIGSFGFLYAAQDPHKPDAGYKPGIGVRNSLFVLAGCNLLGFICTFLVPESKGKSLEEMSGEAEDDDDEVAAAGGGAAVRPQTA

SEQ ID NO: 177142 - protein, 154 aa, Oryza sativa
  unsure (1)..(154): unsure at all Xaa locations
  Clone ID: PAT_MRT4530_74823C.1.pep
MTSPRGXGSNDKQAPPIGGXKGWAHCGPYPNSXRSPLPRGSHAVATVDRRGSWQGRGAEVAPAWDSTTTATXRPRVNPTVLGGCRARHGFKPASRQGSGGAWPDGRRQRPLARRHARDAAEXGWEGRGMFTERTGWXGEDGKAACDEVRRRRSS

SEQ ID NO: 177143 - protein, 78 aa, Oryza sativa
  Clone ID: PAT_MRT4530_74824C.1.pep
NQCLYRVCPPCKVWHIFLADLLQVIVMWYKKDVSFFMCLVIGLRMMFGRFYNDTTYGVQVLFFRFISKETCKISLLRS

SEQ ID NO: 177144 - protein, 240 aa, Oryza sativa
  unsure (1)..(240): unsure at all Xaa locations
  Clone ID: PAT_MRT4530_74825C.1.pep
MESSPACERSGVSATIGGNRAAAEVALAAAKLTAVAGWRGGDPSGSGARPKATASGGASNKRRELGRRHGRGREMGETREGARESDLMGEGGEDVAGNPPDLAGDVGRRERKRGGIRTRIPPXSSARAGREMRGKRRRRGEDXRERRGVGAERAEEAAAWERRLPAERGRLEEGDDLTGGPHLSASRREGERERAGPQGEAERGRRVDWADGPRRGKRRKKEKEKEERIFLGLKLHFGDF

SEQ ID NO: 177145 - protein, 243 aa, Oryza sativa
  unsure (1)..(243): unsure at all Xaa locations
  Clone ID: PAT_MRT4530_74826C.1.pep
MESSPACERSGVSATIGGNRAAAEVALAAAKLTAVAGWRGGDPSGSGARPKATASGGASNKRRELGRRHGRGREMGETREGTRGRVFMGEGGADVAGDGPYLAGDVGSGGRVREVDSKSNPALSSARAGREMRGKRRRRGGDAGAARRGRGKSXRRRRRGXIRRRLPSXGGWLEEGDDLTGGPHLSASRREGEGERAGPQGEAERGRRVDWADGPRRGKKGGKRKKKKKKGFFLGLKLHFGDF

SEQ ID NO: 177146 - protein, 329 aa, Oryza sativa
  Clone ID: PAT_MRT4530_74827C.1.pep
MGDSGGSVVSVDVERISFGGKEHHIQTNHGSVSVAVYGDHDKPALVTYPDIALNHMSCFQGLLFCPEASSLLLHNFCIYHISPPGHELGAAPVSPSSPVASVDELADQVSDVLDFFGLGPVMCLGVTAGAYILTLFATKYRERVLGLILVSPLCRTPSWTEWFHNKVMSNLLYYYGMCNMVKDCLLQRYFSKFLDQRQSMNVWRFIHTINERHDLTESLKELQCRTLIFVGQNSQFHAEAVHMTSKLDERYSALVEVQGCGSVVTEEQPHAMLMPLEYFLMGYGLYRPSQISCSPRSPLNPFCISPELLSPESMGVKLKPIKTRANLEV

SEQ ID NO: 177147 - protein, 106 aa, Oryza sativa
  Clone ID: PAT_MRT4530_74828C.1.pep
SSGTSGCLRFTPPSTILQSSPSWYGAQSQKVLVQLVAYTSWYIVHRPQRTWQGHRIRHPHLPPIGARHLILGRAENLGEQEPDMCRARPAQDLLRFRTDCTAARPT

SEQ ID NO: 177148 - protein, 290 aa, Oryza sativa
  Clone ID: PAT_MRT4530_74829C.1.pep
MERPAPVRKSHTSTADLLAWPQQQHQPDGHAASTPSPARRPHQPSEALRKVVFGGQVTEEEAESLNKRKPCSAPKWKEMTGSGIFAAGADGEAEEPGSAAAPGRAAPRNYQPVTVSHISFAEDGSVPPKKPTSVAEVAKQRELSGTLQSEADSKMKKQISNAKSKELSGHGLFDPQDVRPNGARNTANGTGASHTPVRNANVSSFSFGEANTDSVTKTAKKITGKKFTDLTGNNIFKGDEAPASAEKHLSTAKLKEMTGSNIFAEGQAPTREYHSGNRKPPGGESSIALV

SEQ ID NO: 177149 - protein, 518 aa, Oryza sativa
  Clone ID: PAT_MRT4530_7482C.1.pep
MANCVRCCCWLLVLMLMALAITAAVVFVRYKNGEGVFPFPGVPGAVDHKYADALAVALQFFQVQKSGKLVNNTIHWRGDSALDDGKEAGIDLSKGMYDAGDHMKFGFPMAFTATMLSWSVLEYGDAMRAADQRDSAIDALNWIMDYLVNAHPSDDVLYIQVGDPKADHKCWERPEKMKEKRPLTKITPKSPGSDVAAETAAAMAAASLVYKTINKTYSSSLLDHGERLFAFADKHRGSYTRTFPELSAFYNSTTYQDELLWAASWLYHATGNHSYLAYATGKNKDFADLGNPRYFSWDDKRAGTEVLLSRVSFFASQGSDVAQDDVLGMYKQTADAVMCILLPDSETAAFRTEGGLLYVAEWNSLQHPVASAFLAAVYSDYMQSSGKTELSCSGQGFSPADLRKFAKSQADYLLGSNPMKISYLVGYGDRYPEKVHHRGASIPEDVDTGCDGHKWLETSKPNPNVATGALVGGPYKNDSFVDERDNVMQNEATTYNSALVAGLLSALVSTSSLARSLS

SEQ ID NO: 177150 - protein, 67 aa, Oryza sativa
  unsure (1)..(67): unsure at all Xaa locations
  Clone ID: PAT_MRT4530_74830C.1.pep
MCIHGHKILNCGAMDAMIRMVLPSFMSQGHTVXRVLAYAHKRGLPESRYCDTELQSPHIDKTAREQL

SEQ ID NO: 177151 - protein, 1111 aa, Oryza sativa
  unsure (1)..(1111): unsure at all Xaa locations
  Clone ID: PAT_MRT4530_74831C.1.pep
MAGMSSEAEEKIEPPDEFSDEIKLAMASSSGAAVNPLFGQAISEKLTKNNFSLWKTHILPVICGARMEGYLTGATQVPSAEIEVKEGEKGEITKKVSNPAYEAWIAADQQVLGFLLSSISKEILIQVANVDTAAHAWKMIVGLLSTQSRARALNTRIALATTQXGESSVSDYISKMKTLADEMASAGKPLDDEEFTSYILAGLDSDYEQVVSSIVGRSEGVTISEVYSQLLSFEELWQTNGSSGSYSSVNSANHGRNNGGGGNFNNGGGYFSNRGRGGGRGDRGGCGRGNGGRNFKPRPTCQLCSKVGHVVADCWHCYDDSFVPDARVAAAASYGVDSNWYVDTGATDHITNELEKLTTRDRYNGKEQIHTASGSGMDIKHIGQSTIRTPTRNLYLRNILHVPRTKKNLISAHRLAVDNHAFVEVHPRFFAIKDQITKNTLLRGPCCNGLYPLPASTSSSKQVLGAIKPTVSIWHSRLGHPSWQIVQKVGFKCLDVAAGRVYISRDVVFDENVFPFASLHSNAGARLRSEILLLPPTLLNPDDSTGRGTTIGDDHMLDNPEHTNTFAEENAENTDHIELDFNTATQDPEFTEDHDDTGGDSPALSSPSGSGAAVTSPSSLPVIPKAPVSPTASHSASATTPDAPEAHDSATKSDGSLDRYKARLVAKGFEQRYGIDYEDTFSPVVKAATIRTILSVAVSRGWSLRQLDVQNAFLHGYLEEEVYMRQPPGYEDRNKPNYICKLDKALYGLKQAPRAWYSRLSMKLCDLGFQPSKADTSLFFYNKGNIVIFVLIYVDDIIVASSTEDATNALLRDLKQEFALKDFGDLHYFLGIEVNKLSDGILVTQNKYALDLLKRAGMLDCKPVDTPLSTTEKLSAYTGSIQDATRYRSIVGALQYLTLTRPDTSFAINKVCQFLHSPTMQHWMAVKRILRYVKSSVDLGLKLNSSSSTIISAFSDADWAGSVDDRRSTGGFAIFLGSNLVSWSARXQSTKQSISYSILFYTEAEYKAVANATAEVIWIQTLLKEIDVQTPQEACLWCDNLEAMYLSVNPVFHARTKHIEVDYHFVRERVAQKQLVIKFIASGDQIADGFTKSLSAQQFKNFVYNLNLDKL

SEQ ID NO: 177152 - protein, 95 aa, Oryza sativa
  Clone ID: PAT_MRT4530_74832C.1.pep
GPVYLGRPTLSVLSKPIPRTGTFYYDALPHHRLLLPIHTLHLQVESDPPTPPSVTLLLLLPTSRAPLRSPSSTPRPTSLSRWRRRPPEDGADEVV

SEQ ID NO: 177153 - protein, 134 aa, Oryza sativa
  Clone ID: PAT_MRT4530_74833C.1.pep
RSTRRRDSRQQSQDGERRGEIIRSSPKILQKNPSLSRKDPPFLGVSDRRARLSLGVLGLISRGKVLLLRGCLLLLNLRRKSPILVGSEGREEGGMALDDLLVTTPGALQHLPAVLLFEETLDQKTKVGKSLEAV

SEQ ID NO: 177154 - protein, 85 aa, Oryza sativa
  Clone ID: PAT_MRT4530_74834C.1.pep
FVCNTHQASSKHQHIWVTHHTHQGGAHSPLIRRGAFTIIITPSSTSPPNSSFSRSFSHLVDIIPSQHSSNSNQQFPFRPTTSGIP

SEQ ID NO: 177155 - protein, 96 aa, Oryza sativa
  Clone ID: PAT_MRT4530_74835C.1.pep
MAPVAADGRLYGEIVMLCNTVMKGYLKNPKANAEAFADGWYYFCDLGVETDNVTFSSVRSTTKIDMVISARLHLFILAMGCYGTFKSPSFFCLISF

SEQ ID NO: 177156 - protein, 395 aa, Oryza sativa
  unsure (1)..(395): unsure at all Xaa locations
  Clone ID: PAT_MRT4530_74836C.1.pep
MAAATTSRRGPGAMDDENLTFETSPGVEVISSFDQMGIRDDLLRGIYAYGFEKPSAIQQRAVLPIISGRDVIAQAQSGTGKTSMISLSVCQIVDTAVREVQALILSPTRELAAQTERVMLAIGDFINIQVHACIGGKSIGEDIRKLEHGVHVVSGTPGRVCDMIKRRTLRTRAIKLLILDEADEMLGRGFKVKSDLVHHVFXITTDMWPRGLEVQQLSLVINYDLPNNRELYIHRIGRSDRFGRKGVAINFDKEEDTLIFRYTEQYYSTQIDEXVIDCNTKNMVDXLTVRMWSNNFTVSAMHGDMPQKERDAIMGEFRSGATRVLITTDVSLVINYDLPNNRELYIHRIGRSGRFGRKGVAINFVKKEDIRILRDIEQYYSTQIDEMPMNVADLI

SEQ ID NO: 177157 - protein, 172 aa, Oryza sativa
  unsure (1)..(172): unsure at all Xaa locations
  Clone ID: PAT_MRT4530_74837C.1.pep
XVKRDELTLEGIKQFFVAVEKEEWKFDTLCDLYDTLTITQAVIFCNTKRKVDWLTERMRSNNFTVSAMHGDMPQKERDAIMGEFRSGATRVLITTDVWARGLDVQQVSLVINYDLPNNRELYIHRIGRSGRFGRKGVAINFVKKEDIRILRDIEQYYSTQIDEMPMNVADLI

SEQ ID NO: 177158 - protein, 394 aa, Oryza sativa
  Clone ID: PAT_MRT4530_74838C.1.pep
MAAATTSRRGPGAMDDENLTFETSPGVEVISSFDQMGIREDLLRGIYAYGFEKPSAIQQRAVLPIISGRDVIAQAQSGTGKTSMISLSVCQIVDTAVREVQALILSPTRELAAQTERVMLAIGDYINIQVHACIGGKSIGEDIRKLEHGVHVVSGTPGRVCDMIKRRTLRTRAIKLLILDEADEMLGRGFKDQIYDVYRYLPPELQVCLISATLPHEILEMTSKFMTDPVRILVKRDELTLEGIKQFFVAVEKEEWKFDTLCDLYDTLTITQAVIFCNTKRKVDWLTERMRSNNFTVSAMHGDMPQKERDAIMGEFRSGATRVLITTDVSLVINYDLPNNRELYIHRIGRSGRFGRKGVAINFVKKEDIRILRDIEQYYSTQIDEMPMNVADLI

SEQ ID NO: 177159 - protein, 369 aa, Oryza sativa
  unsure (1)..(369): unsure at all Xaa locations
  Clone ID: PAT_MRT4530_74839C.1.pep
WDKLKSILCLAFFLLTRVVSLRGGSRERIHWCSLCSFLLVNSRRHRLFFTDHVLLQHFHSGLDKMSAMYLDTSAVGSCAHKTMSEGRDLLDHIIENTSFVHCETILEIEDTHEEPSMAESENTTSTSHVSIVESLPEPQEPKVEKIQPLESLFLFEGDLFEDYGHTSNNSCQKRPPVPRTYPALLEENLFKEMVQELTTIMSDEXIKVGXELSSEVTQISSSPESLLKDDASAFVKEEDDPREVIELPKTDLPSQPLVEPXSLLYAYLHDGTESPVIISDKLSDDKTSKLTAVLEKHRYVLSYSLQDHKRISTMLCTHRILLDPSCAPSXELQRGLNNSTRDVVKLQHVGIIYPIPYRIVSFIQDGYIG

SEQ ID NO: 177160 - protein, 367 aa, Oryza sativa
  Clone ID: PAT_MRT4530_7483C.1.pep
MARWSDRAGTGLTPDGPCRAWARPKRRAVGRAVGPRAFCPSIHVGRSSLVSQSNPLMSNPRNLSMKMMLAGVPSLNNDDHRRRGHGRSDLITVKVMAILPLLISTPAHSIGGVVDDDDDVEYVEITCYIDTQPFDYCFEQAYLLLSDNEPRKTVHGNHPVLAPKRKGQDTFTAPPRKWLKMHLVCRKPRIDRCTIALRFDTIYLMAFSTNQNQWYSMYSGFPIAHTRLPFDEDYFALAGGTSNLVTVPLGKESALDAIHTLATFDGESANDLKIPLVKLRIMFSEALKLKPVRLAFSRDWNEETHITKQDANYIGCWGLMSFNLVAWKNSGYAYWKSEKKLENCLVNTPWNASEVGDLLMRPNDEAI

SEQ ID NO: 177161 - protein, 53 aa, Oryza sativa
  Clone ID: PAT_MRT4530_74840C.1.pep
TTKILDGTSKLGTASTINPNKSRPTIPGNICCCRAKCNQPSLPSTLKYAPIGK

SEQ ID NO: 177162 - protein, 58 aa, Oryza sativa
  Clone ID: PAT_MRT4530_74841C.1.pep
RARCCPEICELVVVSVGRFRQEFRIFTFVSCLPTRYPEGWLPRTIFALLMTLLCLVSM

SEQ ID NO: 177163 - protein, 118 aa, Oryza sativa
  unsure (1)..(118): unsure at all Xaa locations
  Clone ID: PAT_MRT4530_74842C.1.pep
LSIVFTLCLYWYSHIVSLPERCNGVGLMSDYSVALCHLEGCRVVFNNVDRVSRLLSIIIWVYMLRVSKGGLLIVTAQYGYSSTIVSNPKKLSXGGYSSVFSLGWTAMVGCRKKLGNPG

SEQ ID NO: 177164 - protein, 161 aa, Oryza sativa
  Clone ID: PAT_MRT4530_74843C.1.pep
QFCLRDIEDGKPPLLLQMVTDYGDLHFMSALRSFKRRVAYSNICNDFIVGWRTSSIRHQHELPKPQNFINHVKYPHVVYVEKPKVQDTDFSDSMIYQAKNTSEMEELMLKGLNRIPWERVDVSFKKSRQRIFAHSTIQVKTYFFNSDGADVIFHMIDHFLY

SEQ ID NO: 177165 - protein, 248 aa, Oryza sativa
  unsure (1)..(248): unsure at all Xaa locations
  Clone ID: PAT_MRT4530_74844C.1.pep
MKAVAAARRGEPYIARLICRRARRQHGRSTGATVDLDGSLTRQACHHTVLEPGRPSEGLVLRPSSSSPSRSCKIGITPEKNMLADIVSLCYNSSRTGVIVDRAILAEDRKHGGFKRLNDLHYETEEVVGKGGGCGEGLSCSMCSLVEADCCAPIYLTYLPGGVKLIRFLSCRERKGDFSCLTVAGICEASTSDAIGSGSWHSNAGSPCPISNSCAIYTSQXGATSICCAVCSTVTVVPAPGRSRRSTH

SEQ ID NO: 177166 - protein, 143 aa, Oryza sativa
  unsure (1)..(143): unsure at all Xaa locations
  Clone ID: PAT_MRT4530_74845C.1.pep
AAAPSAGGEATMGLGITTWYSWPNGPPGPAWPRPRXCRAGTVRPTHQVVPCRPTCSTYGPGTXKGRAVLGRPEGTGSPSCFLCLFHLLELHVVLGRPTMMRHRPRHSPTAGPCRHGPDSNRALPCLVRAIESKPRALGQRWVN

SEQ ID NO: 177167 - protein, 42 aa, Oryza sativa
  Clone ID: PAT_MRT4530_74846C.1.pep
VILAPLIGYPSEGQFAGYYHCGLSTIGASGHGVFYPGAWVAF

SEQ ID NO: 177168 - protein, 93 aa, Oryza sativa
  unsure (1)..(93): unsure at all Xaa locations
  Clone ID: PAT_MRT4530_74847C.1.pep
GKKKNEQIQIQIHHHPPFPRREREAMTRCAVVAAVAAVLLVAGAAAAGGGEEEEXISNCARWGLGICYSKQDEYGPISIQLFHSVELRPNVLY

SEQ ID NO: 177169 - protein, 124 aa, Oryza sativa
  unsure (1)..(124): unsure at all Xaa locations
  Clone ID: PAT_MRT4530_74848C.1.pep
TDVPPFFFLFFFFLPNPHPGPPFLFSEXPPPKKPPFSFCPSPLKPPGTSPFSSPPFFFMLPTPPLDILYPLPTSLPSPTRNTVFFFLKTSPQKTTLFLLPYTLIKHPVFPLLQHTLSLLSPLLP

SEQ ID NO: 177170 - protein, 387 aa, Oryza sativa
  Clone ID: PAT_MRT4530_74849C.1.pep
MPPSPVPRARTRFSPEEWERQELQQHPKERAAPADVVIAGPKAGFSPEFRLIPKETPARSAAATVKSLRRAATAPAPRRRRTVKEELDPPTRSNAIHAVGLDGERVREKNGSPLPHTSLTDVAIFVGKGTVAGGRSLGWSPSENRCSSLTVQSVDSAAIPLPAHPPRHADDTLRHSAPQWCTETSTVARRSRPRSGGGDRILQRERGQTHNTQAKPPPGRTPTPRRRRRRCKALARPGKRVEALVSHPSLGSAITSRCHHHHSKAPPPPLIPAASCLPATSAVDANAAAAQPSAWATRRRRLLRAALVPPLVLAQIRPRGRIQARRRSSVAAPPPTTVVAPPAVTASTTAQPRRRRVPPRQIRPGGTDLGNFRRPGQSPSTLSMARR

SEQ ID NO: 177171 - protein, 95 aa, Oryza sativa
  unsure (1)..(95): unsure at all Xaa locations
  Clone ID: PAT_MRT4530_7484C.1.pep
QXQXQXXXXPQQQGGGRGXEXXRQQXSXXATPXXQPXTXQXXNNQXXQQQXXQQXRXXAQQXHXQAXXXXQAXXQQXQXQQXXXXNPXQXQXQAQ

SEQ ID NO: 177172 - protein, 89 aa, Oryza sativa
  Clone ID: PAT_MRT4530_74850C.1.pep
SVCCFGEPARPSSHALRPRAVVIAHRRRAPRIPNPPLSPNKARHLPANRTRTAVAARMPERRLRSRGAAGRQAQIRSSSVRPRADSSAR

SEQ ID NO: 177173 - protein, 75 aa, Oryza sativa
  Clone ID: PAT_MRT4530_74851C.1.pep
MYAPLRGLFSPISIEMRPVASSSKTHTGNPLVGQFFLEKLGKSNHAIWKAQVLAAVRGAKLEGHLTGATRVPAAT

SEQ ID NO: 177174 - protein, 896 aa, Oryza sativa
  unsure (1)..(896): unsure at all Xaa locations
  Clone ID: PAT_MRT4530_74852C.1.pep
MLPLLQQHMGITHANSITTEPSPSPRPPLLRLLPQPRRRRHAHAKHIALLTNCKCASAASASVEEDDVAGGLGYRHPPKQIQEILDVPPNPSYLISPRRDRIMFLQRTAMPPLSELTKPEIVLSGIRIDPGSNMRSRMSFYTGIIIHDLMDSGTLGPAKEVHGYADGAKINFVTWSPDGQHMAFTVRYEDKVDNSVNLSLWVANAESGEARPLCISEDIRLNAIFELFVWVNDSTVLVCTIPSSRGCPPKKPLVPFGPRIRSNEHKNVVQMRATKEMLKDLHEEELFDYYATSQLILLSLDGTVKPIAPPAIYTALDPSPDEKYLMLTSVHRPYSSTVSYKRFPKKVELWTVDGTFIREVCDLPLAEDIPITSGSVRKGKRLISWRPDMPSTLYWVEAQDGGDANVEVSPRDIVYMELADPLNGEKPQVLLKLDLRYRRISWCNGSQALVYEHWYRTRRTRTWVISPDCKDVSPRVLFERSSEDAYSNPGSPMMCRTPAGTFVIAKIKTNYEGTYILLKGKGATPKGSIPFLDLLNINTGVKERIWESSKEKYYESVLALMSYNPKCEIQLNHLKLLVSKESRMEPTQYYIKAWPDKTQVQITNYSHPYPQLALLQKEVIRYQRVDGVKLTATLYLPPGYDPSKDEPLPCLIWSYPGEFKSREAAGQVRRSPNKFARIRSNFPLLWFAILADPTIPIIGERDQEANDRYIEQLVASAEAAVNEIVRRGVAHPDKIAVGGHSYGAFMTANLLAHAPHLFCCGIARSGAYNRTLTPFGFQKEVRTLWEATDTYIKMSPFMSANKIKKPILLIHGEDDSKVTTAMQSSQFYDALKEQAGSLGLCXIFHQEVXYIARESVMHVIWETDRWLEMYCVSNSRNIQVMESTVDTTWSPACEAL

SEQ ID NO: 177175 - protein, 192 aa, Oryza sativa
  Clone ID: PAT_MRT4530_74853C.1.pep
MATTNCLLALAIAGLVLVSLPGLSRGDVDARRGRELAGGCNPSGTLRPSRSHSCQDCCKAGRSYPTYACSPATTGSTKAVMTLNDFEAGGDGGDPSECDGKFHKNTERVVALSTGWYANGRRCNKNIRINANGRSVLAKVVDECDSLHGCDKEHAYQPPCRPNVVDASQAVWDALRITGEDVGEYDITWSDA

SEQ ID NO: 177176 - protein, 375 aa, Oryza sativa
  Clone ID: PAT_MRT4530_74854C.1.pep
METPSAPAPGDGNSAPASSRVTFEDMLRSCDQSYYQMLGFPDAASYFEAKERNLLAQYSRQVFPLLWPILEKDSLTRFNRLCQGWSRLMGLRGFIYPEILSSIVANNALRCARVALQGSSPLRGRRADPNGLHPYGYTALHLAAETFSVEMVKLLLRHGASANHRTEGDYVIEGLLPLHVAVENASMHKYLEDNWADGHSPNNLISLLCLPEMKMYLDTTRLIAQHTHNIVDELWDYIDKKKFVQLAILLLASQKQLHGPINRSRGKANLNGFESIRRRTYEAISGLHLQMIAMVNEGKNGSALKKLKEKKEALLTADALVGIIDKAGQDLEDYIQTNSEPTVCTNMYRQKSQWILDRSDSVLQNRGKNEIIPTI

SEQ ID NO: 177177 - protein, 617 aa, Oryza sativa
  unsure (1)..(617): unsure at all Xaa locations
  Clone ID: PAT_MRT4530_74855C.1.pep
GKEEKAKEEKPEAEALEKLRRLKTDSKQREGAKPRYTPNKFPKAATPTKDHKWPSAWMDSRTTGIEERAELKTLEFRSFHRHQETRSTMESKLSRRCSGKQXPRGWPPVLEPIATGWREGRPARRRQHPEPDLPSEHAVEENVVRRLKILSIKGASRVTIDATLLEEISRPAALLESKPKWDQEESYPVMSEGHDIDRGKQPLSVPWTSTAFFSPAPPPSHAVFVSSLLKGHVGDETRIETARWMAAWLDGYYYRCHASTTGQRGKNDVSCRRAGVGLGRCRDGPDRDASAFQLHAGGSWLQREEAKGEKYGEETVDDGGWGRRTTYSVLLVWLMRCGGDEDGEAGEERRSDGRRPAGEKSSGEAGAGWGEERRRPCPSPTGRRHGWGVAALSLVVGGGCHRRLGARIRRSPSSSSAPPGKEWAAAASVLPAMNGEIGLVGGGSSSLSLTWPPPPLCSPSPSPTWPPPPSLEPRRGMPAWTRAPPLAPPRALPRTAAGRAPHNTADGHGAARRRTESRHAPNSAVTSHGRPHPALRCRTPLQAAADCTPHGGTSLSCALAAGGATPSPPPPERPPPPPTPMTRPAPSSIAPGVASGWLAQLLKEDKIREREEKGKGG

SEQ ID NO: 177178 - protein, 57 aa, Oryza sativa
  Clone ID: PAT_MRT4530_74856C.1.pep
MAIFFTGEEINGGGGDGNGIAKVQMRMTFAWPADIRIALVIEYPYLSETPIPYLSAE

SEQ ID NO: 177179 - protein, 285 aa, Oryza sativa
  unsure (1)..(285): unsure at all Xaa locations
  Clone ID: PAT_MRT4530_74857C.1.pep
PYLFALSTCSWMGPMNHSLLWSDQWIDSCSVASLAPDLLFAVPQRFRGSRTVASALANNSWVSDIRGALTVPVISXFLLIWDAVLHVQLLPGVEDRLVWRWTADQRYSTRSAYQAFFYGHHSFACADLLWHAKGLAKCRFFLWFAFQQRCWTADLLXKRGIDNHSACSFCAXDLETANHILLDCVFARQVWLRVLSPSGRSALSPPRGSWFXDWWPSSRACLPXHLRDSFDSLVLLVSWCLWKERNSRVFDSALSSVPVVLESVHAEGHLWSLAGVAAFGDLLGV

SEQ ID NO: 177180 - protein, 370 aa, Oryza sativa
  Clone ID: PAT_MRT4530_74858C.1.pep
MGSHLHRDLLLAVVLAAIAAASLAGRADAARPLPPSPALPSPSSSSALEAAKAAVSTLMEMLPSGPSADPPLTTLFLPLFPSLSFSRARRLVTSGAYWRERRTVADGEKLDICWRLPLISRQCQIVRARLRPGTHLSSFGRTSARLRCIRKGMGSNGHWRCSCDSEGDMAREGSRRVAMRGIGSTWSDGSTLLHMATVRQYSRRTPTGETHGGRQEKAQGIARPGPALWKAVPRSRRWCWAASWWHEKGEEMEGINNNEGNKKGPTVGIEFLLTSHHIMTKGKRNVSCRLRQYCGPRGQMTFLVGMGLVLITSFYLTVILDAHPPLITVLLFVPVTVLVIVAVCACAGLAIFCFEEGQIEENRRLQNSPV

SEQ ID NO: 177181 - protein, 58 aa, Oryza sativa
  Clone ID: PAT_MRT4530_74859C.1.pep
MVQAILFYGKANEDTNVLDVCMTCETYHNTGQSRNDCPKTCEDVFFINNNNGYRSQGV

SEQ ID NO: 177182 - protein, 73 aa, Oryza sativa
  Clone ID: PAT_MRT4530_7485C.1.pep
FFFFFSFHHLFGDRCCSQLPYFLFRIALACLDGLVHPRNKLPSPITQRDHLPSRSPAISHLPITTIILDNISS

SEQ ID NO: 177183 - protein, 297 aa, Oryza sativa
  Clone ID: PAT_MRT4530_74860C.1.pep
MAFVLPSSYSKSYLSLPHPRISSTKQVSFGIAAGSVFRQPCLKLSIFSGGKTLSKGTNAAISDTPLLGTIDVLDAFEDDYGGIVVNPTSLPNTSNAFSSSLQSSLCYWNKQMGNLNFICFTIFLGGLCLSSCRARVLVVKEGKCPSHCSDIWKIPTGFIDKFEDLFSGAIREVREETGNSTFQIESCFLDVVAFRHAHQVLFDKSDILFICTLKPLSSDISIDESEIEAARWMPVEEFVSQPFHQEDEMSRAITDICISAHHKCYAGLAAHQVMSMLDNRVAYLYTGDTREATGMCP

SEQ ID NO: 177184 - protein, 130 aa, Oryza sativa
  Clone ID: PAT_MRT4530_74861C.1.pep
MKKRKFRFQRPAVPVAASLPPPTVASLPRCCRLPPTPASARPTLRSLQRRRLPPMLELASVLPSELEKASGCSSTRRRVAAGPVSLAEKVLSGIGRFIYPEEGMLLLLGPQVGGARTKGAAATTIYDVIL

SEQ ID NO: 177185 - protein, 140 aa, Oryza sativa
  Clone ID: PAT_MRT4530_74862C.1.pep
MSDPSLLPSSSPLSPFSLSLPRPFFVHVGRSGGGGERCPTTASIFSPHVHFELADKMRTFQWAGSTSLPSPPSITVPVSLLSTSRRRKSGGGGSGEGSRSSSAGSGICSARATTDEVEQAERGKDAGEDAWSSACEDEAQ

SEQ ID NO: 177186 - protein, 50 aa, Oryza sativa
  unsure (1)..(50): unsure at all Xaa locations
  Clone ID: PAT_MRT4530_74863C.1.pep
KXPEFVCVSRRKMTSDTSEFRNKCGPRLRVGKGPLLLLGQIQFHFISCRI

SEQ ID NO: 177187 - protein, 50 aa, Oryza sativa
  Clone ID: PAT_MRT4530_74864C.1.pep
MKGIPNFQGIIATNQHDYLISMLAYFSPFNTLKIVFLRLSNKRGKNSSNE

SEQ ID NO: 177188 - protein, 44 aa, Oryza sativa
  Clone ID: PAT_MRT4530_74865C.1.pep
LWNTVDPTQQQLIQQTPPRQQVVQQPIQQTPLRQQVVQPTRQQG

SEQ ID NO: 177189 - protein, 280 aa, Oryza sativa
  Clone ID: PAT_MRT4530_74866C.1.pep
FHQKDKGGLGVIDLKIQNRALLMKHLHKFYNRAQVPWVNLIWTTYYPNSVPKTLFSFARHKEDSVSQHLAREPQDQFFLPLSQQALDEYNVLLADVQTTALLDVNDGWTYIWGSAMYTSQHLYKIGFWSLTPPLTLQWIWQCKVNMKIKVFGWLLLLDRVNTRDLLDRKHCAPPNTSVFCSTCLIDARETREHIFFHCDFSKACWIKIGWVWDTSLELHQMIQSQRLAFTYQCFMEIFLLATWNIWKERNGLIFEGIQPSVSNWMKNLKSDLSLHLIRLK

SEQ ID NO: 177190 - protein, 693 aa, Oryza sativa
  unsure (1)..(693): unsure at all Xaa locations
  Clone ID: PAT_MRT4530_74867C.1.pep
MRTFSPREVEDQFHIYRLKDEIAAVVATIDKIYSHLQLDKGSLEKKNGFCFGLLDPVTNILINSAISELSPATAAQAVVGGGGEKAKDLNNNAAPRVEAGGGSRKRRRRGDNAADLSQRSLDGLTAFLTCLFPYLPDAEARLYLDAADADPIVASLLIIRRRGIREFDLSSQPTEAAVEVALRCAAVAAKHPDPRSLVLGWKLLSPVXRRSSALRHRHHARRRCTATXARRVLRRLHKDNAAADPVLRLEGSWELAKRRLKRERLMGIYAGPKWLPPARAHMKRVLLATIHGFYLQAMGRLPTSELCDSFHRSMLMGGHCYGPLDPVSNIIVNTICFQWAMISTTMLSCIVARSLYGLVSFLCTRYRGLTPDLAMQRLLVTGVNLKAADPNLSPTPSATSRKKRLDFSDCAQVLDNPDTSHIQHSVVEESTPSAGVDESYIAAATAGFHGYPLAQQEFLASPTGLLSKLELVSEVLHIQVCVPGSQSASDGPLSPQKLSLLRTILQRCPSSTGKLHQQQDVACRKEDHPFELHFICGVNELVSGPVRSLGEKVGDYNPWTRDKYYHTHINFLAVCKARLYDPPTLFFAECGKDGADTCWCVPVIPQKPEAGQVRCIYCEYQGNRILHPTMESFHGRDEFEKLFYGSNGSYTNDKLITNSDLEVDWVHGVQDGAIYRDCCPDSDDDEDDWIDIF

SEQ ID NO: 177191 - protein, 415 aa, Oryza sativa
  unsure (1)..(415): unsure at all Xaa locations
  Clone ID: PAT_MRT4530_74868C.1.pep
KKTSPQTPNDFRPISLMNLSVKILCKIFADRLQILMTKLVHQNXYGFIKGKSIQDCLAWDFEYIHQFKHSKREIVLLKLDFEKAFDTIEHDTILKVMTAMGFPSQWNEWMTKIFSSASTPILLNGVLRKFFKCKRDVRQGDPLSPLLFALGADLLQSLINKAHIRGILKFPIPVIGDENIPIIQYADDTLIFLEASAPQLFALKAMLNSSALSSGLKVNYSKSCMIPXLTEEKANHLASTFGCKLGSLPFTYLGLPLGTTKPKVVDFSPLTDRIERRLTVSSAFLSYGDRLTLVNLVLSSLPTYYMCYLSLPVSVIESIDRARRHCLWRGNDLNSTKKXKGGLGVIDLKIQNRALLMKHLHKFYNRAQVPWVNLIWTTYYPNSVPKTARSCGSFWWKDVFQFDVLFKGIAKPILG

SEQ ID NO: 177192 - protein, 202 aa, Oryza sativa
  unsure (1)..(202): unsure at all Xaa locations
  Clone ID: PAT_MRT4530_74869C.1.pep
MLGFYVTFIFFLVCLFTYFFLQKKPQGXPILKNWPFLRMLPGMLHQIPRIYDWTVEVLEATNLXFYFKGPWLSGTDMLFTADPRNIHHILSSNFGNYPKGPEFKKIFDVLGEGILTVDFELWEEMRKSNHALFHNQDFIELSVSSNKSKLKEGLVPFLDNAAQKNIIIELQDVFQRFMFDTSSILMTGYDPMSLSIRMLEVE

SEQ ID NO: 177193 - protein, 226 aa, Oryza sativa
  Clone ID: PAT_MRT4530_7486C.1.pep
FSVFKLMDYEPVLKCLKKLPGVAVQDIPYKTRNVIKNLPKFFAESCASDKEVDGLLMKLPQHLRDALLPFQLEGVKFGLRRHGRCLIADEMGLGKTLQAIAIACCYKDEGPVLIVCPAVLRYTWAEELERWDPSFLPKDIHLVFGHQDSLERLGACPKAVVISYQMLSRLRKSMMNRRWALMIIDESHNIRCTKKKHEKNETQAVLELAPNVSRIVLLSGTPSLSR

SEQ ID NO: 177194 - protein, 101 aa, Oryza sativa
  Clone ID: PAT_MRT4530_74870C.1.pep
STKPIPSLDHSQLILSTSADHRRWFTGRRRTARGGGCGGSCQCRDQGGRSSRRRRRRQRWCGCRATRGRRRGSSGAASARRTTPRPSRASSARRPSLSLIS

SEQ ID NO: 177195 - protein, 96 aa, Oryza sativa
  Clone ID: PAT_MRT4530_74871C.1.pep
FRTPLLIRGDNLERSYDCCFCDDVAFAAHLAGMVSDHSIAGMAFSSLDELDSMQRSCELTDLLTARADSLACELAPGYSVPARYIRADLIPGFISR

SEQ ID NO: 177196 - protein, 51 aa, Oryza sativa
  Clone ID: PAT_MRT4530_74872C.1.pep
DKLPKRNLSTRTMFFPLSTCKMTDHIIVFHDDHLSLKRVMLGKIFWFAFLP

SEQ ID NO: 177197 - protein, 93 aa, Oryza sativa
  Clone ID: PAT_MRT4530_74873C.1.pep
VVMVKVLAPFAFPGFGDVENSFPLEQVWLCNLPLGIPRCHFLLEGGSVGVNLHPGISVAFSGLDRLRDSAGSLGPINPEFRIKYESGVSYSIF

SEQ ID NO: 177198 - protein, 546 aa, Oryza sativa
  Clone ID: PAT_MRT4530_74874C.1.pep
MVMDGTLAPLLLLLLLFLPALLLYLRRRPAAASRINNNHCPHPNPVLGNALPFLRNRHRFLDWATDLLAAAPTSTIEVRGALGLGSGVATANPAVVDHFLRASFPNYVKGARFAVPFEDLLGRGLFAADGRLWALQRKLASYSFSSRSLRRFSARVLRAHLHRRLVPLLDAAAGSGEAVDLQDVLGRFGFDNICNVAFGVESSTLLEGGDRRHEAFFAAFDAAVEISVARVFHPTTLVWRAMRLANVGSERRMRDAIRVIDEYVMAIVASEERLRLRRGEDEREHEQHLLSRFAASMEEEGGELAAMFGSPGAKRRFLRDVVVSFVMAGKDSTSSALTWLFWLLAANPRCERRVHEEVSSSRHADPRRADAGEDGHGDGYDELRRMHYLHAAISEAMRLYPPVPIDSRVAVAADALPDGTAVRAGWFADYSAYAMGRMPQLWGEDCREFRPERWLSDGGEFVAVDAARYPVFHAGPRACLGREMAYVQMKAVAAAVIRRFAVEPVQAPASMETPPACEVTTTLKMKGGLLVRIRKREDDAAQQKLT

SEQ ID NO: 177199 - protein, 96 aa, Oryza sativa
  unsure (1)..(96): unsure at all Xaa locations
  Clone ID: PAT_MRT4530_74875C.1.pep
AGGKSVSTMASPSGAGKPPAVLLLRPVDQPFAVALRERYRVLDLLSSGQPLPAFXXAXAAAPDPPRAAVVMGGGSIRVDGRSSTXXLPCAASSTRR

SEQ ID NO: 177200 - protein, 95 aa, Oryza sativa
  Clone ID: PAT_MRT4530_74876C.1.pep
MDAAAAMAAGGGEEEEDKARMEAVADKLQTRDAIRLYNWVSHRCFSDCVTTFYRRTLGKKEEDCVRSCVRKFLLLSSASAARFAHLADPSSAFDD

SEQ ID NO: 177201 - protein, 72 aa, Oryza sativa
  Clone ID: PAT_MRT4530_74877C.1.pep
EGLLLFVPIGARALFFQRTTLLGIKGLKTVDPNFRLAWVLKRFGPGSFMLEQASKKPAPEGGYVLCGILVIP

SEQ ID NO: 177202 - protein, 192 aa, Oryza sativa
  Clone ID: PAT_MRT4530_74878C.1.pep
MDSSPSPAPASRGRWSWGSALVGAASTAAAAAVLLCRPRDPTFELISISLSTFHFRPPAALDIGLTLTVHATNPNVVPVRYGPSTVSILYDGAHLGTARLDAGEQPPTSCRLLHLPARLDAVELAHHARSILADTARRHMELDAAVKIAGEAAVALWSRRFSVSIDSHIVVDPVFLDVIEQENHSEMQLYLT

SEQ ID NO: 177203 - protein, 26 aa, Oryza sativa
  Clone ID: PAT_MRT4530_74879C.1.pep
LPFYQHLESAFKIFSIEKPKFNALGR

SEQ ID NO: 177204 - protein, 66 aa, Oryza sativa
  Clone ID: PAT_MRT4530_7487C.1.pep
RRSPHPSSSPHHAFTDRHSCSPELTPPSSWVDICDPPIELLPDGTVSIHSSSGACSPGPYRPYRPN

SEQ ID NO: 177205 - protein, 56 aa, Oryza sativa
  Clone ID: PAT_MRT4530_74880C.1.pep
IDFVSFFIVCIFWSLFFLLIRGMQFYIKIILDCFLYICYFYVRIRIIFVILSSFIM

SEQ ID NO: 177206 - protein, 52 aa, Oryza sativa
  Clone ID: PAT_MRT4530_74881C.1.pep
KEAAADVPAATQTSQTGLGAATILMLFSCTLPSPHSPTPLSLSGHSHGNLHC

SEQ ID NO: 177207 - protein, 236 aa, Oryza sativa
  Clone ID: PAT_MRT4530_74882C.1.pep
LLPSSLLSSPTTRFPTGVRRRRRRGMSPASWPHPQQILGVGCSPGGRAPWRSAHRPASCVLSIRSIRGREQQRPTKRKEARRQSGARVKDNGKGTASPRRPNAPMTPVTFPAAAARPLTGSSSCSASTPATTTSTTATTTSASRHDDDDDEGALRLRRRRGRRRADQFRPWVPRVPRSLHEYHGQEATRRPTVCNSFGAQEAGRHQRVRRRRTTHAQGRRPQIKAHGCREGHVIPT

SEQ ID NO: 177208 - protein, 81 aa, Oryza sativa
  Clone ID: PAT_MRT4530_74883C.1.pep
MPAVTLRIRLWEHPSEIFLQSPGLLPLAVLTQTSDPTLKLREVATALEQIEDNRVKANLMAATSVFGGILLTPELIPGYRA

SEQ ID NO: 177209 - protein, 76 aa, Oryza sativa
  Clone ID: PAT_MRT4530_74884C.1.pep
KKKLLFCFFGAPAPLKKKGIFALLRGKGGPSPKTKFFKEKKRGEFFCNKGGPYAYSILGHNYFLNKGGGPTPTPRG

SEQ ID NO: 177210 - protein, 261 aa, Oryza sativa
  Clone ID: PAT_MRT4530_74885C.1.pep
MPLLASAFRLSSTPAAVSGVKYGNSQVCKSKVMLLYFFLDVYEKTRRPTGLFFSRRHKVRTDEDDSRASHVAMYHTPRGWYFSTRAKIGIWGSPNQGRFQESGASILVTSNELEGLNALEAGFHVYPDLYKDNNVHFFTHWTKDTDRSTGCYNIKCGGFVPAEGAELTPGQAVAPASTYDGEDHYISISLHTDPNSGDWVLFRDDLEKPLFLGHFPKELCPKLNGGAPRMAWTGFVSYPKNEPSPAMGSGHFPLEGERKAA

SEQ ID NO: 177211 - protein, 91 aa, Oryza sativa
  Clone ID: PAT_MRT4530_74886C.1.pep
RQRTWCRPEAQPSPAQQVVRPQTVGAGAIGRQHQGTAGRDGHGAGAARRRPGDVRRSSGGPPPAAAAQGGAGASVAARQRHDRAWLQAAMV

SEQ ID NO: 177212 - protein, 78 aa, Oryza sativa
  unsure (1)..(78): unsure at all Xaa locations
  Clone ID: PAT_MRT4530_74887C.1.pep
QTTGCPSASILYSSAVKSSIKFLNGAHEPKLACPRLTHPNATEKKCRAAGGHEPVHHLAEPHLLXXPXTAXGGRVGII

SEQ ID NO: 177213 - protein, 113 aa, Oryza sativa
  Clone ID: PAT_MRT4530_74888C.1.pep
MQLEEATWPDVACPYCYEDHDIASLCAHLEEDHPYEPHTSPCPICFEKITRDMLNHITMQHGYLFKSGRRMRRFDIPESQALSLLSRDLRDAQLQALLGGGHRQRRSNTTATN

SEQ ID NO: 177214 - protein, 60 aa, Oryza sativa
  Clone ID: PAT_MRT4530_74889C.1.pep
VVVGSFWAWSHGMVGFPLFSLFLGVMGWLTPLLEALISSEVEMLLQFCFFLLNGKGFFFF

SEQ ID NO: 177215 - protein, 1230 aa, Oryza sativa
  unsure (1)..(1230): unsure at all Xaa locations
  Clone ID: PAT_MRT4530_7488C.1.pep
LQDQINWHAYTPKGMFWTCTGVKQISXPRVFTSTRFWHARXDRLEXESQQRSLMAEKPPASPSLAGKEGPPKSRIPKLVGSEVNESNIVPITLDKLTPEQKKDLEAMMQQTQSQFLNSYMETRQGTIVLRYKMKLVADVPGTSSSKDGEVQQVSDGIAQPGDKGAADGSGDKGDGSQGAQCDGSQGFQDRIDYAVQHALINQSGVLVNTLSNIVKSMVDGSIAEYXATGPVYLPGDVSPNYQPLITNSQPAAQPIAPNVPSAQPTAPVSALAPAAPSSAPGQLINPRLLVREQPQHSGQNVNRLTXDQVTALFLPAQPTVNPXSNSRFSKRHQGSRLCSQVRNSXQSAKATCCESSCPRAFGSXCPTRSNDVMREQFGLKPKDAGNLYRHPYPEWFERVPLPYRFKVPDFSKFSGQDSVSTYEHVSRFLAQCREASAVDSLRVRLFPLSLSGSAYTWFSSLPCGSINSWADLEKHFHSYFYSGIHEMKLSDLTAIRQRHDEPVQDYIQRFPEMRNKCYSLSLTDAXLADLAFXGMIAPIREKFSSQDFDSLSHLAQKVTLHEQRFAEARKNFKKVNHVCPYIYGSDDDDDDDSEVAAAEWVRDKKVIPCQWVKSSGKXERYDFDITKADKIFDLLLREKXIQLPAGHTISSAEELGKRRYCKWHNSGSHSTNDCKVFKQQIQAAIEGGKIMFDNSKKPMKVDSNPFPNMVHTAARTADGGRARGFXVNSAXQQERYYEENDGGMRLPSIEDYPRCSNIAESSSXLYNRSNRPRQARVPVHQRFGPVNQDRDQEDNEDQKTQSCPSSIFTKNQKERKTKPKQEWRIKNQVPTANEATTNEAKRLAKGKSVVITSVNMASTLPAEFGVEQADVNEVEEESAKLIXSPEQAVFEKPEGIENWHLKPLYVNGYVNGKPMSKMMVNGGAAMNLMPYATFRKLGRNAEDLIKTNMVLKDFGGNTSXTKGVLNVELTVGSKTIATTFFVIDGKGSYSLLLQRDWIHANCCIPSTMHQCLIQWQGDKIEIVPADSQLKMESPCYYFEGVVEGSSVYTKDTVDDLDDKQGQGFMSADDLEEIDIGPEFRTKLIELLKEFRDCFAWEYYEMPGLGRSIVEHWLPIKPGVRPHQQPPRRCKADMLEPVKAEIKRLYDAGFICPXRYAEWVSSIVPVIKKNDLNKATPKDEYPMPVADQLVDAASGHKILSFMDGNAGYNQIFMAEEDIHKTAFRCPGAIGW

SEQ ID NO: 177216 - protein, 270 aa, Oryza sativa
  Clone ID: PAT_MRT4530_74890C.1.pep
MDSEHWISSLAAAKRFYAAQLGHVDDMAGIGMEEVEMEMEDDGEGMELELEMQLEEATWPDVACPYCYEDHDIASLCAHLEEDHPYEPHTSAYFCKQATGVDFAMAQNNLEKLMMPCPICFEKITRDMLNHITMQHGYLFKSGRRMRRFDIPESQALSLLSRDLRDAQLQALLGGGHRQRRSNTTATNISADPLLSSFGLGFSTLDSEERSKAPVPIPDDTSIHKDTPAQPWESRIDSSLTSEEREQKRKQATDRATFVQGLVLSTLFED

SEQ ID NO: 177217 - protein, 45 aa, Oryza sativa
  Clone ID: PAT_MRT4530_74891C.1.pep
LADLYGGRSEAEAHALLAYNVPSIYGIYPRYYGAPRTITTLGGVL

SEQ ID NO: 177218 - protein, 135 aa, Oryza sativa
  Clone ID: PAT_MRT4530_74892C.1.pep
CFICDSNIVSDMGPGVSCLEGGGCPPMPRGPPPGGVRPGVTTYGGLGVRLQVSTYPHLWRPERSRHAAFNAVCSALNRSVTGRMTDGTQYVRRTIAYVRRRAARHVPSNNDGERFLYSYPSRSRSSLFGQSKAPV

SEQ ID NO: 177219 - protein, 76 aa, Oryza sativa
  Clone ID: PAT_MRT4530_74893C.1.pep
ECCGGGACSGDWLGGGDASGRKTSTAARSLLLAAGIISRYTRVNLLKTQDDFDVLLERITDFVYAEKHSRAPVASG

SEQ ID NO: 177220 - protein, 229 aa, Oryza sativa
  Clone ID: PAT_MRT4530_74894C.1.pep
VTPIAAQICLWDIKANSKNKTLDALQIFKYHDGVVEDVAWHLRHEYLFGSVGDDHNLLIWDLRSPVSTKPVQSVAAHQGEVNCLAFNPFNEWVVATGSTDKTVKLFDLRKIDTSLHTFDCHKEEVFQVGWSPKNETILASCCLGRRLMVWDLSRIDQEQTPEDAEDGPPELLFIHGGHTSKISDFSWNPCEDWVIASVAEDNILQIWQMAENIYHDEDDVPTDDPAKAP

SEQ ID NO: 177221 - protein, 251 aa, Oryza sativa
  Clone ID: PAT_MRT4530_74895C.1.pep
MAEHKEEESLVESVMDKISDKLHGRGGSSSSSSDSDGERTADLKAKIYRLFGREKPVHSVLGGGKPADLFLWRNKKISVGVLAGATAIWLLFEVMDYHLLTLLCHCIILTLAMLFLWSNASTFINKSPPNIPEVKIPEDLAVNVARSLRFEINRGFATLREIGQGHDLKKFLIVVVGLWVLSVLGSCCNFLTLFYIVFMVLYTVPVLYEKYEDQIDAFGEKAMIELKKYYAIFDEKCLSKIPKGPLKNKKH

SEQ ID NO: 177222 - protein, 73 aa, Oryza sativa
  Clone ID: PAT_MRT4530_74896C.1.pep
MAAIECTEGNMTNRCTGSRLAVELARAPKHGKIIAILDVRPALTSPKHTIELTVVAHDSGEKDGELSTELKPR

SEQ ID NO: 177223 - protein, 327 aa, Oryza sativa
  unsure (1)..(327): unsure at all Xaa locations
  Clone ID: PAT_MRT4530_74897C.1.pep
MEQKDEAEMEEVDEEEEEEVDEDMAGGHAAQSPSPSCGLGEKKRRLALEQVRALERSFDTDNKLDPDRKARIARDLGLQPRQVAVWFQNRRARWKTKQLERDFAALRARHDALRADCDALRRDKDALAAEIRELREKLPTKPADTAASVKVEAGNDAXPAPRPATVCKDGSSDDSDSSVVFNDEASPYSGAAFIGFGPSFLVDDASAATVGCSSSLPALESKWHGPYSDDSCKGGVYGFTEEWLAACSGEMAGNDAAGFFSDEHASNLNFGWDRLISFSFGSTMPRIHLGMDGYRYAKSELSHDHGGIREEGDVVVAAAGSAWFGTA

SEQ ID NO: 177224 - protein, 135 aa, Oryza sativa
  Clone ID: PAT_MRT4530_74898C.1.pep
MADLIWSSEIPSIHIPSAAGGQHVGTVPSLTGITSATTSMVNLMQMPAIHMEQHMLHPTMLNSSASPECITSTAVPSTLNMMPMRDILIDQLSLPPAISSSSASGVLCEYVMPEHEDMVRLTLGQSSTMDLDLSF

SEQ ID NO: 177225 - protein, 94 aa, Oryza sativa
  Clone ID: PAT_MRT4530_74899C.1.pep
MANSVFTVTDENGNFTIELPSRLHATPNLEKACSVKVLQLPLDCACWPRRSPSYYHGIQLSSSEDGIRSYTTGVIRLQHHDTKSDMSMHHVGTE

SEQ ID NO: 177226 - protein, 227 aa, Oryza sativa
  unsure (1)..(227): unsure at all Xaa locations
  Clone ID: PAT_MRT4530_7489C.1.pep
LYRVSPHQTITTGQGSIFVSDEFVQFAYSMGIKLLNSSPYYTQANGQAEASNKSLIKLIKRKISDYPWLWHTRLAEALWSYRMACHGSIQVPPYKLVYGHEAILPWEVRIGSRRTELQNDLTADEYYNLMANEREDLVQSRLRALAKVTKDKEXISEGELVWKLILPIGSRDSKFGKWSPNWEGPFQIYRVMSKGAYMLQGLDGEVYGRALNGKYLKKYYPSVWVNA

SEQ ID NO: 177227 - protein, 240 aa, Oryza sativa
  Clone ID: PAT_MRT4530_748C.1.pep
MVSPDLIRNVVGIVGNVISFGLFLSPVPIFWRIIKNKNVQNFKADPILVVTINGISLVIEAVYLTIFFLFSDKKNKKKMGVVLATEALFMAAVAVGVLLGAHTHQRRSLIVGILCVIFGTIMYSSPLTIMVVKTKSVEYMPLLLSVVSFLNGLCWTLYALIRFDIFITIPNGLGVLFAIMQLILYAIYYRTTPKKQDKNLELPTVAPIAKDTSIVAPVSNDDDVNGSTASHATINITIEP

SEQ ID NO: 177228 - protein, 142 aa, Oryza sativa
  Clone ID: PAT_MRT4530_74900C.1.pep
MYKYSTQEKGHVELPKFDRCLSNGESSTGGSNRTKGVGLDLSNYECSTGPTSDSVQCQQVPAHNIELWLSTGPCDCPYQTMGVRLAALNPPLHPSTRVIFGVEGARTTKCLIGLPSSRERSARLEGDAMPMTMQKRAATLEV

SEQ ID NO: 177229 - protein, 134 aa, Oryza sativa
  Clone ID: PAT_MRT4530_74901C.1.pep
MVRPPPSSDDDPLVPQFGRQIDSGVVAAAGGNLVALYAGPYRPASSSMGCYLVYDAAARSSSPPLSTVPGVPYSDSHSSPGRATVIAPAATGGGFMDGHSVLPPSTAEITITTWTLDLQDDHSTSTQNWTNREA

SEQ ID NO: 177230 - protein, 81 aa, Oryza sativa
  unsure (1)..(81): unsure at all Xaa locations
  Clone ID: PAT_MRT4530_74902C.1.pep
MTLNLWFVYGAYNQNTEXIVCLPMVWNNQPIAAVCRRCSWSRREAKNKQLIDKPLHWRSNLMAQWIECVHGSAKIFMECLG

SEQ ID NO: 177231 - protein, 995 aa, Oryza sativa
  Clone ID: PAT_MRT4530_74903C.1.pep
MASDRLWELPDDLLIRILSFVPVKEAASTTLLSRRWRNPLWLETGTFNVDLTSEQFSNHAHNCLAMWRDEGDAREALRRDRRPRRLKKLSVTVTASRDDDNYYSDFSEYLNPFVFHGKCVRMFRNVEELRLECQIDAPAGAGPLSSSSPPRYTYAMPGPEYNLRLHHLPCEDFGVLHLTGCSLKEEIHLCLRNRIAYPCLTTLRLRRCTVPLGELQRLITAAPALADVCLESVTFPDQGSVGGMTTDKRVRLHCPAVTAFAMVNCHMFCRSFELDAPALICFRYAQISSYEQSISLKPPAPCLEKANLESISGTEIFRSLLHDMCHVKVLKLTVYSIVGDIKFERLPCFPNLKHLVIEELCGFAMGNGSAAAAATAIGELLQRCPVIRELWIRFSWSKYLHESPDLAAVLEEFDIDGESQDVTDQINTKIATWRASIKLREWRPPLTMDRPAHRIKRRRLTPPGAEEPILSPVQPPAVPSLAAAAAAGDGYPPWVILQPDGEREGEDEDDEDHPCLTPDAETATASHTSTGHPITVAFSLAAPPAPSRMWFRFSYDADSETRCNCSVIAAHGDSVLINIFYFSNASVHNHEDRFVYRASAAASDRSWARPPSLSMLPPPPVEYTPFQDATGILRRGEDDLVVAELTVEGKLRHDTLLGVVAKLLVFRSGEWGVKRAPINHGSGSGSSSSRGHDLPAPWPWETDMVVPVGDRLLCYVDLHHTTASSSSPTGGGGGGALKFVDISPRCCCGSLSKGQTSCDRSSQAFVIRTWTLRIGDDVNGDDMAWEMDAMVDASELWSLDAYAGLPLVRPEYPVVNMDDPHLIRLAVTGARQEEGRTYSDETDENYSSLIMVDTRRKTMPSVPPFLHLPFNGETLVSRFSSYFNSNHSSNNGGGGGGGALPSKIHVNIEPPPPPAAVATGEPRTSDTAEPKIVLVLERFSWRLKGYSIQDMAGGDDMLKAYTILSQDNGRCFRSLLGLPMSFNFELGLAVDDDQE

SEQ ID NO: 177232 - protein, 294 aa, Oryza sativa
  Clone ID: PAT_MRT4530_74904C.1.pep
PAHTHPLLRPRQGGRKHHPPLSPVAQPAVAGDWHLQRRLDVGAILQPRPQLPGDVARRGRRPGSAPPRPPPPPPQEALRHGDSQQGRRQLLFGFLGIPQPVRFPRQVRADVPERRGAPPRVPDRRPRRSRAVVVVLAAAVHVRHARPRVQSPSAPPAMRGFRGSSPHGMQPERGDSSMSSESDRLPVPDDAAAPAVHRAARRAPETDHRRAGARRRMSRVSHLPGSGIRRRHDHRQTRPSPLPGGHRLRHGQLPHVLPQLRARCAGVDLLPLRPDLILRAIHLAETTCAVLGKG

SEQ ID NO: 177233 - protein, 66 aa, Oryza sativa
  Clone ID: PAT_MRT4530_74905C.1.pep
MAQKEANGSSNGEHTTRPPPTPSPLGSPVLQRPEISHRGLLIGSHLAQLGNGAQHCATLSLFKTPE

SEQ ID NO: 177234 - protein, 225 aa, Oryza sativa
  unsure (1)..(225): unsure at all Xaa locations
  Clone ID: PAT_MRT4530_74906C.1.pep
FLSAARSPPTPPRRNDTAHXHRPSDGTRPGXRRXQRGHHAPPRPPRRTNAPPRAPHGPGAARHPTPGRRGPAXGARPPGGASPPXRTXXTPPPAPHAAGXRTGTAPGNPQQRGRGRSRRAPTPDPPPSQRTPTRPAHPRTPKTRTPTAPTTHADPRPTPPQRGDNRPPRPTTQPPRPPSPHPPPRTQHHGHPPPPDGPTQHTRPGARGXXXPPPAACRGAASPPR

SEQ ID NO: 177235 - protein, 120 aa, Oryza sativa
  unsure (1)..(120): unsure at all Xaa locations
  Clone ID: PAT_MRT4530_74907C.1.pep
MXRXQLVLVALVAAALLLAGPXTTMAAISCGQVXSAVSPCLSYARGXSGPSAXXYXXVRXLNSXTSTXLXAAXPXKCLXXMGXIXFFXLXLXSXXDXXLXRXXXPXTXXPXLXXXXXKIN

SEQ ID NO: 177236 - protein, 137 aa, Oryza sativa
  Clone ID: PAT_MRT4530_74908C.1.pep
MEPRQSYQLSSHSEAPWYGAYNEGEVEHSLHIDMVHPEGDGEEATIESARGGALPSARSGGRGGAVAANGVEAANGAGGGPMGDGGNGGALSSARPGGRKGSSDVGELRIRWSLRPPSLAYGGRRCPAASTFGELLC

SEQ ID NO: 177237 - protein, 74 aa, Oryza sativa
  Clone ID: PAT_MRT4530_74909C.1.pep
PSGKACLGRCRVVVSEDALKKMKVTRSWQSLRMMMLKSRCNRTVKDETSHRVCQTPGQLGTNVRTSVANTAQAR

SEQ ID NO: 177238 - protein, 1616 aa, Oryza sativa
  Clone ID: PAT_MRT4530_7490C.1.pep
MAEKPPASPSSASPGSLKEKIQQLGLSEINEGNIVTITPDKLTPDQQKDFDSMMQQARNQFLNSFMQTRKGTVVQKYKVKVVADIPGTGSSKDGEVQQVPDGTTQPCDKGVADGFQGIQGDGSQGVQGVGVQGDGSQGVQGGNLNQDGNAAQLQFNNFQDQVDYVVHHALINQSGILVNTLSNMVKKMVDGSMAEYQATGSVYLLGGVFQNYRPLITDNQPAAQSIPPNAPSAQSTAPVSAPAPAALPSAPGQLVNPRLLLGQHAVNRVVPEHLVHHVQPDQTVIPQVVPEHLPMTQQPQGTPQQQPWADMIAGVMKEQFGLRPKDAGNLYRQPYPEWFERVPLPNRFKVPDFSKFSGQDSTSTYEHISRFLAQCGEASAVDALRVRLFRLSLSGSAFTWFSSLPYGSINSWADLEKHFYSYFYNGVHEMKLSDLTAIKQRHDEPVHEYIQRFREMRNKCYSLSLTDAQLDDLAFQGMIPPIREKFSSKDFDSLSHLTQKVTLHEQRFAESRKNSRKVNHVCPYMYGLDDDGDDSEIATAEWVRSKKVILCQWVKNSGKEERYDFDITKADKIFDLLLREKQIQLPAGHTIPSAKELGKKRQQIQAAIEDGKIRFDDSKRPMKVDGNPFPVNMVHTTGQTANGGRARGFQSNSAKIIRKYQKRYDRQQEKHYEENDDGFDPHWGCMRLPSIEDCPGCSDITKSSSRSCNRGNRLRQKRVPVHQRLGPVNQDRSQEDNENRKTQWCPSEFGVKQADVDEVEEESAKLTLSPEQAVFEKPEGTENRHLKPLYINGYINGKPMSKMMVDGGAVVNLMSYATFRKLGRDAKDLIKTNMVLKDFGGNPSETKGVLNVELTVGNKTIRTTFFVIDGKGSYSMLLGRDWIHANCYIPSTMHQCLIQWQGDKIEIVPADRSVNVASADLALWEMDDLDCLSGKVWDGDFLKMENPSYYFEGIVEGSKVYTKDIVDDLDNKQGQGFMSADDLEEIVIGPGDRPRPTFISKNLSSEFRTKLIKLLKEFRDCFAWEYYEMPGLSRSIVEHRLPIKPGVRPHQQPPRRCKADMLEPVKAEFKRLYDAGFIRTCRYAEWVSSIVPVIKKNGKVRVCIDFRDLNNATPKDEYPMPVADQLVDAASGHKILSFMDGNTGYNQIFMAEEDIHKTAFRCPGAIGLFVWVVMTFGLKSAGATYQRAMDYIYHDLIGWLVEVYIDDVVVKSKEIEDHIADLRKVFERTRKYGLKMNPTKCAFGVSAGQFLGFLVHERRIEITQRSVNAIKKIQPPENKTKLQEMIDKINFVRRLMHYLLSNECTVICKADVVKYMLSAPILKVRVGKWIFSLTEFDLRYESPKAVKGQAIADFIVDHRDDSIDSVEIVPWTLFFDGSICTHGCGIGLVIIFPRGVCFEFAYTIKPYATNNQAEYEAVLKGLQLFKKVEADAIEIMGDSLLVISQLAGEYECKNDTLIVYNEKCQELMKEFRLVTLKHVSREQNIEANDLAQGASGYKPMIKDVKIEVVVLTSDDWRYDVHQYLQNPSQSASRKLRYKALKYTLLDNELYYRTIDGVLLKCLDADQAKVAIGEVHEGICGTHQSAHKMKWLLRRAGYFWPTMLEDYFKYYKGCQDC

SEQ ID NO: 177239 - protein, 254 aa, Oryza sativa
  Clone ID: PAT_MRT4530_74910C.1.pep
MEPRQSYQLSSHSEAPWYGAYNEGEVEHSLHIDMVHPEGDGEEATIESARYQQLPRKYQSRNIRREGRRGGGKRRGGSERCRWRPDGGRGGGGGPVAAQRWWILRVTAATVAPSPPPDPAGGKAAVTSASFGSGGLSVRLPSPTVADGLAQASTPVPLLFIKPMYIYVNPLAVRHRLPSSPLLPLRHRTAVTVDLVLAAGPPPPPSSRSLTGFALCATAGPSRRGLFREPPLPCRRRAEPPLAAFLPRPCFART

SEQ ID NO: 177240 - protein, 39 aa, Oryza sativa
  Clone ID: PAT_MRT4530_74911C.1.pep
MEKVKMNSKQVLGTRTHKMMANMEVDAGILNLVGEGTRS

SEQ ID NO: 177241 - protein, 100 aa, Oryza sativa
  Clone ID: PAT_MRT4530_74912C.1.pep
QCRRGSPFYLKKKTRHTRDFFGALGTKGATPGIKLGQTGGPKWLKPKIKTKGPRPDCEPPKGGTKMIKPKLPTPFFKGKRHGGGQWTNRVPGYGTNSDFL

SEQ ID NO: 177242 - protein, 414 aa, Oryza sativa
  Clone ID: PAT_MRT4530_74913C.1.pep
MAAAAAAASDDAAAAGGRFDFDVIVVGAGIMGSCAAHAAASRGARALLLERFDLLHHLGSSHGASRTIRDAYAKAHYPPMVRLARRLWADAEAESGYRVLTPAPQLTVGPPGDASLLAAVGNSGARRVDEDDLAGRWGGAFRGVPDGWVAAVSELGGGVLNATKAVAMFQALAVKGGAVVRDNAEVVGVVKKDGEAGVFVRTSGGEEFHGAKCVVTVGAWTSKLVKSVAGVDLPIQPLHALVLYWKVKPGRERELAAEAGFPTFSSHGDPHVYGTPSLELPGLIKINYDGGPPCDPDGRDWAGGGGDAASRVARWIEEFMPDHVEAAGGPVVRQPCMYSMTPDKDFVIDFLGGEFGDDVVVGAGFSGHGFKMGPAVGRILAEMAMDGEARTAAEAGVELRHFRISRFEGNAMGN

SEQ ID NO: 177243 - protein, 67 aa, Oryza sativa
  Clone ID: PAT_MRT4530_74914C.1.pep
WLGFLVWPTTRSCEDHEWSAEVVAWGRCFAAVVLGRAGEPPVGEWMMAVMAPKRIDAYCSIGVGRTG

SEQ ID NO: 177244 - protein, 38 aa, Oryza sativa
  Clone ID: PAT_MRT4530_74915C.1.pep
RAGAAQNPRPFQNPPPPPPPPRPPARPPWPPPPPPPAK

SEQ ID NO: 177245 - protein, 422 aa, Oryza sativa
  Clone ID: PAT_MRT4530_74916C.1.pep
MAGSGSCMKKSCVCCQKYLEHLDGKMNCFVRRMTADSRRSMIMPCKFVNHFGGDFSGTIKLQSPNGILYVVEVTKCKNKTVLRCGWEAFVDAHHIEENDSLLFRCVENSRFEVLIFDSDDCEKERTVPLNMNLLSQVISFCYAEVHFPHKSVTVTLQRPCKSKKWHPRFYKRKDARMNILRGSWVEFVKDNRVQEQDICVFVPTKDARRNFTFTVHLLRVAAAYSWGGTGVDRAGSSLGRTDVKSASEISIKEEPIDQEENVSSRNRNGVSDESEEDEDSEGPAHPPYIVPCKSHLSRLQKKIVEEKVRSFQSKFPVYVAIMKKSNVERSASRCQLELGARFAAAVHLPDRRQTVVLQRRGERWATVMQIRSGTRRLLISGWHRFVRDNRLRVGDICLFEFKTHERWRLTMAVHAIFREQCC

SEQ ID NO: 177246 - protein, 438 aa, Oryza sativa
  Clone ID: PAT_MRT4530_74917C.1.pep
MELRKRPRPRRVDPDFVSSPPASLLLPPPRKRARRQAAPPAAPAPAPAPARPSPAARRRPTCARVIIQSPVAGLQPSVCCPCEAPLRACRLPRASFLARRRPPFDWYEADMWTEVAKYLFGAELVRLSSTCRWFRRLLADEFIWRHAFLRDLSLLPAAADRYPPRPLHRSWRLLYAAAFSKLLPSLPPSTDDPVPLTDMTRVPSLLPPDGAHSYWFRRSSRHIGAYRIGGFLLESPYMLLTAKLAVPQWLPPQEDGPQIAIEMTGACVLPNARPGIWITDFHLVRCPNCTLNKCAGVLQVLDARHCELFLEQGFWNGTWEYEDLGDHYNDEETPTAACAIFNASTRAHESISCSSLDHLAFVNSSSLFIYILGVLHSKSWVRRCDDPQPKAHCRPYAVALNSNLLSNSNQGLVSRFQAMRDTTGNGQIVSIRIIQQIY

SEQ ID NO: 177247 - protein, 87 aa, Oryza sativa
  unsure (1)..(87): unsure at all Xaa locations
  Clone ID: PAT_MRT4530_74918C.1.pep
PXXXXGVXXWWPWAXRXRRXAGDDHXRXXPTRCXMXMXTRNMVPXXXIXXPSXXCSXXSXYSXQLXXXXXXRXXSWSXXSXEXGXKP

SEQ ID NO: 177248 - protein, 142 aa, Oryza sativa
  Clone ID: PAT_MRT4530_74919C.1.pep
MTTDEELVRPQASGAKNMGFAKFDSMSELHCKIPTVLVHWGLGLMRLKSGWKEMPSIQKALPPELADNVIRLYRECLRRARFIGHQKHNTGLIVSMVREQFKKNMHETDPEKIQKMKDDAARGLINHILYESEKMTGRKFSS

SEQ ID NO: 177249 - protein, 84 aa, Oryza sativa
  Clone ID: PAT_MRT4530_7491C.1.pep
MGKSIFQRAKATAEHIAPVTSPAVSSGESDGGGGGASRRPRSTVVADLSVVDERPDSTAMTGDLNVKPVSRQQLKRTGCRSYSN

SEQ ID NO: 177250 - protein, 1573 aa, Oryza sativa
  Clone ID: PAT_MRT4530_74920C.1.pep
METRSSKELARTAQMKRKDHIQLKQGRKRARTDGTERTARDEPTPISNMDLKNTVTLNLVKPKCMCQHCQGPKGICKNIHNEARRTESNIQLLQLKESSVINSTMICNQMMKAIQSKELARTARMKRKEQNALKRSRKGTIINKNEIRKDGISSASKIWNFGGPTCMCPHCHALMWHGEKIQSTRSKQPSFSRQRKNQPSFGLCCKQGKVALPPLKEPPHFLSSLLARDGGTSENYQQNIRSYNSMFAFTSMGGAVDRKINKGRGPYVFRLNGQNYHHIGTLLPKGSNKPRFQQLYIYDTENEIKNRIEASRSGTRNASLDEKTIAGLLTMLDENNTLAQTFRMARERFKEDDYHNYTLRLLDNRDQDGRQNNMPSTSEVAMLIVKDPTEKSYGRDIVLEYKDMRPKRISETHPKFMAMQYPLLFPYGEDGYRLGIKYSGKDGVRYDKKCVTMREYYAYRLQQRQDQSMLPLACGNLSMQFMVDAYTCIEQCRLSWIRQNQGILRTELYGGLQDALRTGDTRTEKLGRRIVLPASFTGGPRNKEQNYQDAMAICRWAGNPDLFVTFTCNPKWPEIQCMLEKVGHQKPSERPDIVVRVFMIKLRELMSDIKRNQHFGKTKAIIFTIEFQKKGLPHAHILIFLDKKEKCLKPSQIDKMICAEIPDSNKDPETFEAVKNFMMHGPCGETNPKSPCMVDHKCDRYFPKGFSDETIIDEVNFPIYKRRDDGRQIKKGRINLNNGFVVPYNKDLLVKFQAHINVEWFNRSKSIRYLFKSIYNGDDQATAVVEETDTAKDNDEIKRYLGCSYMTATEACWRIFTFPLHYQEPSVQRLFFHVENEQQVIFPDSTDLQEIIRHPRSGVTMFTEWMETNKKHEDARELTYSEFPTKWTWVNKVKKWVRRKGRKKIGRIYNAHPASGERYYLRVILNTAKGCTTFEDIRTVNGFVHSSYKSACHALGFLNDDNEWIECIKEASCWASGIELQQLFATILCHCEVTDPKSLWESIWEELSKDIQHTQSWLLNFPASCLTPSHKRKCALIEIEKNMRQAGKSLKEYTGIEPPNVAKLSEIENSLINEEMNYDKERLKHQHLQILNTLNIEQKKAFDAIIESAHQSLGKLIFVDGYGGTGKTYLWKAITTRLRSEGKIVIAVASSGIAALLLQGGRTAHSAFNIPINLTDESTCFIKQGSRIADLLMKTSLILWDEAPMANRNCFEALDKSLRDVQRFRNENSYQKPFGGMTVVLGGDFRQILPIVPKGRREHTVNASIKFSYLWQHFEVFNLTKNMRLNSVSKDQAEHQKTAEFAEWILRIGNGDTILLDEKGWVSMPSDLLLQKGDDPKAQIVDSTYPGLQYNCCKPKYLEERAILCPTNDDVNELNEYIMDQIQGDKVTYLSHDSVSKSMSYSHEMEMLYPTEFLNSLKHPGIPNHQLKLKVGLPVMLLRNINQNAGLCNGTRMRITRFGKRVIEAEIITGTHIGDMVCIPQIIMSPNERKWPFVLNRKQFPLSVCFAMTINKSQGQTLNKVGLYLPRQVFTHGQLYVAVSRVTSRDGLKIMIADKECPGEGMVKNIVYKEIFQ

SEQ ID NO: 177251 - protein, 111 aa, Oryza sativa
  unsure (1)..(111): unsure at all Xaa locations
  Clone ID: PAT_MRT4530_74921C.1.pep
HXXXXPNXLKXXSLTNHTTXPXSLTILNFWLXTCKNXXXLRGXVPSPFXKKKEPXFTPHXGWPPCKFXGAXXXQNXKIXLXFLLPLFXXXXPXPXEPTXXLLNXFXKKXKN

SEQ ID NO: 177252 - protein, 462 aa, Oryza sativa
  unsure (1)..(462): unsure at all Xaa locations
  Clone ID: PAT_MRT4530_74922C.1.pep
MAEESIEWTAFTCPQGHYEWLVMPLGLKNAPAIFQRKMQNIFNENQEFILVYIDDLXEGKIHLQEHXAKKILQFPDAMNDKKKLQQFLGLVNYARNHINNLAKLAGPLYAKLRKNGQRYFNSEDIKLVRLIKERVKELKPLELSLEESYFIIETDASQHGWGAILKQRPTKFSAKSEEKICRYASGNYKLKTVNNTDREIMAIINAINAFRLYLGFKEFTVRTDCEAICRYYNQLNSKKNSTRRWVLFEDIITGNGYKVIFEHIKGKDNNLPEMLSRLPELQKPIYVVFDGKLPGVYISFEEIVAQKIDAKLIGGISWKKYKDIDEALSQARKILGINYYLEPAAKEYIQKCKKAKGKKTPEIPIKTTIKEEGYSKKPTYKECLTKGVDLLDGEYIDWKIIEKFEEASPQLKKELKEEILKELKQEMDQKFEQIKKAVDERLEVSFSDLDTMDLGGQGQPDE

SEQ ID NO: 177253 - protein, 407 aa, Oryza sativa
  Clone ID: PAT_MRT4530_74923C.1.pep
MDGFMVSVATGAMNSLIDKLTTLLGQEFRLHKGVQRDIALLNGELSCMNALLEKLAGMEVLDPQMEEWRNQVREMAYDIEDCIDRYIYQLHYEPQRPTGIVGFFHDYVHKVKELLARREVAQQIKVLKDDIVEASHRRKRYKIDPELYSETTNVVPIDPRLPALYVEASNLVGIDIPRDQLINLVDDGDQSFKVISIVGVGGLGKTTLANEVYKKTGGRFDCQAFVSVSQKPDVKKILRSIICQIMEPYHASTNPDKAVISQIKKQDYSSTESGDVEWLINILRVFLKDKRYLIVIDDIWSTQEWMTIKFALFENTCGSRILVTTRIFTVAKSCCSPDHGTVYELRPLSEADSMCLFFRRIFGSEDLCPVNLKDVSTEIIKKCGGLPLAIITMASLLADKSDRREEW

SEQ ID NO: 177254 - protein, 1119 aa, Oryza sativa
  Clone ID: PAT_MRT4530_74924C.1.pep
MDISRSLFRRIASRDDNCFDKQKGKYDDIDELKDVAQVDKQLERYQRDTLRAIRPQQVYCMGFFENKNGLYRISRDVELSVLTKPVELKIVAKEFENSLKYSGYKYIHQDSLDEVGLHNLDNAMEAMEVDLGTGKRKRYGEGSVKNEGERERPARAAGRWPPEKEEYSYHYIPGQYRHMGTKRRDFEKPIKFQNQKSDGAILNLAAHDPIDWPNIISIWKGLIVQKYIQNQHNIGNKVEDMITYLETFLGESAKVLWEQWVEKNPNNYEELKRAGNNPHNFANIVSNIIIAEDPELGYTTLQNERLKEIEKLTLTSWKEIVHTIDDNKAEVPTDMSGIKKIHNQLAHNVEVYINGTKYIIDEITIRNLSMISDDMIIGLRFLQQSVQTTVIHEQGITFIPYQNNVPYISEVRKRGGVRIKPDNLEALNLESEERINEYELSENIDIYYISNSNIECIGLQAFAPNWYRDIKSKKDIEKIVQRLEDIQIIGEIPMKYWEKNAIECKINIINPEYIIKTSPIEATPKDIEELLKLGAIRESRSPHRSAAFIVRNHAEEVRGKSRMVINYKKLNDNTIEDAYNIPNKQEWINRIQGSKYFSKFDLKAGFWQVKMAEESIEWTAITCSQGHYEWLVMPLGLKNAPALFQRKMQNIFNDNQEFVLVYIDDLLIFSKTYKDHIAHLELFFRKVEQNGLILSKKKMEICKEKVNFLGHEIGEGKIHLEEHIAKKILQFPDAMNDKKKLQQFLGLVNYARNHINNLAKLAGPLYAKLRKNGQKYFNSEDIKLVRLIKEKVKELKPLELPLEESYFIIETDASQQGWGAILKQRPTKFSAKSEEKICRYASGSYKLKTVNNTDREIMAIINAINAFRLYLGFKEFTVKTDCEAICRYYNQLNSKKSSTRRWILFEDIITGNGYRVIFEHIKGKDNSLPDMLSRLPIFQKPIYVVFDGKLPGVYISFEEIVAQKIDAKLMGGISWKKYKDIDEALSQARKILGINYYLEPAAKEYIQKCKKAKGKKTSEIPIKMTIKEEGFFKKPTYKECLTKGVDPLDGEYIDWKIIEKFEEASPQLKKKLKEEILKELKQEMDQKFEQIKKAVDEKLEVSFSDLDTMDLGGHGQPDE

SEQ ID NO: 177255 - protein, 1005 aa, Oryza sativa
  Clone ID: PAT_MRT4530_74925C.1.pep
MDLSRSLFRRIASRDDKSLSCIEKQKGKNEDIDELEDIAEVDKLLERYQRDTLRAIRPQQIYCMGFFENKNGLYRISREVELSVLTKPVELKIVAKEFENGLKYSGYKYIHQGLHNLDNAMEAMEVDLVTGKRKRYGEGESAKVLWEQWVEKNPNNYEELKRAGSNPYNFSNVISNIIIAEDSELGYTTLQNERLKEIEKLTLTSLKGIKEFSQHYLYNATTAKQGYNRGIVERYFNKLPDPLGSMIFEEYKKETEGAEINISQAITFVFKQLRKICTGIQAQRSMKHSDYNFCNKIVQIPLSYGEDKPRSKRIYKHQNRNNNNIRTKKRFLQQSVQTTVIHEQGITFIPYQNNVPYISEVRKRGGTSPKLDNLEVPNLESEERINEYELKYIIKTSPIEATPKDIEEFKMHIEELLKLGAIRESRSPHRSAAFIVRNHAEEVRGKSRMVINYKRLNDNTIEDAYNIPNKQEWINRIQGSKYFSKFDLKVGFWQVKMAEESIEWTAFTCPQGHYEWLVMPLGLKNAPAIFQRKMQNIFNENQEFILVYIDDLLVFSRTYKEHIAHLEIFFRKVEQNGLILSKKKMEICKEKINFLGHEIGEGKIHLQEHIAKKILQFLYAMNDKKKLQQFLGLVNYARNHINNLAKLAGPLYAKLRKNGQRYFNSEDIKLVRLIKERVKELKPLELPLEESYFIIETDALQHGWGAILKQRPTKFSAKLEEKICRYASGSYKLKTVNNTDREIMAIINAINALRLYLGFKEFTVRTDCEAICRCYNQLNSKKSSTRRWVLFEDIITGNGYKVIFEHIKGKDNNLPDMLSRLPELQKPIYVVFDGKLPGVYISFEEIVAQKIDAKLMGGISWKKYKDIDEALSQARKILGINYYLEPTTKEYIQKYKKAKGKKTPEIPIKTTIKEEGYSKKPTYKECLTKGVDPLDGEYIDWKIIEKFEEASPQLKNELKEEILKELKQEMDQKFEQIKKAVDEKLEVSFSDLDTMDLGGHGQPDE

SEQ ID NO: 177256 - protein, 596 aa, Oryza sativa
  unsure (1)..(596): unsure at all Xaa locations
  Clone ID: PAT_MRT4530_74926C.1.pep
WRIRCYPSGXSKEDNGEYLSLFLELVRESTSNNVRAIFDAFLVEKDDEPSSTHADRGVHVHPTNGYTAWGWPQFVKRSDLESSSSSYVVDGKVRIMCVVIVIRDNTVPVPPSDIGAHLGGLLDRGEGTDVSFLVDGETFPAHRAVLAARSPVFRAELLGSMAESKMSSITLHDIEPLTFRALLRFIYTDKLPADDGGDQLKMAAMATDELFQKLLAAADRYDLSRLKLMCAQKLWEAVSVDTVATTLIHAEMHGCPELKSSCLDFFVQDKNFKETVLTEGYVQLVQRFPSIKDEIRGRTERKKGGGCLLAGRRARRGNHRVGKLASMRGEREEAGRPMNGTGRPARGRGGRRVGWGGRRACEEREKAGKRAEGDSHRVGRPMNGTGRSACARGEGEGGEKGGGRQPSLHGGGGGGEALSASILVASTPRVFTRDAAGSLHPDNSDAAGVHPTASATPLIMGARKLCVALVFGLLAADVMVTSILKGSFVLMLVPKSFESDHARVRGQQQPKVCQGLMAGNTATGDCQTGDGERRVRLREAWAFRRWRLEDRGGPGVPVASRPLGQAPGDLAPSTRRAGEETRRGRGVRESLVEAES

SEQ ID NO: 177257 - protein, 94 aa, Oryza sativa
  Clone ID: PAT_MRT4530_74927C.1.pep
FFFFFFFFFFFFFFFFFFFFFFFFLKTQKPRFLEAPQKLFLRGIPYNNGDKTPFGKGGHYPQDGTSPLGAAFFGGLHKNPPTPFPKKQKKRGFF

SEQ ID NO: 177258 - protein, 1080 aa, Oryza sativa
  Clone ID: PAT_MRT4530_74928C.1.pep
MDISRSLFRRIASRDDNCSDKQKGKYDDIDELKDVAQVDKQLERYQRDTLRAIRPQQVYCMGFFENKNGLYRISREVELSVLTKPVELKIVAKEFENSLKYSGYKYIHQESSDRDIIDNRRHSISELMEKLDHESEIKYYEDKLRDIADEYNNSMKKNYPGLRNKKKEKSLAIETPRTQEIKIEQIKSEEPREEIQKLDKVLSEEEQWEVNEKLLLESYEEENNLIEEIENIEEEDNAEQYNDFIDSLDEEGKRKRYGEGSVKNEGERERPARAAGRWPPEKEEYSYHYIPGQYRHMGTKRRDFEKPIKFQNQKSDGAILNLAAHDPIDWPNIISIWKGLIVQKYIQNQHNIGNKVEDMITYLETFLGESAKVLWEQWVEKNPNNYEELKRAGSNPHNFANIVSNIIIAEDPELGYTTLQNERLKEIEKLTLTSWKECIGLQAFAPNWYRDIKSKKDIEKIVQRLEDIQIIGEIPMKYWEKNAIECKINIINPEYIIKTSPIEATPKDIEEFKMHIEELLKLGAIRESRSPHRSAAFIVRNHAEEVRGKSRMVINYKRLNDNTIEDAYNIPNKQEWINRIQGSKYFSKFDLKTGFWQVKMAEESIEWTAFTCPQGHYEWLVMPLGLKNAPALFQRKMQNIFNDNQEFVLVYIDDLLIFSKTYKDHIAHLELFFRKVEQNGLILSKKKMEIYKEKVNFLGHEIGEGKIHLQEHIAKKILQFPDAMNDKKKLQQFLGLVNYARNHINNLAKLAGPLYAKLRKNGQKYFNSEDIKLVRLIKEKVKELKPLELPLEESYFIIETDASQQGMKRSMNYAGVECFTFGDDNKLRIFPPNSYKFKPKDHIILDEVQECILDNFWYQYNNKREEKGYLLSILNSLSEYFHLINGSLMPANEDHEVIQQKPIYVVFDGKLPGVYISFEEIVAQKIDAKLMGGISWKKYKDIDEALSQARKILGINYYLEPAAKEYIQKCKKAKGKKTSEIPVKMTIKEEGFFKKPTYKECLTKGVDPLDGEYIDWKIIEKFEEASPQLKKELKEEILKELKQEMDQKFEQIKKAVDEKLEVSFSDLDTMDLGGHGQPDE

SEQ ID NO: 177259 - protein, 249 aa, Oryza sativa
  Clone ID: PAT_MRT4530_74929C.1.pep
MEICKEKVNFLGHEIGEGKIHLQEHIAKKILQFPDAMNDKKKLQQFLGLVNYARNHINNLAKLAGPLYAKLRKNVFDGKLPGVYISFEEIVAQKIDAKLMGGISWKKYKDIDEALSQARKILGINYYLEPAAKEYIQKCKKAKGKKTSEIPIKMTIKEEGFFKKPTYKECLTKGVDPLDGEYIDWKIIEKFEEASPQLKKELKEEILKELKQEIDQKFEQIKKAVDEKLEVSFSDLDTMDLGGHGQPDE

SEQ ID NO: 177260 - protein, 1372 aa, Oryza sativa
  unsure (1)..(1372): unsure at all Xaa locations
  Clone ID: PAT_MRT4530_7492C.1.pep
MAGRAATWGRGVGAWRGAEKAATRTVSAAVAVVGRAARGRGRPDRLSCIGFNLQQEKYKVKVVADVPGTSSSKDGEGKQAPNGSAQSSDKGAIDGSQGDQGDGSQGVQGVQGDGAQGVQGEGLNQGSNVAQLQFNNFQDQVDYVVHHALINQSGILVNTLSNMVKSMVDGSIAEYQATGPVYLQGATVDSANATKATGCTADSANTSDPTGCAANSVDATRTTGFATNSASAIKATGHSADSTARLDECIGWVPDFSKFSRQDSTSTYEDINRFLAKCGEASAVDALRVRLFQLSLSGSAFTWFSSLPYGSINSWADLEKQFHSYFYSGIHEMKLSDLIAIKQRYDEPVHEYIQRFREMRNKCYSLSLTDAQLADLAFQEVCRSHEELKKVNHVCPYIYGSDNDDDDDSEIAAAEWVRSKKVIPCQWVKNSGKEERYDFDITKADKIFDLLLREKQIQLPAGHTIPSAEELGKKRYCKWHNSGSHTTNDCKVFRQQIQAAIEGGKIKFDDSKKPXRLMAILFLSIWCIQLAEQPMEVVQEVFRVGSSLDFVGMKXMRLPSIEDCPGCSDIAESSSRSYSTGNRLRQTRVPVHQRLGPVNQDRGQEDNENMKTQLCPSEQAVFEKPQGTENRHLKPLYINGYVNGKPMSKMMVDGGAAVNLMPYATFRKLGRNAEDLIKTKMVLKDFGGNPSETKGVLNVELTVGSKTIPTTFFVVDGKGSYSLLHGRDWIHANCGIPSTMHQCLIQWQGDKIEIVPADRPVNVASADLALWEMDGLNCLSGKVWDGDFLKMENPSYYFEDVMEGSNVYTKDKVDDLDDKQGQGFMSADDLEEIDIGPGDRPRPTFIKIASLEITQRSVNAIKKIQPPVNKTELQEMIGKINFVRRFISNLSGRLMHYLLSNECTVICKADVVKYMLSAPILKGRVGKWIFSLTEFDLRYESPKAIKGQAIADFIVDHHDDSIGSVEIVPWTLFFDGSLFKEVEADAIEIMGDSLLVISQLAGEYECKNDTLMVYNEKCQELMKGFRLVTLKHVSREQNIEANDLAQGASGYYKGCQDCQKFEAIQRAPASAMNPIIKPWPFRGWGIDMIRMINPPSSKGHKFILVATDYFTKWVEAIPLKKVDSGDAIQFVQEHIIYRFGIPQTITTDQGSIFMSDEFVQFADSMGIKLLNSSPYYAQTNGQAEASNKSLIKLIKRKIPDYPRQWHTRLAEAYRMACHGSIQVPPYKPIYGHEAVLPWEVRIGSRRTELQDDLTADEYYNLMADEIEDLVQSRMRALAKVTRDKERITRHYNKKVVPKDFSEGELVWKLILPIGTRDSKFSKWSPNWEGPFQIYKVVSKGAYMLQGLDGEVYGRALNGKYLKKYYPSVWVNA

SEQ ID NO: 177261 - protein, 43 aa, Oryza sativa
  Clone ID: PAT_MRT4530_74930C.1.pep
TVHHSWIITSPSKPEAMDSPATPTDFSPLLSRFLIVMSATFKT

SEQ ID NO: 177262 - protein, 100 aa, Oryza sativa
  Clone ID: PAT_MRT4530_74931C.1.pep
MRPELLHMIPTYVPVAGLILLLIRKAPKRCRIGGDWVLASGICEKQTIKDKGFLDSFTTVGEGFLRHAVRLIGQDCDVLTPVPEQSTESPKAMLTNQTVD

SEQ ID NO: 177263 - protein, 488 aa, Oryza sativa
  Clone ID: PAT_MRT4530_74932C.1.pep
MAMSLRQEVRKRGGTSPKLDNLEVPNLESEERINEYELSENIDNYYISNSNIECIGLQAFAPNWYRDIKSKRDIEKIIQRLEDIQIIGEIPMKYWKKNAIECKINIINPEYIIKTSPIEATPKDIEEFKMHIEELLKLGAIRESRSPHRSAAFIVRNHAEEVRGEGKIHLQEHIAKKILQFPDAMNDKKKLQQFLGLVNYARNHINNLAKLGGPLYAKLRKNDREIMAIINAINAFRLYLGFKEFTVRIDCEAICRYYNQLNSKKSSTRRWVLFEDIITGNGYKVIFEHIKGKDNNLPDMLSRLSELQKPIYVVFDGKLPGVYVSFEEIVAQKIDAKLIGGISWKKYKDIDEALSQARKILGINYYLELAAKEYIQKCKKAKGKKTPEIPIKTTIKEEGYSKKPTYKECLTKGVDPLDGEYIHWKIIEKFEEASPQLKKELKEEILKELKQEMDQKFEQMKKAVDEKLEVSFSDLDTMDLGGHGQPDE

SEQ ID NO: 177264 - protein, 1456 aa, Oryza sativa
  Clone ID: PAT_MRT4530_74933C.1.pep
MDISRSLFRRIASRDDNCSDKQKGKNEDIDELEDIAEVDKQLERYQRDTLRAIRPQQIYCMGFFENKNGLYRISREVELSVLTKPVELKIVAKEFENGLKYSGYKYIHQGMYIIGIKGMTRKKLGAKVLITLLDKRWDTIDKAALGFLEGDMNENMLITYIAPDLMMPIKEFIDKMSFGFQTKGYEEFKGTNLLVSIEFIGRLTNRSASKYKINVNDVIENMHSKGITFMSPLKISSEERAGEEWKISDLIESKTLSQPENYISYQNSKGNTSIRFINYKPRTTDDLETEASDRNIIDNRRHSVSEFMEKLDQESEIKYYENKLKEINEEYNNSMKCEWPKIRDKELYFYRELARVKKVKKNEDMAVEIFKNQEQDKHDKEEQNLGKILSEEEQWAENERLFLESYEEEINLINEMENIENEIDNTEQYNDFINTLDEVGLHNLDNAMEAMEVDLGTGKRKRYGEGTVKNEGERERPARAAGKWPPDREEFSYNYIPGQYRHMGTKRRDFEKPVKFQNQRSDGAILNLAAHDPIDWPNIISIWKGLIVQKYIQNQHNIGSKVEDMITYLETFLGESAKILWEQWVEKNPNNYEELKRAGSNPHNFANVVSNIIIAEDPELGYTTLQNERLKEIEKLTLTSWKGIKEFSQHYLYNATTAKQGYNKGIVERYFNKLPDPLGSMIFEEYKKETEGAEINISQAITFVFKQLRKICTGIQAQRCPEIVHTIDDNKAEVSTDMSGIKKIHNQLAYNMEVYINATKYIIDEITIRDLSMINDDIIIGLRFLQQSVQTTVIHEQGITFIPYQNNIPYISEVRKRGGISPKLDNLEVPNLEPEERINEYELSKNIDNYYISNSNIECIGLQSFAPNWYRDIKSKRDIEKIIQRLEDIQIIGEIPMKYWEKNAIECKINIINPEYIIKTSPIEATPKDIEEFKMHIEELLKLGAIRESRSPHRSAAFIVRNHAEEVRGKSRMVINYKRLNDNTIEDAYNIPNKQEWINRIQGSKYFSKFDLKAGFWQIKMAEESIEWTAFTCPQGHYEWLVMPLGLKNAPAIFQRKMQNIFNENQEFILVHIDDLLVFSRTYKEHIAHLEIFFRKVEQNGLILSKKKMEICKEKINFLGHEIGEGKIHLQEHIAKKILEFPDAMNDKKKLQQFLGLVNYARNHINNLAKLAGPLYAKLRKNGMKKSMNYNGIEFFTFGEDNKLKVFPPNTYKFKPKTHIILDEVQECILDNFWYQYNNKREEKGYMLSILNSLAEYFHLMNDIMPTSENNEVIPQKPIYVVFDGKLPGVYISFEEIVAQKIDAKLMGGLSWKKYIDFDEALTQARKILGINYYLEPAAKEYIQKCKKAKGKKTSEIPIKMTIKEEGFFKKPTYKECLTKGVDPLDGEYIDWKIIEKFEEASPQLKKELKEEILKELKQEMDQKFEQIKKAIDEKLEVSFSDLDTMDLGGHGQPDE

SEQ ID NO: 177265 - protein, 299 aa, Oryza sativa
  Clone ID: PAT_MRT4530_74934C.1.pep
ISVFNVVPAPKEIRENIVVYYYLMFGGVHTALVLLFFSVLCFSTRCRTNSDINYMLEIGGNSYANSIYESFLPKDHPKPKMDSTMEYRTKFIRAKYETQDFLKPSLRITSKGSFDATNAVKSVTSSISSASGKHVADDTREFVGELNITVVRGIQLAVRDMLTSDPYVVLTLGEQKAQTTVKPSDLNPVWNEVLKISIPRNYGPLKLEVYDHDTFSADDIMGEAEIDLQPMITAVMAFGDPSRVGDMQIGRWFMTKDNALVKDSTVNVVSGKVKQEVHLKLQNVESGEMELELEWVPIP

SEQ ID NO: 177266 - protein, 764 aa, Oryza sativa
  Clone ID: PAT_MRT4530_74935C.1.pep
MLLSHQYIYIYICIYMYIYIHIYVCIYMYVYIYIYMYVYICMYVYIYICISEVRKRGGARIKPNNLEALNLESEERINEYELSENIDIYYISNSNIECIGLQAFTPNWYRDIKSKKDIEKIVQRLEDIQIIGEIPMKYWEKNAIECKINIINPEYIIKTSPIEATPKDIEEFKMHIEELLKLGAIRESRSPHRSAAFIVRNHAEEVRGKSRMVINYKRLNDNTIEDAYNIPNKQEWINRIQGSKYFSKFDLKAGFWQVKMAEESIEWTAFTCPQGHYEWLVMPLGLKNAPALFQRKMQNIFNDNQEFVLVYIDDLLIFSKTYKDHIAHLELFFRKVEQNGLILSKKKMEICKEKVNFLGHEIGEGKIHLQEHIAKKILQFPDAMNDKKKLQQFLGLVNYARNHINNLAKLAGPLYAKLRKNGQKYFNSEDIKLVRLIKEKVKELKPLELPLEESYFIIETDASQQGWGAILKQRPTKFSAKSEEKICRYASGSYKLKTVNNTDREIMAIINAINAFRLYLGFKEFTVRTDCEAICRYYNQLNSKKSSTRRWILFEDIITGNGYRVIFEHIKGKDNSLPDMLSRLTIFQMKFKSASWIISGTNTIIKGKKKDAKLMGGISWKKYKDIDEALSQARKILGINYYLEPAAKEYIQKCKKAKGKKTSEIPIKMTIKEEGFFKKPTYKECLTKGVDPLDGEYIDWKIIEKFEEASPQLKKELKEEILKELKQEMDQKFEQIKKAVDEKLEVSFSDLDTMDLGGHGQPDE

SEQ ID NO: 177267 - protein, 62 aa, Oryza sativa
  Clone ID: PAT_MRT4530_74936C.1.pep
SRIPFNSSTEALAGAGAATPISIPDHHFFSGELASGDESAAPEAENRMLLPPVKGTVCRVPP

SEQ ID NO: 177268 - protein, 1446 aa, Oryza sativa
  Clone ID: PAT_MRT4530_74937C.1.pep
MDISRSLFRRIASRDDNCSDKQKGKYDDIDELKDVAQVDKQLERYQRDTLRAIRPQQVYCMGFFENKNELYRISREVELSVLRKPVELKIVAKEFENSLKYSGYKYIHQDMYIIGIKGMTRKKLGAKVLITLLDKRWDTINKASLGYLEGDMNENMLITYIAPDLMMPVNEFIDKMSFGFQTKGYEEFKGTNLLISIEFIGRLTNRSASKYKINVNDVIEKMHSKGIKFMSPLTIDSEERAGEKWPISEFIKNKTLSQPENFISYQDSKGNVSIRFTNYKTRASDDLDAESSDRNIIDNRRHSISELMEKLDHESEIKYYEDKLRDIADEYNNSMKSEWPKIRDKELYFYRELSRIKKQKKEKSLAIETPRTQEIKIEQIKSEEPREEIQKFDKVLSEEEQWEVNEKLLLESYEEENNLIEEIENIEEEDNAEQYNDFIDSLDEVGLHNLDNAMEAMEVDLGTGKRKRYGESSVKNEGERERPARAAGRWPPEKEEYSYHYIPGQYRHMGTKRRDFEKPIKFQNQNSDGAILNLAAHDPIDWPNIISIWKGLIVQKYIQNQHNIGNKVEDMITYLETFLGESAKVLWEQWVEKNPNNYEELKRAGSNPHNFANIVSNIIIAEDPELGYTTLQNERLKEIEKLTLTSWKEIVHTIDDNKAEVSTDMSGIKKIHNQLAHNVEVYINGTKYIIDEITIRNLSMISDDMIIGLRFLQQSVQTTVIHEQGITFIPYQNNVPYISEVRKRGGARIKPDNLEALNLESEERINEYELSENIDIYYISNSNIECIGLQAFAPNWYRDIKSKKDIEKIVQRLEDIQIIGEIPMKYWEKNAIECKINILNPEYIIKTSPIEATPKDIEEFKMHIEELLKLGAIRESRSPHRSAAFIVRNHAEEVRGKSRMVINYKRLNDNTIEDAYNIPNKQEWINRIQGSKYFSKFDLKAGFWQVKMAEESIEWTAFTCPQGHYEWLVMPLGLKNAPALFQRKMQNIFNDNQEFVLVYIDDLLIFSKTYKDHIAHLELFFRKVEQNGLILSKKKMEICKEKVNFLGHEIGEGKIHLQEHIAKKILQFPDAMNDKKKLQQFLGLVNYARNHINNLAKLAGPLYAKLRKNGQKYFNSEDIKLVRLIKEKVKELKPLELPLEESYFIIETDASQQGWGAILKQRPTKFSAKSEEKICRYASGSYKLKTVNNTDREIMAIINAINAFRLYLGFKEFTVRTDCEAICRYYNQLNSKKSSTRRWILFEDIITGNGYRVIFEHIKGKDNSLPDMLSRLPIFQLPGVYISFEEIVAQKIDAKLMGGISWKKYKDIDEALSQARKILGINYYLEPAAKEYIQKCKKAKGKKTSEIPIKMTIKEEGFFKKPTYKECLTKGVDPLDGEYIDWKIIEKFEEASPQLKKELKEEILKELKQEMDQKFEQIKKAVDEKLEVSFSDLDTMDLGGHGQPDE

SEQ ID NO: 177269 - protein, 55 aa, Oryza sativa
  unsure (1)..(55): unsure at all Xaa locations
  Clone ID: PAT_MRT4530_74938C.1.pep
DKKNELRERIDAPQQQNKEKNXNVYKGNFNLKPPQEGKWGLVKKMRRRGSKGNSG

SEQ ID NO: 177270 - protein, 73 aa, Oryza sativa
  Clone ID: PAT_MRT4530_74939C.1.pep
HFARLDAFTASCQRVRSSSPPSSTKYGACWISWKLSYRDIFMSLGLRIYRGHLPMSVGCGPRTHELLHMHAVP

SEQ ID NO: 177271 - protein, 380 aa, Oryza sativa
  Clone ID: PAT_MRT4530_7493C.1.pep
MELAPFAAASSSSSSSTVTNTCKLRLRLSYTHCSIGFAPRVRRWIRAAAEGRGGDQRRSGRLAADGPRVVEVAAPPAAPVVTGGGGGGGGFAARDAELAMWERLGAVVRLSYGIGIYAAMALTGRFICQMAGIDCTGGFHPSLSALVEGLGYAAPPIMALLFILDDEVVKYSPHARAIRDVEDEELRSFFYGMSPWQFILIVTASSIGEELFYRVAVQGALADIFLRGTELMKDARGIASLSGMVPPFVPFAQTFAAAITAALTGSLYYVATAPKDPTYVVTPAMRSNTGRENLKKLFAAWYERRQMRKIYSPLLEGILAFYLGFEWIQTDNILAPMITHGIYSTVVLCHGLWKIHDHRRRLRQRIQEIRQEGTTNSDTL

SEQ ID NO: 177272 - protein, 36 aa, Oryza sativa
  Clone ID: PAT_MRT4530_74940C.1.pep
LRMCLRNRNLMWLTILFLAYVVRQYLQAQGFHLPMT

SEQ ID NO: 177273 - protein, 103 aa, Oryza sativa
  Clone ID: PAT_MRT4530_74941C.1.pep
ATPAGSTAAMLSAGGFVMPISSHELQYMIREPISPRDADKPLLHGLVKQGQHILVVWYNEEGAVYFDGSHVMHSIQHGDTLEISSDAPILKVILPENLLKQGS

SEQ ID NO: 177274 - protein, 63 aa, Oryza sativa
  Clone ID: PAT_MRT4530_74942C.1.pep
LIAPSEFNRPIARILRFTLIGVNVWYACKCTRSRNSTQGQTQRRPDDALFGRDEDLSTLGGSL

SEQ ID NO: 177275 - protein, 50 aa, Oryza sativa
  Clone ID: PAT_MRT4530_74943C.1.pep
MSRGDAEEDIGPSVTLPLRSPSLCIMAVMTTVWHGDDRGIKAATMVAGVQ

SEQ ID NO: 177276 - protein, 439 aa, Oryza sativa
  Clone ID: PAT_MRT4530_74944C.1.pep
MASAERRIRMWWRTAGRPKHLWGRRSMLYMGHSRIYMDRYYDPIELHGQPPPLLMIPGGGGGGGGGGISPYLVQSQHGHGGGVDGMEMEEGGGFMGEQPQCHPLLYNLSVLKDRVQQLHPLVGLAVAHNAHAHGPLDVSAADAIIQEIVAAASSMMYAFQLLCDLGTAPTTAPSQETAAASAVVVKNNDHAADAGQMEDDHLMQQQWQQNGSRQHDYSSHAHAPPVFHSETAAPAGATSATDTIIELDAAELLAKYTHYCQVCGKGFKRDANLRMHMRAHGDEYKSKAALSNPTKLLAKGGDETMAAAARKYSCPQEGCRWNRRHAKFQPLKSVICAKNHYKRSHCPKMYVCNRCGRKHFSVLSDLRTHEKHCGDHRWLCSCGTSFSRKDKLIGHVSLFAGHQPVMPLDAPRAGKRQRSSSASVAGNIDDTTGIGMGAA

SEQ ID NO: 177277 - protein, 66 aa, Oryza sativa
  Clone ID: PAT_MRT4530_74945C.1.pep
MTPHARGLRRPHRMPGASPLRGSCGPGYASMTLPRIRGLFTYLVIRALYADSPRTRGLRGGWGGPE

SEQ ID NO: 177278 - protein, 101 aa, Oryza sativa
  Clone ID: PAT_MRT4530_74946C.1.pep
MDASAEEGVLGSSCRFVLELDPLLKMPENHFFMATTKSKGTRLLERGGAITAIYDMWDTKTVAPQKDRPNGHLPGLANLLVGPTGPGFRGVDSTASWSGTH

SEQ ID NO: 177279 - protein, 125 aa, Oryza sativa
  Clone ID: PAT_MRT4530_74947C.1.pep
INKYIYIYIYIYICVCVCVCVCVCVCALAPHTHTHIYIYIYIYIYIYIYIYIYIYIYIYIYIYIYIYVCVCVCVCVCVYVCTYIYIYTYIYIYIYTYIYIHIYIHIYIYIYIYIYIYLIRKYVRF

SEQ ID NO: 177280 - protein, 588 aa, Oryza sativa
  unsure (1)..(588): unsure at all Xaa locations
  Clone ID: PAT_MRT4530_74948C.1.pep
YCTAYAVCSKSSSRRSNGSNDVTGWSSRIGNVPHSWXDDDFRKACXRNVGPGVLKGALMKVSSANRNRGYGFRQXHARGSAEYARQEMSSPTFKLDSNAPTVSWADPKNNDSGSTSQVKSVYVKNLPKNVTQAQLKRLFEHHGEIEKVVLPPSRGGHDNRYGFVHFKDRSMAMRALQNTERYELDGQVLDCSLAKPPAADKKDDRVPLPSSNGAPLLPSYPPLGYGIMSVPGAYGAAPASTAQPMLYAPRAPPGAAMVPMMLPDGRLVYVVQQPGGQLPLASPPPQQAGHRSGTGGRHGGSGGRYGGGGGSSGSSRPEECVSETRLYLRIYQYFPISQSAESDGALYRQFTPVSHMDYEISGPESEVDSEVWLGWVAQPQIPTSLDDFLPSIRTTCTHTHTCNPPGPSATEHTHTCYHTHTHVFSSDDDSCGGDKAKPKKSRKPLGNREAVRKYRQKKKAHTAHLEEEVKRLRVINQQLVKRLQGQAALEVEVVRLRSLLVDVRSRINGALGSCPIQAQCGVDNVLGCDGMAQCFAGKPELGVRQSCAPSTVNCHISSDSGQNLVVPHALSPSDVIGSFMVSSTSKDE

SEQ ID NO: 177281 - protein, 123 aa, Oryza sativa
  unsure (1)..(123): unsure at all Xaa locations
  Clone ID: PAT_MRT4530_74949C.1.pep
MSCPYLNSMIGPFCQGYGLGIPFTLRYTLHIDMAYPRSCGYFLYILRKHFTESTDGKNPTRTELGRWRIVXGLIPPTSTWRPPDLRYKRDPXGEGLGHRISEPTQPTQPTKPEPXGAKSSRAS

SEQ ID NO: 177282 - protein, 246 aa, Oryza sativa
  Clone ID: PAT_MRT4530_7494C.1.pep
LAPSHPCRKGQGGEFGIVVSTTALKDFGGNTSETKGVLNVELTVGSKTVPTTFFVIGGKGSYSLLLGRDWIHANCCIPSTMHQCLIQWQGDKIEIVPADRSVNVASANLALWEMDECPIVINSQLKMESPSYYFEGVVEGSNVYTKDIVDDLDDKQGQGFMSADDLEEIDIGPGDRPRPRFISKNLSSEFRTKLIELLKEFRYCFAWEYYEMPGLSRSIVEHQLPIKRGVRPHQQPPRRCKADMLE

SEQ ID NO: 177283 - protein, 169 aa, Oryza sativa
  Clone ID: PAT_MRT4530_74950C.1.pep
MEATTSSLLVRPVDTRLSAASLPIVVRARRRVAVVTAAAPERKPAAAASSSNYVVVPLDAAPSGITRPLVEILRDLNKRVPDTVVRSSRRRASPSDPVIPWYGTTYTSLAFACATGKALQILLPYTFACNKEHSRYSGSCTASTNDAQILTFLVAHSQESRHKKKFVPC

SEQ ID NO: 177284 - protein, 87 aa, Oryza sativa
  unsure (1)..(87): unsure at all Xaa locations
  Clone ID: PAT_MRT4530_74951C.1.pep
MENHHLYDGPWEYSISIGWLLPHLTCXKQPNASGYACVSTXSHCVPMNSTSGYVGYRCNCSPGFXGNPYIPNGCTDIDECPIPRNLP

SEQ ID NO: 177285 - protein, 96 aa, Oryza sativa
  Clone ID: PAT_MRT4530_74952C.1.pep
KNSFLSPCSTVHITWPCPSLPCLRPARRASPCSPCTCPDSHRTYPVAYKLRERMSPSAGKDDTYRMLHVRLLPVAGAGVVALAVAAHQRRCYDFPR

SEQ ID NO: 177286 - protein, 77 aa, Oryza sativa
  Clone ID: PAT_MRT4530_74953C.1.pep
WGKLTGPVTIPPPFYSRSFCLLVNHRTLKGPEIPVWNRNQIGSMFSVLYFEKRKSSLEGDILIICSKNLKGVFFLGE

SEQ ID NO: 177287 - protein, 80 aa, Oryza sativa
  Clone ID: PAT_MRT4530_74954C.1.pep
HVHAVAATSPPISETCPPRSRRGDDVEAGIDDATLEAFTAVVYKNYGDADVLCVLPNSGNLFQLTPLVKVTPLSLGIALS

SEQ ID NO: 177288 - protein, 48 aa, Oryza sativa
  Clone ID: PAT_MRT4530_74955C.1.pep
QPGLYQYSITFIYLQPLPFPPKDELSVTKPTTPPKLQVHSLSRCPFLT

SEQ ID NO: 177289 - protein, 135 aa, Oryza sativa
  Clone ID: PAT_MRT4530_74956C.1.pep
MDRATPKLEMAGAWGTHYPVDLKTKGVKPSGGNDLEETGVKGCHHGYHIVIPSGLMSSPLSNCHPIPGDKCRFLSSIGTGNVGEDGDGVRTATAAVKELAGRTETSGEEVRRKTERTWAVTSGDDITKLDCHGEI

SEQ ID NO: 177290 - protein, 110 aa, Oryza sativa
  Clone ID: PAT_MRT4530_74957C.1.pep
VCPLHLSRCLASADYIEELLWIQKSEALSPSWMDDGSIFYSFTSHTPSEFIHFLALSTRLKLLERSISKTCAWYGGYHFIFFTLKENLYFLLLDVELAYLEINFDSVRDY

SEQ ID NO: 177291 - protein, 117 aa, Oryza sativa
  unsure (1)..(117): unsure at all Xaa locations
  Clone ID: PAT_MRT4530_74958C.1.pep
PPKVKCPPKXYHPNIXLNGNVCXNTLREHXKPVLIFHPIVYGLNLLFIQPNPEDPLTHDAPAVLRADPQKFRRNVQTPMSQRYVDRVHFPRCKLRSVSAGTLWLASSPLTPEYRSAI

SEQ ID NO: 177292 - protein, 526 aa, Oryza sativa
  Clone ID: PAT_MRT4530_74959C.1.pep
MSLRPSERVEVRRNRYKVAVDAEEGRRRREDNMVEIRKSRREESLLKKRREGLQAQAPVPASAATGVDKKLESLPAMIGGVYSDDNNLQLEATTQFRKLLSIERSPPIEEVIQSGVVPRFVQFLTREDFPQLQFEAAWALTNIASGTSENTKVVIDHGAVPIFVKLLGSSSDDVREQAVWALGNVAGDSPKCRDLVLANGALLPLLAQLNEHTKLSMLRNATWTLSNFCRGKPQPSFEQTRPALPALARLIHSNDEEVLTDACWALSYLSDGTNDKIQAVIEAGVCPRLVELLLHPSPSVLIPALRTVGNIVTGDDAQTQCIIDHQALPCLLSLLTQNLKKSIKKEACWTISNITAGNKDQIQAVINAGIIGPLVNLLQTAEFDIKKEAAWAISNATSGGSHDQIKYLVSEGCIKPLCDLLICPDIRIVTVCLEGLENILKVGETDKTLAAGDVNVFSQMIDEAEGLEKIENLQSHDNNEIYEKAVKILEAYWMDEEDDTMGATTVAAPQGATFDFGQGGGAAQFK

SEQ ID NO: 177293 - protein, 1626 aa, Oryza sativa
  Clone ID: PAT_MRT4530_7495C.1.pep
MAEKPPASPSSASPGSLKEKIQQLGLSEINEGNIVTITPDKLTPDQQKDFDSMMQQARNQFLNSFMQTRKGTVVQKYKVKVVADIPGTGSSKDGEVQQVPDGTTQPCDKGVADGFQGIQGDGSQGVQGVGVQGDGSQGVQGGNLNQDGNAAQLQFNNFQDQVDYVVHHALINQSGILVNTLSNMVKKMVDGSMAEYQATGSVYLLGGVFQNYRPLITDNQPAAQSIPPNAPSAQSTAPVSAPAPAALPSAPGQLVNPRLLLGQHAVNRVVPEHLVHHVQPDQTVIPQVVPEHLPMTQQPQGTPQQQPWADMIAGVMKEQFGLRPKDAGNLYRQPYPEWFERVPLPNRFKVPDFSKFSGQDSTSTYEHISRFLAQCGEASAVDALRVRLFRLSLSGSAFTWFSSLPYGSINSWADLEKHFYSYFYNGVHEMKLSDLTAIKQRHDEPVHEYIQRFREMRNKCYSLSLTDAQLDDLAFQGMIPPIREKFSSKDFDSLSHLTQKVTLHEQRFAESRKNSRKVNHVCPYMYGLDDDGDDSEIATAEWVRSKKVILCQWVKNSGKEERYDFDITKADKIFDLLLREKQIQLPAGHTIPSAKELGKKRQQIQAAIEDGKIRFDDSKRPMKVDGNPFPVNMVHTTGQTANGGRARGFQSNSAKIIRKYQKRYDRQQEKHYEENDDGFDPHWGCEFFRFCWNEGMRLPSIEDCPGCSDITKSSSRSCNRGNRLRQKRVPVHQRLGPVNQDRSQEDNENRKTQWCPSEFGVKQADVDEVEEESAKLTLSPEQAVFEKPEGTENRHLKPLYINGYINGKPMSKMMVDGGAVVNLMSYATFRKLGRDAKDLIKTNMVLKDFGGNPSETKGVLNVELTVGNKTIRTTFFVIDGKGSYSMLLGRDWIHANCYIPSTMHQCLIQWQGDKIEIVPADRSVNVASADLALWEMDDLDCLSGKVWDGDFLKMENPSYYFEGIVEGSKVYTKDIVDDLDNKQGQGFMSADDLEEIVIGPGDRPRPTFISKNLSSEFRTKLIKLLKEFRDCFAWEYYEMPGLSRSIVEHRLPIKPGVRPHQQPPRRCKADMLEPVKAEFKRLYDAGFIRTCRYAEWVSSIVPVIKKNGKVRVCIDFRDLNNATPKDEYPMPVADQLVDAASGHKILSFMDGNTGYNQIFMAEEDIHKTAFRCPGAIGLFVWVVMTFGLKSAGATYQRAMDYIYHDLIGWLVEVYIDDVVVKSKEIEDHIADLRKVFERTRKYGLKMNPTKCAFGVSAGQFLGFLVHERRIEITQRSVNAIKKIQPPENKTKLQEMIDKINFVRRLMHYLLSNECTVICKADVVKYMLSAPILKVRVGKWIFSLTEFDLRYESPKAVKGQAIADFIVDHRDDSIDSVEIVPWTLFFDGSICTHGCGIGLVIIFPRGVCFEFAYTIKPYATNNQAEYEAVLKGLQLFKKVEADAIEIMGDSLLVISQLAGEYECKNDTLIVYNEKCQELMKEFRLVTLKHVSREQNIEANDLAQGASGYKPMIKDVKIEVVVLTSDDWRYDVHQYLQNPSQSASRKLRYKALKYTLLDNELYYRTIDGVLLKCLDADQAKVAIGEVHEGICGTHQSAHKMKWLLRRAGYFWPTMLEDYFKYYKGCQDC

SEQ ID NO: 177294 - protein, 119 aa, Oryza sativa
  Clone ID: PAT_MRT4530_74960C.1.pep
MYIEFYDVMSVPMAIALSGQPLLGQAVMVKPSEAEKNLVQSNATSGGAASGGARKLYVGNLHSNITEDQLRQVFEPFGHVELVQLPLDAMTGLCKGYGFIQFARLEDAKAAQSLNGQLD

SEQ ID NO: 177295 - protein, 79 aa, Oryza sativa
  Clone ID: PAT_MRT4530_74961C.1.pep
GPPNKFSVFFFNPFKEWVFSRVPEAPPPSFWQMAKNFSPFGVFFPLFFPARAPLNPPVGNPKISQINPFLFAFWAPPFF

SEQ ID NO: 177296 - protein, 67 aa, Oryza sativa
  unsure (1)..(67): unsure at all Xaa locations
  Clone ID: PAT_MRT4530_74962C.1.pep
CIWYSYSVALIWHELRWANSEQLHSCYLPARVVCLESVYVSTCSFSECLLSARCIQXSRSPHKSVPS

SEQ ID NO: 177297 - protein, 125 aa, Oryza sativa
  unsure (1)..(125): unsure at all Xaa locations
  Clone ID: PAT_MRT4530_74963C.1.pep
EIGTIITNNSICQDRASYGTXAVAEDINSMFFATTSSQRSDPRTTTSNDFXWSRYNYDWSSASNVAILVPXLKTVERLLLVLKPVSHSDLSYLHFKWSSYSYXLVFDQQCSDSPTTSALNSRANY

SEQ ID NO: 177298 - protein, 62 aa, Oryza sativa
  Clone ID: PAT_MRT4530_74964C.1.pep
NIGNTLNETFLMEHFTEAIYCNGLRGGDTWQERRRTRGEGGARGGGGWFFYPLKLPPFPLPS

SEQ ID NO: 177299 - protein, 511 aa, Oryza sativa
  Clone ID: PAT_MRT4530_74965C.1.pep
MDAAAASSSSSSSATMAAAAASAAEASLSGSPASSRNARHRQRKGVRLRMLRRRGRQPVEAERAPGDGGGGAVQEDLALPLGMSFAAVLAQPYALIVQVINTKNISGQRLHPDFLSKIYGDSSNSFIKNFEKSFSSTFRTLHLVNEIPVNERSHIPECSFKHDDSVAVDSLSSSDLQNQTNRIEHDLVNTVESQLVLFASDNQQLTHLRHSRSSPEADNRILNAIDRSNELKEFEIGLTMRKLQLKQSQLALSSHSHMLEKIKLSFGFQKASFKGEKFKTRMQETRDAEILRTLIDFLVSAVIVMSACFGYGTYIYSYQRITDVTSACSATSKGSKSWWMPNSVSNFSSGFLFLRCHVIAVTRMCFGILMILAIAWLAFQRSSTTGSNMPITFNLILLGIICGFAGRFCTNTLGGDGNTWLMYWEVLCSIHLLGNLFPSLLYHVLHGPISVSHREQVVWLPYWVRRCLFYAAVGLILPALTGLLPFASLSDWKDHFVEEIKSIVIGDKIEA

SEQ ID NO: 177300 - protein, 183 aa, Oryza sativa
  Clone ID: PAT_MRT4530_74966C.1.pep
MDAAAASSSSSSSATMAAAAASAAEASLSGSPASSRNARHRQRKGVRLRMLRRRGRQPVEAERAPGDGGGGAVQEDLALPLGMSFAAVLAQVINTKNISGQRLHPDFLSKICTSAVKESLTNIYGDSSNSFIKNFEKSFSSTFRTLHLVNEIPVNERSHIPECSFKHDDSVAGDSLSSSDLQN

SEQ ID NO: 177301 - protein, 125 aa, Oryza sativa
  Clone ID: PAT_MRT4530_74967C.1.pep
NLGQPPPGSGPPPPQKTPRVFGPPQPPKKKPPPPPSFFFPEMVVIKIFLAQSPEKPSNFPGPPVGGPPPGNKFFFSTVPKRGPRFFTRGGAPTLFFPPKKTNPHPQMACKLGLLSPPSFFRGPPP

SEQ ID NO: 177302 - protein, 110 aa, Oryza sativa
  Clone ID: PAT_MRT4530_74968C.1.pep
YPPEEHGFGFMFGNHQLAGYPPHEKITTSSLSLIKLPFHNNGHGRLEELLRSDHRGIAGTGHFVRTGGLLGIHLNLHHLRGHHVVEGGPPRAEDDPALRGCREGPLGDGL

SEQ ID NO: 177303 - protein, 121 aa, Oryza sativa
  Clone ID: PAT_MRT4530_74969C.1.pep
LSSPFGRIGGDGGRVEWRRIWGAGRPARGGGLPEGVGDGDVGGGVHRDDGGAVVAGREIRAGRELAAAVEPERVRHHLLLSGSSSAGGGGGAVPPRQPHPAPEHPTAAVASLQDTRQQRPR

SEQ ID NO: 177304 - protein, 299 aa, Oryza sativa
  Clone ID: PAT_MRT4530_7496C.1.pep
MPLTNITGGAIIWPPAQEAPPSAAAAAPAPPDDAAAACAAWRVGDAEEKKLNERLGMRRNEDKIGERSFRLDRCLHQAPPDVGIPIRLYCRPGDRPTSSPPLRLPPPSWQARRRWPVVSGAGRHLATRICTIVAACGLDALRRWAERLLDVDLVYGPCRSSLRRPLPRRHLCVSDIGIDSASISSFSPAHLRLDHPFRCPATTTSVTNRYRACVYAINLRVAAALPPWAAVPPPVVHLHWLLEHGEAPSSAWPHYRWSSRRYIDIGPHLCRPFGSQRHPSRRLHRRSCIDILVVRIGHL

SEQ ID NO: 177305 - protein, 117 aa, Oryza sativa
  unsure (1)..(117): unsure at all Xaa locations
  Clone ID: PAT_MRT4530_74970C.1.pep
EPCFTSRALAVSLSLXSTTMCXSLLVSTLLHAFVWRSLFPNDLAIAITKDRQNGAFKPHGKGRKAGKRVYDIKRWAKQAPLSSRVVHHQEQLGGQGRRGENRMKRNSEIQNQELMHV

SEQ ID NO: 177306 - protein, 602 aa, Oryza sativa
  Clone ID: PAT_MRT4530_74971C.1.pep
MAAGDLLLRTQSGLPVLARAFPSCLCLRVPARRRRGAPPLTAAKVDVADAVGRRVRSGGAAVPKRRRSRRDAEEEEEEGLAFSRVVTGRGRGVREEGVAEGEAPEFDAAKSGDESGGVDGSYLSDTRFDQCTISPLSLKAVKDAGYERMTQVQEATLPVILQGKDVLAKAKTGTGKTVAFLLPAIEVLSALPNSRRDQLRPSINLLVMCPTRELAIQVAVEAKKLLKYHRSLGVQVVIGGTRLTQEQRSMQANPCQVVPMNYRQILVATPGRLKDHVENTPGFSTRLKGVKVLVLDEADRLLDMGFRRDIERIIASVPKERQTLLFSATVPEEVRQISHIAMKKNYKFINTVKDGDEETHAQVSQMFMIAPLDLHFPILYDVLKKHIAEDADYKVIVFCTTAMVTKLVAEVLSQLKLNIREIHSRKSQSARTKVSDEFRKSKGLILVSSDVSARGVDYPDVTLVIQVGLPADREQYIHRLGRTGRKGKDGLGLLLLAPWETYFLNSVQDLSVSQAVVPTIDSSIQTGVKDALGRVETKSKESAYQAWLGYYNSNKTIGRDKSRLVRLAEEFSQSMGLAIPPAIPKLILRKMGLNNVPGLRSV

SEQ ID NO: 177307 - protein, 536 aa, Oryza sativa
  Clone ID: PAT_MRT4530_74972C.1.pep
MMSGGPSDATHRKRRRRRGPKGSGVDGPSIPRAVTTNGAGPEEEEVVEGKAMELDAGMSAAEVGGVVGSHLSETRFDQCPVSPLSLKAIKDAGYEKMTQVQEATLPIILQGEDVLAKAKTGTGKTVAFLLPAIELLSTLPRSPSINLLVICPTRELANQVAAEARKLLKYHRSLGVQVVIGGTKLPQEQRSMQSNPCQILVATPGRLKDHLENTPGFSNRIKGVKVLVLDEADRLLDMGFRRDIEKIIAFIPKERQTLLFSATVPEEVRQISHIAMKRGYKFINTVKEGDEETHSQVSQMYMVAPLDLHFSILYNVLKKHIAEDADYKVIVFCTTAMVTKLVAEVLSQLKLNIREIHSRKSQSARTKVSDEFRKSKGLILVSSDVSARGVDYPDVTLVIQVGLPADREQYIHRLGRTGRKGKDGLGLLLLAPWETYFLNSVQDLSVSQAVVPTIDSSIQTGVKDALGRVETKSKESAYQAWLGYYNSNKAISRDKSRLVRLAEEFSQSMGLAIPPAIPKLILRKMGLNNVPGLRSV

SEQ ID NO: 177308 - protein, 82 aa, Oryza sativa
  Clone ID: PAT_MRT4530_74973C.1.pep
MVPAQPSHGTDGPAFWICGPSRSRVSVPRDGETEDTRSGIPLMDLVEGAQNEDEEDVILNQGRLDGPWRQRDAKIESELNVR

SEQ ID NO: 177309 - protein, 45 aa, Oryza sativa
  Clone ID: PAT_MRT4530_74974C.1.pep
MAPFNYEPIYLWCLYTEEQPSRELNDLLDATPMEPHLVEINSEDN

SEQ ID NO: 177310 - protein, 106 aa, Oryza sativa
  Clone ID: PAT_MRT4530_74975C.1.pep
IYSCTAQLTGLHLIRVQPSHNKQAAPRKPCQQSHYPATNALDRGGLQIPTIPEVRRLPRMGDQMGWFNHPHMHCRWDRGDTTPYYMHSLRNSIMTTVQLYDNGPRY

SEQ ID NO: 177311 - protein, 87 aa, Oryza sativa
  unsure (1)..(87): unsure at all Xaa locations
  Clone ID: PAT_MRT4530_74976C.1.pep
RSGIPXSTHASGDAHFWSAWCRSSVSSCSNPGETIKDPGGLPCHLRGHETMHSSVDEALLLNVPHNQIKMHLVVCFFLFFVCIRTFI

SEQ ID NO: 177312 - protein, 105 aa, Oryza sativa
  Clone ID: PAT_MRT4530_74977C.1.pep
RVPLPPPFASYNTISRAAPSRANSFRSMPSHPRDEAPVDSAITASVTSPPSVDARAAEPQLCPVCLSKPRDMAFGCGHQTCAECGPQVEHCPICRRPIDTRVKLY

SEQ ID NO: 177313 - protein, 1001 aa, Oryza sativa
  Clone ID: PAT_MRT4530_74978C.1.pep
MATVAAAASPFAAPHEMMARPAAAAPEATMMDLGQLLRLTDFDKIANLGDGASGVVAKVLLRGCGSSAVFALKTAHYCGGGAEVEVEALRRVAAGAGPSGSWSPHVVRCHAVFRCAGGEPAMLLELMDAGSLGRVLAARRGGEGRRGLPEPALAEVAARCLAGLAHLHSRGVVHLDLKPDNLLASARGDVKIGDFSVSRIFLGGAGERLRVPVAAGSTAYLSPERFEPNAHAGPRGACAADVWALGVTVLELFLGRCPILPVGERPSWERLKKAICDGEAPSLPASAAASAELRGFVASCLHKDPRRRATVAQLLAHPFVARRDGEACRRQLREIIVETIARSRTYGTRRSLAAAGIYSAPAFLAYLAAEASPVHPLAARNKARAAATLVQAWRARRQPHHGRAYHGSPPRAPAHRPHPSLSSASLTPASAAAVAVASTSAAGGGGGGGEAEYEVSDDHRAARERHERVVQELLQRRRTFAMAVPTNDFAVRARLRRLGEPVTLFGEREMESQDRLRALMVCLEADGHLDRLVRAQEKEQGGASAEEEELAATDCRWRTARLRPARTEICARQWQRTPEDSGRRIWVEVDRGKRSHGGMRANSGRPVVAPTAAANCRRRSRPRAAPIVAPPSPPPPPLCRPWRDGHEEDGEGRKKTEMERMDRKGKIAVVWIKLTHSKNKTSAQCDTAAAVVASNSRSPERARCGAERPDRGAGDGAGSGRSDSGRQLRPSYWPAGGPGERWAEQATARGAAGWPAGQSSEAGGDLAIVRVRPSSPVTLMELSSHRPNSKTLVEAGVVPDMVEELYIRKVDDEPLRNKAMAVAVLANSDTTVVNKEGHVLTSKYSIYDFVHMLKCFIPDELNASTSASSVSPRTPIRSPPWSRSSRRTTGATPSWSSRTEALGVAATRLLITLSVHMGHTIAERLRKMQSAGASEGGRRGAEGRSATGGSRSWAAACRRCHAPPCEPPWRGEERGREMVRGGEEVADMWDPRGSHAESTAI

SEQ ID NO: 177314 - protein, 35 aa, Oryza sativa
  Clone ID: PAT_MRT4530_74979C.1.pep
LYPPPFAHSPPQHQQHNSCPSFMEGCLAALSFCCL

SEQ ID NO: 177315 - protein, 1403 aa, Oryza sativa
  unsure (1)..(1403): unsure at all Xaa locations
  Clone ID: PAT_MRT4530_7497C.1.pep
MAGRAATWGRGVGAWRGAEKAATRTVSAAVAVVGRAARGRGRPDRLSCIGFNLQQEKYKVKVVADVPGTSSSKDGEGKQAPNGSAQSSDKGAIDGSQGDQGDGSQGVQGVQGDGAQGVQGEGLNQGSNVAQLQFNNFQDQVDYVVHHALINQSGILVNTLSNMVKSMVDGSIAEYQATGPVYLQGATVDSANATKATGCTADSANTSDPTGCAANSVDATRTTGFATNSASAIKATGHSADSTARLDECIGWVPDFSKFSRQDSTSTYEDINRFLAKCGEASAVDALRVRLFQLSLSGSAFTWFSSLPYGSINSWADLEKQFHSYFYSGIHEMKLSDLIAIKQRYDEPVHEYIQRFREMRNKCYSLSLTDAQLADLAFQEVCRSHEELKKVNHVCPYIYGSDNDDDDDSEIAAAEWVRSKKVIPCQWVKNSGKEERYDFDITKADKIFDLLLREKQIQLPAGHTIPSAEELGKKRYCKWHNSGSHTTNDCKVFRQQIQAAIEGGKIKFDDSKKPMKVDGNPFPVNMVHTAGRTADGGRARGFQGWEFLRFCWNEGMRLPSIEDCPGCSDIAESSSRSYSTGNRLRQTRVPVHQRLGPVNQDRGQEDNENMKTQLCPSEQAVFEKPQGTENRHLKPLYINGYVNGKPMSKMMVDGGAAVNLMPYATFRKLGRNAEDLIKTKMVLKDFGGNPSETKGVLNVELTVGSKTIPTTFFVVDGKGSYSLLHGRDWIHANCGIPSTMHQCLIQWQXGDKIEIVPADRPVNVASADLALWEMDGLNCLSGKVWDGDFLKMENPSYYFEDVMEGSNVYTKDKVDDLDDKQGQGFMSADDLEEIDIGPGDRPRPTFIKRDTFSVIFVGRLMHYLLSNECTVICKADVVKYMLSAPILKGRVGKWIFSLTEFDLRYESPKAIKGQAIADFIVDHHDDSIGSVEIVPWTLFFDGSLFKEVEADAIEIMGDSLLVISQLAGEYECKNDTLMVYNEKCQELMKGFRLVTLKHVSREQNIEANDLAQGASGYKPMIKHVKVEVATITADDWRYNAKVAIGEVYEGTCGTHQSAHKMKWLLRRAGYFWPTMLDDCFRYYKGCQDCQKFEAIQRAPASAMNPIIKPWPFRGWGIDMIRMINPPSSKGHKFILVATDYFTKWVEAIPLKKVDSGDAIQFVQEHIIYRFGIPQTITTDQGSIFMSDEFVQFADSMGIKLLNSSPYYAQTNGQAEASNKSLIKLIKRKIPDYPRQWHTRLAEAYRMACHGSIQVPPYKPIYGHEAVLPWEVRIGSRRTELQDDLTADEYYNLMADEIEDLVQSRMRALAKVTRDKERITRHYNKKVVPKDFSEGELVWKLILPIGTRDSKFSKWSPNWEGPFQIYKVVSKGAYMLQGLDGEVYGRALNGKYLKKYYPSVWVNA

SEQ ID NO: 177316 - protein, 76 aa, Oryza sativa
  Clone ID: PAT_MRT4530_74980C.1.pep
MTKFLINFIALPRVVTVMSPVVCSAQSDRSVYEGYFQLALPLLLGLVDGIFKAGKYSHNWIISVNNSTCNSGFIQD

SEQ ID NO: 177317 - protein, 112 aa, Oryza sativa
  Clone ID: PAT_MRT4530_74981C.1.pep
MNGQMCTGTEQYQYQPRGADPEISRQERTSPWSRPRRPPPAPRADRGERGTWPSPQRARSPSSKEVAAEPQGAALLNPKPVSPPAGFWGSGDSGLGGSGEEEGDPGAAVAAK

SEQ ID NO: 177318 - protein, 592 aa, Oryza sativa
  Clone ID: PAT_MRT4530_74982C.1.pep
MAPEYSAQPKKSNKNDIFSLGIIIIQIMVGHKGYSKYGEMSSTQQFVDLVANNWRNRIGDTSMHAKEECQQVKKCVEIAVRCVEVDRHSRPAINDIIHELKQTEIYTRAVSSSQDQAKVAKIGLWGGAGGSSHYDIEVAPRRLESLIISSGEVIYSLEFSYIDHSGQQHTSGTWGGYGPNKGNKRTKIQLGLIEYVTEVSGTIGPFDRAPAGVITSLTFITNKGSYGPFGEVRGTPFHIPVQDNGSIVGFFARAGWYVDAFGIYVNPKQKTVEDDDDEDSLAKIGPWGWNGGSHRDIKVAPRRLESVTIHSGNVIDSLEFSYSDRDGQKHSIGPWGGLGGTAYTIELGPLEFLTGICGTMGPFNEAPDRDVVTSLTLITNARRRGPFGRGGGSPFQIPMRGNGSIVGFFGCADSFVHAIGVYANPHLQEAPAPQTGLTRIGPWGRSGGESHYVDAPEPHRLVSVTIRSGDVIDSIEFSYADHDGSEQVVGPWGGPGGNAYKIELMPLESLQGITGTFGPLDAASPDTVVITSLTFSTNQCLSYGPFGQGAGGGGTPFTAPGESDGCIVGFFARAGCYLDALGVYTRTDAQLY

SEQ ID NO: 177319 - protein, 172 aa, Oryza sativa
  unsure (1)..(172): unsure at all Xaa locations
  Clone ID: PAT_MRT4530_74983C.1.pep
GSTQRSFARVCEQGGHGAXAAGGPDGWMTVPAFGDWDMKNGALPDYSMDFSKIREMRKQNKKELSRTSLGGDDDLLAQQKQQQPXPQQRPAGHPPSRDQSIGTVKLAKTSYGHAREEERGIVGQATPRRGPVCGFFVAAGRSYRHRRWAGGGHVAICCAVRHTRRGGRGWTA

SEQ ID NO: 177320 - protein, 57 aa, Oryza sativa
  Clone ID: PAT_MRT4530_74984C.1.pep
PTRPPTRPEDRVAQIRRDELQRGRIAVLWASSSLSFSYGRTQYKPELLAVTFYQLEP

SEQ ID NO: 177321 - protein, 107 aa, Oryza sativa
  Clone ID: PAT_MRT4530_74985C.1.pep
HASAHASGVTVETRCHINLNKITYLDGIKQERKQSSPHVMHRGDHRNADQVTGNGHLGKQNTPKTAQDAPMDDIKEQRNSHGSKHHDSHDTAHERGERDYKRPRPEG

SEQ ID NO: 177322 - protein, 311 aa, Oryza sativa
  unsure (1)..(311): unsure at all Xaa locations
  Clone ID: PAT_MRT4530_74986C.1.pep
MAMMPSDSSHHGIVENSPYRTTQGRNEETGELGASWYFSRKEIEENSPSRRDGIDLKKESYLRKSYCTFLQDLGMRLKVPQVTIATAIVFCHRFYLRQSHAKNDRRCQKLRAITRKRNEYKFLLPMERDSIVVHXIATVCMFLAGKVEETPRPXLKDVILVSYEIIHKKDPAAGQRIKQKEVYDQQKELILLAERVVLATLGFDLNVHHPYKPLVEAIRKFKVAQNALAQVAWNFVNDGLRTSLCLQFKPHHIAAGAIFLAAKFLKVKLPSDGEKVWWQEFDVTPRQLEEVSNQMLELYEQNCAAQAQPSH

SEQ ID NO: 177323 - protein, 114 aa, Oryza sativa
  unsure (1)..(114): unsure at all Xaa locations
  Clone ID: PAT_MRT4530_74987C.1.pep
XNFXXLDLXEMDXXNXSGLASYVXGXSSRXXLERCEVVLTXXPSDLXQGVIXAEGXQAGXCTXXPXGIIRVXXPPPAXGXRSPRTIXAPXRSWXRXAXGAPPXCSSHXXVPPPG

SEQ ID NO: 177324 - protein, 144 aa, Oryza sativa
  unsure (1)..(144): unsure at all Xaa locations
  Clone ID: PAT_MRT4530_74988C.1.pep
IYKKYNNIYITSKIHNRSLNLYRCVIPVPKLANRPFRSSNLFDCVIPIPKLADHSFRSSNLFSCVTPVPKQDGLETLYQKFRDQSDLTEXVGGTKRVICKFRDQDDTVEQPETVVRLWLRLPIGAPSPRPSSPRFRHARLQKLH

SEQ ID NO: 177325 - protein, 125 aa, Oryza sativa
  Clone ID: PAT_MRT4530_74989C.1.pep
RGRAGRPSTGETRPPKHLQRPTTTSPCSRGQPTDSTRTTSHCVRQYSSHPLTPPAPDHSSAPQTRAARAPIPTTARSAPRPPAPTRHSSLCCRPTASMTSSPCSPHLAAEPPCPPPRPAPVARAD

SEQ ID NO: 177326 - protein, 58 aa, Oryza sativa
  Clone ID: PAT_MRT4530_7498C.1.pep
YVFTAGLPTPAPTGVSASSSSLLAALSDADWFFRLHGCAYSSSLTGVIVIASLPSPPP

SEQ ID NO: 177327 - protein, 57 aa, Oryza sativa
  Clone ID: PAT_MRT4530_74990C.1.pep
MKSRTVNTKAATARRRQKQGDGQVGLDSDTGFRSGAIDLGQYGVSIMDWTHLALVTG

SEQ ID NO: 177328 - protein, 192 aa, Oryza sativa
  Clone ID: PAT_MRT4530_74991C.1.pep
MDEQAPSPSPASAWAAPAPSGSSGATSCSSKAPRPSRSRAATPPPPPPPPPRRRPLPPQPQQQPPPPKTSTARTRPRRARPRQRRRRQPPVAGTTRRARKPAARKATRRRGCSASGPSSPRRCTDCDSSTFIFVHSIRAIAYSIAAGSFNSHLLLLPFHFDSARVAFSFSFFFSIVLLLIYCSFYYMQKCNR

SEQ ID NO: 177329 - protein, 159 aa, Oryza sativa
  unsure (1)..(159): unsure at all Xaa locations
  Clone ID: PAT_MRT4530_74992C.1.pep
WGGDRPKKRSSGRRRGGSGNRRSFSRERRRPSLGRAARPHRPRPGHPPPPPARRQERRRSRXDVRRADDEHVDVGAAAVDAKAVGAEGEHRATVSXRSRTGPPRGRGSPVASCSPGPPASSASLSSPHQPPRPAPSCLAPPAASPCRLPPLPSASPHRG

SEQ ID NO: 177330 - protein, 88 aa, Oryza sativa
  Clone ID: PAT_MRT4530_74993C.1.pep
GFPGGGTLLEGNSHPGGGTPNHGLYKPEINFRGSPNGMGATRGHWESPWGEGHNGPWVWLKKSPWGASFYKNFGTRGQPWGGGTPPGG

SEQ ID NO: 177331 - protein, 129 aa, Oryza sativa
  unsure (1)..(129): unsure at all Xaa locations
  Clone ID: PAT_MRT4530_74994C.1.pep
MAAVCLSFFFNTLSASLQYFTCSRVSAGRGAGSAKRTKGSNGAGGGDPDEGSGSREPRGGAEVLAWRGPPPPPPPPPRPRPPSGEFPVAAAAAASGSGSGSSXAAALGGGGRGGAGRRGRRGGRSAWYI

SEQ ID NO: 177332 - protein, 112 aa, Oryza sativa
  Clone ID: PAT_MRT4530_74995C.1.pep
AFLPSLHVSDISTLWHCTKHFVHSLLELGAVPHPLWILNILVATFVLPSVLCPTVLHCSRRLPITSPVSGLLLWLTAPTVHCLPCLHDRVRFLHCSPLASSLPPSPLHSRGG

SEQ ID NO: 177333 - protein, 56 aa, Oryza sativa
  Clone ID: PAT_MRT4530_74996C.1.pep
NPCKLTARVMVELIEGLRNPVQLYSYLHSLIWPLKTPKYQAIISESECTPYDEGLE

SEQ ID NO: 177334 - protein, 789 aa, Oryza sativa
  Clone ID: PAT_MRT4530_74997C.1.pep
MGEEKSQQRRRQGHPLLRGGGAGKQAGRRYTHGFSASQMVALAALCGALAPSLPPDTRDDDDDDAGGGRYGGAGASDAKAVRDFLLASAADPPVPDEVAELMTRMCLREALALVRAVLWLLGTRLGTLALCGGRCVSWGRWPFVLTFAEMPVERREEALGRWSRVTVLPPLRAFFLVVKVFCLYVFYSWRLVLAQAIAPPHAAHRGMPIDESSENPHWRAIGYSPPTDEPPAEEHTEATKRPLDDGVVETINLTDASLPSSLAEKGLAVTDDAARNVCRVECDVAIVGSGCGGGVAAAVLAGAGHKVVVIEKGNYFTSRDYTSFEGPSINQLYESGGFVTTMNGGGLLLAGSTVGGGSAVNWSACLKTPEFVRREWAAAHGLPLFATPDYAAAMDKVFERLGVTSGCTEEGLQNKVLRKGCEKLGYKVDAVARNSSEGHYCGSCGFGCRTGDKRGTDTTWLVDAVGRGAVILTGCKAEKLVLERGGARGRRCVGVVARSTNPAITKTLEVRAKVTVSAAGSLLTPVLLQRSGLTNPHIGKNLHLHPTALAWGYFPDTMPDLKGKAYEGGIITSMHKVETSGAGAPHRAILETPMMAVAATGTQMPWLSGRDSKERMLRFARTVHIFSLVRDRGSGTVHGERRVAYRLDAADREDIRDGLRRALRVLVAAGAAEVGTHRSDGQRLRCEGLTEEALEEFLDGVTVVRGPQSRSETWGLFCSAHHMGSCRMGATAGDGAVDARGESWEAERLYVCDGSVLPTAVGVNPMITIQSVAYCLANGIADSLSAKTT

SEQ ID NO: 177335 - protein, 52 aa, Oryza sativa
  Clone ID: PAT_MRT4530_74998C.1.pep
VKLLLRENFTLWGRNKSGTFSFQLVIFRFSLCIFLHLTHATGVTPTPRHTCH

SEQ ID NO: 177336 - protein, 812 aa, Oryza sativa
  Clone ID: PAT_MRT4530_74999C.1.pep
MQAFLRAAEVMKKKDELLKLVKLRERHRIAIRIHNLKSRVEEVSSRNTRYNLVEPISSGTEDDMDSYAEDIRNQSARNVDEAELVGFSDSKKRLLEMIDTNANDGPAKVICVVGMGGLGKTALSRKIFESEEDIRKNFPCNAWITVSQSFHRIELLKDMIRQLLGPSSLDQLLQELQGKVVVQVHHLSEYLIEELKEKRNFSSVVGRLIHFHRFQQLSTVSLPLPLDPALPPPKLTGVCAAARTSATGRLELGIIGIIHLPRLKEISLEYRSKVARFAQLEGEVCAHPKHPVLQMMEDRSYRDLGDRHSSSWFDQVIISSSIGISGRPWLPASVAPSRGADLRRHPLFSIASQLFARMSERACVHGRDIEEWEILYAQLPSELGCNPSLAAMKKVVALSYNYLPSHVKPCFLYLCIFPEDFDVQRKRLVHRWIAEGFVRAKGGEFWWDGDGELRKELPPFQYLGRDRRQGSYYDLDTYNRKERVLILSCIPLIMALSDSDNHRRLITDLHTGCSSHWHRIKDGVRVPRGIKNLKRLKVLEIVDIAVTDSKAIQELGELNQLRKLSVMTKGSNKKKCKILCAAIEKLTSFKSLYVDGDHGYSLDGTLECLDSISHPPSLKSLRLKGCIKETPNWFRELKHLVKIYLYKSHLNGDTMEILGELHNLMDLHFRWYAYVGEKLVFIEGAFQNLRKLVVETEDKLREVRFEEGTSPQMEWIEICHCELISGIVGVKHLPRLKEIGLKSAKVARLGQLEGEVDTHPNRPILRLSEKRSYHDLGETHVSVVEVEVADEPLLTSSLWTLTIEQQPVSPAL

SEQ ID NO: 177337 - protein, 1437 aa, Oryza sativa
  unsure (1)..(1437): unsure at all Xaa locations
  Clone ID: PAT_MRT4530_7499C.1.pep
MAGRAATWGRGVGAWRGAEKAATRTVSAAVAVVGRAARGRGRPDRLSCIGFNLQQEKYKVKVVADVPGTSSSKDGEGKQAPNGSAQSSDKGAIDGSQGDQGDGSQGVQGVQGDGAQGVQGEGLNQGSNVAQLQFNNFQDQVDYVVHHALINQSGILVNTLSNMVKSMVDGSIAEYQATGPVYLQGATVDSANATKATGCTADSANTSDPTGCAANSVDATRTTGFATNSASAIKATGHSADSTARLDECIGWVPDFSKFSRQDSTSTYEDINRFLAKCGEASAVDALRVRLFQLSLSGSAFTWFSSLPYGSINSWADLEKQFHSYFYSGIHEMKLSDLIAIKQRYDEPVHEYIQRFREMRNKCYSLSLTDAQLADLAFQEVCRSHEELKKVNHVCPYIYGSDNDDDDDSEIAAAEWVRSKKVIPCQWVKNSGKEERYDFDITKADKIFDLLLREKQIQLPAGHTIPSAEELGKKRYCKWHNSGSHTTNDCKVFRQQIQAAIEGGKIKFDDSKKPXRLMAILFLSIWCIQLAEQPMEVVQEVFRVGSSLDFVGMKXMRLPSIEDCPGCSDIAESSSRSYSTGNRLRQTRVPVHQRLGPVNQDRGQEDNENMKTQLCPSEQAVFEKPQGTENRHLKPLYINGYVNGKPMSKMMVDGGAAVNLMPYATFRKLGRNAEDLIKTKMVLKDFGGNPSETKGVLNVELTVGSKTIPTTFFVVDGKGSYSLLHGRDWIHANCGIPSTMHQCLIQWQGDKIEIVPADRPVNVASADLALWEMDGLNCLSGKVWDGDFLKMENPSYYFEDVMEGSNVYTKDKVDDLDDKQGQGFMSADDLEEIDIGPGDRPRPTFIKIASLEITQRSVNAIKKIQPPVNKTELQDMIGKINFVRRFISNLSGRLMHYLLSNECTVICKADVVKYMLSAPILKGRVGKWIFSLTEFDLRYESPKAIKGQAIADFIVDHHDDSIGSVEIVPWTLFFDGSLFKEVEADAIEIMGDSLLVISQLAGEYECKNDTLMVYNEKCQELMKGFRLVTLKHVSREQNIEANDLAQGASGYKPMIKHVKVEVATITADDWRYNAKVAIGEVYEGTCGTHQSAHKMKWLLRRAGYFWPTMLDDCFRYYKGCQDCQKFEAIQRAPASAMNPIIKPWPFRGWGIDMIRMINPPSSKGHKFILVATDYFTKWVEAIPLKKVDSGDAIQFVQEHIIYRFGIPQTITTDQGSIFMSDEFVQFADSMGIKLLNSSPYYAQTNGQAEASNKSLIKLIKRKIPDYPRQWHTRLAEAYRMACHGSIQVPPYKPIYGHEAVLPWEVRIGSRRTELQDDLTADEYYNLMADEIEDLVQSRMRALAKVTRDKERITRHYNKKVVPKDFSEGELVWKLILPIGTRDSKFSKWSPNWEGPFQIYKVVSKGAYMLQGLDGEVYGRALNGKYLKKYYPSVWVNA

SEQ ID NO: 177338 - protein, 58 aa, Oryza sativa
  Clone ID: PAT_MRT4530_749C.1.pep
HLSCLLSGLQSAPVPCGGLTCKQHCTIMARKLAVSADLISSARRSKRWGGASGSACTR

SEQ ID NO: 177339 - protein, 48 aa, Oryza sativa
  Clone ID: PAT_MRT4530_74C.1.pep
TVEHFFSMREWAAKTVRHVLNSIHTKESEEQSQMKQIFESIKVYLDGQ

SEQ ID NO: 177340 - protein, 327 aa, Oryza sativa
  Clone ID: PAT_MRT4530_75000C.1.pep
MSGHHEAKPYQPRRGPAPADEEAAPAAAADEAEAEAEVEAMERYEQEQEYEEGEEGEEEEYEGGEGVPMDADASAAAVAGMDPHGEMVPVAGGEAGGGYPHVASNTLTLSFQGEVYVFESVSAERVQAVLLLLGGRELAPGSGSVPSSSAAYSKKMNFPHRMASLMRFREKRKERNFDKKIRYTVRKEVALRMQRNRGQFTSSKSKAEEATSVITSSEGSPNWGAVEGRPPSAAECHHCGISAASTPMMRRGPDGPRTLCNACGLMWANKGTMREVTKGPPVPLQIVPAATNDVNGIVEATGVEQHNSAVEEAVSAANGHESQSGVA

SEQ ID NO: 177341 - protein, 75 aa, Oryza sativa
  Clone ID: PAT_MRT4530_75001C.1.pep
SLPSYRCRPEALEFALPGRLDVPLMAMTVERARNPPVTVLSSRKGSAVSVCPCPSVRLILSHQEFHSSYVVCRAC

SEQ ID NO: 177342 - protein, 336 aa, Oryza sativa
  unsure (1)..(336): unsure at all Xaa locations
  Clone ID: PAT_MRT4530_75002C.1.pep
MGNRCGGRVEKFRGFLRMDWGGLMNPSFVGAALYCNKEWGNDESFGGEDEASLGLRLIILWNYHDANKKVPDRKTTTARESSSKGFSGGAGKVQANGGCCRIAWSRVCAPKNYGGLGLPNLELMGIALRSRWTWLQRTSLGKPWKGLDIPGSQKEKSFVAASTVCQLGDGQTILFWEDSWLQEGCIRSIAPNIYDRVSPCMRRHRTVAEALTDRRWIKDIAGALGIQAILEYLKLWSLLHLATCIPTTPDSFSWKWESSGQYISRSSYKALFFGRISFLSTPIWKSLAPPXMPLFPVVGSNKQMLDRRSXCEARGCLTWTAVSFVTKRRRALTTFW

SEQ ID NO: 177343 - protein, 78 aa, Oryza sativa
  Clone ID: PAT_MRT4530_75003C.1.pep
SPTQPQLHLKRKDSITVPELLSFASLSMKNQDHLPYGPWATWGTTAQESSRKNRDRVQMGQLASACLPSIRERILVIS

SEQ ID NO: 177344 - protein, 58 aa, Oryza sativa
  Clone ID: PAT_MRT4530_75004C.1.pep
MALGGGGSAARPSHRRQPLRAPFSLNLAIGGSGGSLKATARAEARRWQAHTAHVSGEV

SEQ ID NO: 177345 - protein, 729 aa, Oryza sativa
  unsure (1)..(729): unsure at all Xaa locations
  Clone ID: PAT_MRT4530_75005C.1.pep
MGLDCGDSGSAHRAEGARGAALGCGAGRGACAWFAVDADAAGPRAASRLAVDRARERGRRERLTGVGSTRSWPSWRLRGSNAGRREVEEDAGRNGRRTAVASGGAKHGDLGEREHTGKLRGTRGVEPTARIRWRELDGGGLRRRPPAERKGENGDEVTRGRFPAARASTRLRESVPCAGLGGNASRKAGDERRFRARAATAASTRRATAKEEEEEGAPGVPFRVLARVGSSDTRDDKRHGGMPGPSPLAHEATRARRRNPHQQLLLLHPNPNSRPQAGLDKQNSHLSPRREVAATAMISATATAAFLAAAPASSSSCTTHRRRSGLPAISASLATASSTEEPLLVRAARGEDGLPRPPAWMMRQAGRYMAEYQALAKRHPSFRERSETTELIVEITLQPWRAFAPDGVILFSDILTPLPAIGVPFDISDSKGPVIQSPVRSEEQVRELTPIDFEKLRFVGESLKILRTELYELAVIVKVKRQAVLAXYRIQVXKFLGFMILCDSLKSFQQPVSCRPDAISEYIIYQVNSGAQCIQIFDSWGGQLPPHVWEQWSKPYIKQIVNKIKIECPNVPLVLYINGNGGLLERMTDTGVDVIGLDWTVDMADGRRRLGNKISVQGNVDPAFLFSPLPVLTDEIHRNITIRDQVNSILFITLNSCIPSSIHKTKTKRHATWFYKKSQSRFKHLFPAHELGFSWNADQDWAEIESLDIQSYPQANFATVQDKLGAEIY

SEQ ID NO: 177346 - protein, 113 aa, Oryza sativa
  Clone ID: PAT_MRT4530_75006C.1.pep
RAVTVVALTSGARVAVSTGGGGEFAAPHGQSSGVCIGDGRRRLRRLRRQQQGNARVAAARGLTGCGNGKATPSRSQLPLELEFRACLAQLQLQLHLHLFWSWSSAKQFQLHLK

SEQ ID NO: 177347 - protein, 46 aa, Oryza sativa
  Clone ID: PAT_MRT4530_75007C.1.pep
MALLLQQLGAVHRDPETHESYVHCSRESSCGTGSGWLLLFGLGLPA

SEQ ID NO: 177348 - protein, 73 aa, Oryza sativa
  Clone ID: PAT_MRT4530_75008C.1.pep
RWQGFESGPVPQPQYCLIKAKGHAFYCLEQLRRNLISGRRGSGRRQRGLASATTRRCSSLNTCKRLVRNQVAC

SEQ ID NO: 177349 - protein, 244 aa, Oryza sativa
  Clone ID: PAT_MRT4530_75009C.1.pep
LITLKPGADPVKNSSGAPARQRWTAAWRPGTARVSPPPRRRAGARPPPDRLPSHPPGPSPARGSPAAADSRVPPACRSPHAHGATGHAASWLLPSSAGVAAGRWPPRHLASLAVHGRLPSAVGPASTAGRTPSRGAARHGGAQGGRARAPGAFSSCFTTASKATLPLVSTVSARIFEPPFSSCRPMPGAYCATWIGLWFSSLSTSSSSSSSSATSASGSNAKRRSRKEPNELIKKPPCKLFSRS

SEQ ID NO: 177350 - protein, 232 aa, Oryza sativa
  Clone ID: PAT_MRT4530_7500C.1.pep
TITTDQGSIFVSDEFVQFADSMGIKLLNSSPYYAQANGQAEASNKSLIKLIKRKIFDYPRQWHTRLAEALWSYRMACHGLIQVPPYKLVYGHEAVLPWEVRIGSRRTELQNNLTADEYYNLMADEREDLVQSRLRALAKVTKDKERVARHYNKKVVPKDFSEGELVWKLILPIGTRDSKFGKWSPKWEGPFQIYKVVSKGAYMLQGLDGEVYGRALNGKYLKKYYPSVWVNA

SEQ ID NO: 177351 - protein, 95 aa, Oryza sativa
  Clone ID: PAT_MRT4530_75010C.1.pep
YFDEKQLPENQYICLDSFSCITPSQPPTNEFQLLKRTFAKFLQKHISLPLNFYIRSTTPQLIFHIFASYEDKCFSTCLLVHGSMHYTKHPKSSPM

SEQ ID NO: 177352 - protein, 57 aa, Oryza sativa
  Clone ID: PAT_MRT4530_75011C.1.pep
FGTIKQLDINLFIHLTNLRISSPSKQMWKQHCLSIWNFSSKYFVVSLSQFRHKFGIT

SEQ ID NO: 177353 - protein, 135 aa, Oryza sativa
  Clone ID: PAT_MRT4530_75012C.1.pep
MATGGDTRAAAEVRAGSVSATAATAWRGGGYSGGGAWPETALGLTATKRLWKSKTTRISHQEFNLNLLLLGSVLADAICGKEAPEEGGPLKVAAIGRPYRVFFNPTITIACKFHDLQGPFREGSLKGGRAAEQCG

SEQ ID NO: 177354 - protein, 115 aa, Oryza sativa
  unsure (1)..(115): unsure at all Xaa locations
  Clone ID: PAT_MRT4530_75013C.1.pep
MDIIRSRFLANWSTRNIFPKPIFVLQDQPVTTRNNPTGVPYVRVLFLVPGGEAQHTRRQTKNNGRLGRRPQALDGRHELDTKAFIFXELLFXDWEKLSKTEYNHRTQQDTPISAE

SEQ ID NO: 177355 - protein, 81 aa, Oryza sativa
  Clone ID: PAT_MRT4530_75014C.1.pep
GKLEAPKNASPLVCKICNQLAMVKPFLDNLALLGAISRNGLSPCCKMEQLWQHPNLVVVARKFSNVEQDSWGGDPPHFFRW

SEQ ID NO: 177356 - protein, 224 aa, Oryza sativa
  Clone ID: PAT_MRT4530_75015C.1.pep
MALDSVPSYPSDLGSSRARTPQQQRVSPRKEERTWTTDTYAPYDDGHQWRKYGEKKLSNSNFPRFYYRCTYKNDMKCPATKQVQQKDTNDPPLFSVTYFNHHTCNSSSKIVGSTPDSTVQSRKAISICFNSHGQTGEQPTFLSSSASLLSPSMQSYSSNQQPDMNTYSRQFQWADTSSSTSNAPVKMEADDYAEASASPSTTGALSRTLLPIGQSRCIEYFHFL

SEQ ID NO: 177357 - protein, 76 aa, Oryza sativa
  Clone ID: PAT_MRT4530_75016C.1.pep
RFGARGGSGGGSSSGRRREERRQRQAVPSPPPDPAGEAAAATGSPPPDPARGEAVAVGSHGRRREVAVAACGPPFL

SEQ ID NO: 177358 - protein, 112 aa, Oryza sativa
  unsure (1)..(112): unsure at all Xaa locations
  Clone ID: PAT_MRT4530_75017C.1.pep
MPGCSTRLPSTESAAQLPDDPKFYQDLLXGLQLPDIDPMDFRAXGLDALDLSEVPFGLDDEQDLLLGEFMDIGDDDLDDIDLDDINDVFPEMPGCDLGRGMDDFLQTVDFCV

SEQ ID NO: 177359 - protein, 77 aa, Oryza sativa
  Clone ID: PAT_MRT4530_75018C.1.pep
CSRCLDRHRREANKNSRTYKTYTLKELIHENGHISHCCKAMCSTNSSMHAVYEYPRRGRLYTIQAITRIPAYTIRVI

SEQ ID NO: 177360 - protein, 102 aa, Oryza sativa
  Clone ID: PAT_MRT4530_75019C.1.pep
QRLIFAGKQLEDGRTLADYNIQKESTLHLVLRLRGGMQIFVKTLTGKTITLEVESSDKEGIPPDQQRLIFAGKQLEDGRTLADYNIQKESTLHLVLRLRGGQ

SEQ ID NO: 177361 - protein, 105 aa, Oryza sativa
  Clone ID: PAT_MRT4530_7501C.1.pep
MEIEAAKCECCGLREDCTVEYIAGVKADFGGRWLCGLCSEAVRDEVAKKGGGGGGGGRQLEDAVRDHMSFCGKFCRKNPAFRVADGMRQMLRRRSSDISAPSGAS

SEQ ID NO: 177362 - protein, 116 aa, Oryza sativa
  unsure (1)..(116): unsure at all Xaa locations
  Clone ID: PAT_MRT4530_75020C.1.pep
SPPXQQRFIXAGKQLEDGRTLADYNIQKESTLHLVLRLRGGMQIFVKTLTGKTITLEVESSDTICLPQWSYGCLVWSLVVSRFIVYYLPVMCILKSGLMVSETFCCGRAAWKNYNE

SEQ ID NO: 177363 - protein, 59 aa, Oryza sativa
  Clone ID: PAT_MRT4530_75021C.1.pep
VVYILGQVPPLENERLFRIKQQGLPFSRLEKSILIIGGKRKIGPFCLFVDSVINPFVEP

SEQ ID NO: 177364 - protein, 70 aa, Oryza sativa
  Clone ID: PAT_MRT4530_75022C.1.pep
ARSPVMFNRYTVSGNEYIKSWAICTFPNMVTHISSFSNTHGSIACRRRRPRALRSSFQHSVHTNSLHPTH

SEQ ID NO: 177365 - protein, 132 aa, Oryza sativa
  Clone ID: PAT_MRT4530_75023C.1.pep
MDHLGGIRLRRPVLSIDNAEPAGETGMSETKKKAAAVAEEEEELLEEPVSPAGRLFREPHFSCYIVCTLGVAEPVDLPAVRAGIEATLARHPRFCSIQGDCMRMVRSVHYYPLDEEYLHGKHNILRYHGNTP

SEQ ID NO: 177366 - protein, 156 aa, Oryza sativa
  Clone ID: PAT_MRT4530_75024C.1.pep
MKFAAALAFAAGVAAHAKNVTYTTEVVTAYTTYCPGPTEIVHGDKTYTITEATTLTITDCPCTVTKPVIMTSAVVCHDCPTGEKPGKPNHPGMGHNSTMVPVYPTGKPTHGGEHPVGPGATPTAGSPSEVPTAGAGKVAALSGAGLAAVVGLAAFL

SEQ ID NO: 177367 - protein, 99 aa, Oryza sativa
  Clone ID: PAT_MRT4530_75025C.1.pep
MSPCRIYVVLLSSGQKRGWFTTLAVGIGKWTELGGWRLENGDIMPEFRTRGLGLAMSLSVWVGGSEEREMKMRRWAVDGLAGNFGVKLYSSIVIITTGM

SEQ ID NO: 177368 - protein, 141 aa, Oryza sativa
  Clone ID: PAT_MRT4530_75026C.1.pep
ENIPGGGIASCISPPSSFGEIIYDPFHAVFYLTFILTACALFSKTWIEVSGASARDVAKQLRDNQMVMKGHRDSALIHVLNRYIPTAAAFGGMCIGALSVIADFMGAIGTGTGILLSVTIIFQFYEAFIKEQREGMGAFGF

SEQ ID NO: 177369 - protein, 129 aa, Oryza sativa
  Clone ID: PAT_MRT4530_75027C.1.pep
SFADGVAGAATACLAVSCLPWKTREREPNPGAGPAGHRAQSQQQPVLSLRGGSAFPTRPLQPPAASARSAARLLGCWLPPHLGVAVARVLDPSGQRWRHPPLPLLPPLPPPPPNAIRRAPPPPPPPIPH

SEQ ID NO: 177370 - protein, 179 aa, Oryza sativa
  unsure (1)..(179): unsure at all Xaa locations
  Clone ID: PAT_MRT4530_75028C.1.pep
DQNRAFKQTLAKGKPQKPPRGEKTPFGGNQNPKGGGKNPPPAGXKAKGWVKNPPRKRGGPPPGGGKGLLAPPAPGGPRGKTPRDGNPPIFQRGPARPKENRAPFLDPKPGGNRPRKGETPPPNPRKXPGQKGGSPGKQGKFGQSGPGGRPHQRSAPGKNQSRGGAPFGKGGPLKGPPGG

SEQ ID NO: 177371 - protein, 70 aa, Oryza sativa
  unsure (1)..(70): unsure at all Xaa locations
  Clone ID: PAT_MRT4530_75029C.1.pep
GGWFGKKQIIKLKLAEVQGRQIRRLLLFVIDPPPKVEWHPNLAQRTTMDRLAAQSSXKKKKVPPLSNGGH

SEQ ID NO: 177372 - protein, 295 aa, Oryza sativa
  Clone ID: PAT_MRT4530_7502C.1.pep
MSPAEPRPPAAATRKRKKPHKPTKTLAKNPTNPVSTKAKKKKPPPPSKADQSASAAAAGGVLLSAEMPPARQLEFLLRSFERAAKMRLSPLELDAYSEGCMVPLAEGASQDVEGFGDHVKGAFGSSWKEELCEGELDGGAVDAGSPALLVICSAALRSLELLRGLKMFTKECRPIKLFAKHMKVEEQVALLKTRVNIACGTPSRLYLETFGVHVLWIKKLIDMEALSLSRVKLVVLDMQRDAKSFTLFTLPQVSNEFWDLYKGYLDQKVRGGDTRLCFYGAVSEKDVKKALPSAE

SEQ ID NO: 177373 - protein, 53 aa, Oryza sativa
  Clone ID: PAT_MRT4530_75030C.1.pep
SGGSIPCIGLVDELACRVSLLLLRAAAAHAGERCHRHILLVSCSGAATSVSVA

SEQ ID NO: 177374 - protein, 76 aa, Oryza sativa
  Clone ID: PAT_MRT4530_75031C.1.pep
FFFFFFFFFFFFFFFFFFFFFFLQNQIQVVKTAMLNAIYYLRRQPGDDLITQNPTEYIQKNQGQTVQYSHQFVFLA

SEQ ID NO: 177375 - protein, 93 aa, Oryza sativa
  Clone ID: PAT_MRT4530_75032C.1.pep
MYCPKEIKPEEEQKGVHGGGGVAGAQVEAALNHKNVEALPEDETVEGGPEDAWVPDHETGVFVPADKAAVSGTENHDHCGAAAAAGGSPSVLD

SEQ ID NO: 177376 - protein, 145 aa, Oryza sativa
  Clone ID: PAT_MRT4530_75033C.1.pep
KWLRGTATYNVYRSDFDGMDIATTVPKGTLPEWILMQEFHQAIEILRNISHPNVVPFLGACIEKRAIVYRFRENNTLESHLKYLTWEIRVKSAASICSGLMFLHSRKPKPIIHGDLKPSNIIFRPGNACMLSDFGMCYLYSKEFG

SEQ ID NO: 177377 - protein, 121 aa, Oryza sativa
  Clone ID: PAT_MRT4530_75034C.1.pep
MAGCQSTVSSTEDVLVRPKRRHEFSIMWVKDPTMIAVRWRRAFRSAIQKHMALCNCQSKWPLFPRLNKVNRPKQQCRFVNCKWRISYLQLGVGSIINLEKYDDAYGKFKIDTRCRQSHTMF

SEQ ID NO: 177378 - protein, 55 aa, Oryza sativa
  Clone ID: PAT_MRT4530_75035C.1.pep
LSFAREGACFTVAVKPCYTSIMFAQTLPANSTHSRVRSRSPRSYMPGKGAPFRML

SEQ ID NO: 177379 - protein, 86 aa, Oryza sativa
  Clone ID: PAT_MRT4530_75036C.1.pep
QFFFLKPFGVLKQFLRAANFFKLTGGGGHSFHFSFFSFFFSPQNNQFFLTPGPKFFLFFPWVLTPPQNFPNVFFFLTKKKFLFWPG

SEQ ID NO: 177380 - protein, 77 aa, Oryza sativa
  Clone ID: PAT_MRT4530_75037C.1.pep
INWALTKKLTPPKFKRPVFKMGPQIFIPSGGKNWLHREKKRIWGGGKNWKPGPPCFGGKKIIYTLRPKFCHKIWGGG

SEQ ID NO: 177381 - protein, 208 aa, Oryza sativa
  Clone ID: PAT_MRT4530_75038C.1.pep
MGRAKSKGPKFAAVKKIITKKTIQKYKEDVLNPKKKDNEKEKLGRNVPQVSSALFFSYNTALGPPYRVIVDTNFINFSIQNKLNASLTPMQLDLEKGMMDCLYAKCTPCITDCVMAELEKLGQKYRVALRIAKDPRFQRLACTHKGTYADDCIVERVTQHKCYIVATCDRDLKRRIRKVPGVPIMYITRHRYSIERLPEATIGGVPRI

SEQ ID NO: 177382 - protein, 216 aa, Oryza sativa
  unsure (1)..(216): unsure at all Xaa locations
  Clone ID: PAT_MRT4530_75039C.1.pep
TALGCEVFAYGSVPLKTYLPDGDVDLTVLGNTSYGSTLIDDIYHILQSEEQNCDAEFEVKDLQLIXAEVRLIKCTIENIVVDISFNQTGGICALCFLELVDRKVGKNHLVKNSIILIKAWCYYESRLLGAHHGLISTYALETLILYIFNLFHKSLHGPLEVLYRFLEYFSKFDWDNYCISLNGPVALSSLPNQIVEATNTPGSDLLFDKESSITRC

SEQ ID NO: 177383 - protein, 1293 aa, Oryza sativa
  Clone ID: PAT_MRT4530_7503C.1.pep
MAATVEEQMMVKAIREELPWESLPKRIQAALVSKDDWHRSTFDGSHTGPNCTNSAIQGHGLFHISEFTSLKPLKKIMWKLSKSIAKELLPALPADLAIEPWWGVRFVNFTLEEFKRLSEAEASAIDKISKDEDNSYVLFDPKVINGLYKRGMVYFDVAVYPEDRFRVSRLEGFVSNKDQSYEDPIEELLYAVFVVSSENATVAELAKTLQADLYQLQAAASFACRLGWAVKLMDADSILRDSNGSTIPSNILSDDDEGLKSHAVTLYEAGKLGDSCIADLCKDLASLEGKRFEGVLQEFANHAFSLRCFLECLLSGGTSPDEAIEPNSQEFCLQENFSKTLSKESIDEGISNVVKSNGGSLETVDTADTDHHNELSQADHPMPLSLNDLDETGNLVTVDVPLPLKNADGISKSNEIFSKDENYEWIPLSLEFGIPLFNPKLCEKICERVIESHMLQKDDLTEHYEAMQNVRKRLRELCAEYQATGPTARLFNQRGSSKNSPRQLINIVSGRWSPFHDTVAPTTGGSPRENDRLKVARRQKCFTEVLSFDGSILSGGSKLDVCDYFEADCKNENMFESRMDTSGADNHEEGDEDEHGMFIPSPLGGEMVNVDPDLLQDMLRDVEDPTYNERDSTKFSSGTVEDGREEGEHQNSTDAVAGSPSMAVKPKPTTYLLLLPSSSSSAAAAVHGDLQVAAAAALLPAAATRAGDGAPVPVRDAPPPRPHRLLHRPHRLLPPLLPLPHRPPPRPSPLPPPHLTSAAAAASLPLLSPLACGARCVSTCSASDGDEVEGEGEGGSPAHADSSHPEHVGRVCAAIADVVAAGAGAGADASLEAALTALSPPLSETLVLAVLDRFKHAHRPSHRFFRWAAAAAAASGGFAHTTITYCKMVHILGKARQFQSMVALIQEMGKEGALCMDAFKIAIKSFAAAGEIKNAVGVFEMMRTHGFDDGVESFNCLLVALAQEGLGREANQVFDRMRDRYAPDLRSYTALMLAWCNARNLVEAGRVWNEMLENGLKPDVVVHNTMIEGLLRGQRRPEAVKMFELMKAKGPAPNVWTYTMLIRDHCKRGKMDMAMRCFEEMQDVGCQPDVATYTCLLVGYGNAKRMDRVTALLEEMTQKGCPPDGRTYNALIKLLTNRNMPDDAARIYKKMIKKGLEPTIHTYNMMMKSYFLGGRNYMMGCAVWEEMHRKGICPDVNSYTVFINGHIRHGRPEEACKYIEEMIQKGMKTPQIDYNKFAADFSKAGKPDILYELAQKVKFTGKFDASNVFHQWAERMKKRVKRNVPNQTESRTF

SEQ ID NO: 177384 - protein, 112 aa, Oryza sativa
  Clone ID: PAT_MRT4530_75040C.1.pep
SFVADSFAGTQRGVVSNQRTCRPSNQDSTTTTPFVCCGFRSRGRPGIAFRLIQCPPSTAAPVLSLSLSHSLTLSQPIIDIIYSDILPPSHSISVYVILAFPTFMLMLMNLDI

SEQ ID NO: 177385 - protein, 568 aa, Oryza sativa
  unsure (1)..(568): unsure at all Xaa locations
  Clone ID: PAT_MRT4530_75041C.1.pep
MDEGCILDFLGRQGRGPRFEGGSTEPFGPARARGRRPITVRGRERERWGPLVGDTAHGGMGAREGGARVRWGWCTSGAPDGPXASGPRAASRLAVDHARERETEGAADRGQLDPVRPSWRRRGAFLAATRAGGRRKKRGXPRWTADGXRIGRTAARRGERKGDHRSDERSEEERANGTDXEEEGPTTMNXAEVTAGERKRETRRXGEGSILGGGSTSSVQGMRFRRRMGRRSTEEGRRRAAASGSGRQWQRGHAGRQWGSGRCPRAFGSATGASSKAKGTRESGEGERRRHYRAGRSDGRPTARGXALRPRAGEGEGEGCPESPSRVLRTHXLPGASAMDGEGDCRAGAIVARQCGEXRRAADGEDARGDEGGGSSGGNRTTSAGWQRGAVKVGAASCCNGGGGDNGAGHGKRRNGERKGALPMPFWEKGGGREXSSSSVFWKHAAWGHRDRAMTAATTAKRRAGSGGCAAQARXGLTRRQPGGMARARERAGRAKAARFQRQRRESALXGVKRGERSRERERERENSARRQLSTRVCGARAEKGGDGXEREMGRGGQNRPTKLEEGD

SEQ ID NO: 177386 - protein, 114 aa, Oryza sativa
  unsure (1)..(114): unsure at all Xaa locations
  Clone ID: PAT_MRT4530_75042C.1.pep
ILQSKPTWPANHRTRPASFLPPARHRRCGQVADRLCKRSSPPPLAAYKXRTTRFPIPPHXRAPRAWSPFLSXHDRPPLPXADLLPRSLSSNSLAPSGLPRRGELIFPVSPLFPH

SEQ ID NO: 177387 - protein, 153 aa, Oryza sativa
  unsure (1)..(153): unsure at all Xaa locations
  Clone ID: PAT_MRT4530_75043C.1.pep
HGSRWTTRASGRRRERLTGVSLTRSGRAGADVAPSGLPGAXGDGRRGRLQGRGDSGAAMWRVKWVGLRGGARLQFYRHVKSVWEREPTLAVKGARLVVTGDRRAADGEDARGDEGGGSSGGNRTTSAGWQRGAVKVGAASCCNGGGGDNGAGH

SEQ ID NO: 177388 - protein, 50 aa, Oryza sativa
  Clone ID: PAT_MRT4530_75044C.1.pep
RQPGPVGDGAKVGSLITGGNRAELSSCVRRRAVEWFFASVSEKREIGRVV

SEQ ID NO: 177389 - protein, 76 aa, Oryza sativa
  unsure (1)..(76): unsure at all Xaa locations
  Clone ID: PAT_MRT4530_75045C.1.pep
PDGDPSQQPSHIRVRASPSVTLRTRKFMTYLLLSCKQFVLEVLHLFRSFFFNVYLYEKLSXLYXMKDYNCIFLFNF

SEQ ID NO: 177390 - protein, 673 aa, Oryza sativa
  unsure (1)..(673): unsure at all Xaa locations
  Clone ID: PAT_MRT4530_75046C.1.pep
MPRSDYSDDGEDDVFFDAFDDDDDDDDDKNRSSTEISTSEAGYELWAGEPMSVRERRHRFLKGMGFLEPGPTGTAFPQWLAEIATTDCCSFHDFEERISSICSSFRSCFSDSILAATDNTNDSADNCTRDVDYNSSGRRSTTSHDQGQHDVLSEIVEEAGTSSDEMVTPNAPEIVPGFSKLMRKLLRIRFGHGPKRNEFKSLWEIFMRKKVSDRVLSMDDVHVQPRGLNSGTLYRTKVHQQNKKWMDFTAVYMCQEIQAHEGLIRVMKFSSSGWHLASGGEDCVVRVWQITEVESSPDLYGRDVPEDMNKKKDVKIKPLAIIPKKVFSITETPLHEFQGHTSDVLDLAWSKSDFLLSSSKDTTIRMWKVGCYDCLAVFRHGDYVTCVQFNPVDERYFISGSIDGKVRVWDVSDKRVVDWDDTKYIITAISHRPDGKGFVVGSVKGRCRFYDQSGLFPLGRNIERNKLMRIKRRRCAANKITNIQFSQGHPSRMIITSKDHKIRVSEGHKITQKFQGQWRSKVLVPPSLTPDGRYLISAGRDSKIRIWNFDGGGRRRRVVSSRELFFSEGVTAVAPWARAMGGGGGGADAPTLCYDRERCSFGTWFVVPDGAAAAAATTWPEERLLPSLRYVNCAGMDDCRSQVPAAWNMVVVTXGSRGGAIRAFHNYGLPVRL

SEQ ID NO: 177391 - protein, 390 aa, Oryza sativa
  Clone ID: PAT_MRT4530_75047C.1.pep
MTEASRAADQAPRRGSLRIDKVCGEGSDGTGVGSGGPLAAMTVAEVKDLDHHHRYPCIQIKNPRYNPQIPKSKSVHPNQNPQIAKSPRTPVTHQLPPPYELRAEEAAPSATGLRQLPHLLQPWLQPPLCPTVEPAGKEAEKEALPAVTGPGDGGEVTTEEWPRWGTSSPLPVTVAAVVRELLERRRSLFEFKEVITDPFTVPPRPNTPPSRVCSGLEQRCRRQVGVVPEIRTSASDLAQFLRAHRISHVCLRAIIGVPNYKLLALGSSLATASAWVARHVLPYAGANSSTPAHHRHRRRRRGPHRSPLRAPHAPPGLLAMQSYSMMQSNGVIPLDNALFKTLPPSLEMVDLHTLALLHYTNMFDVVHVAVKNLYVSGDRIPMPVLVMEVR

SEQ ID NO: 177392 - protein, 282 aa, Oryza sativa
  unsure (1)..(282): unsure at all Xaa locations
  Clone ID: PAT_MRT4530_75048C.1.pep
VGFELWWAHINATYRNSVTLWEDMWNGIVRCQYFESLYNQCLYKTDSVKSFAQREFEDCFQLPLSSQSYEEFSVLQELLQRLLLSNASGDXMSFIWDNSTYSSQRFYGLNFIGRSPPRPFVWNWKTNCVNKIKVFMWLLFCDRLNTRDMLDRRNCAHEDADLTCALCSLSVRETIEHLFFSCPFSDTCWRKIGFTWNLNXNFFFQMVVLARLRFRGKSFLEFFSIECWHIWKQRNALIFQNVNPXSFGLVLLHGCRAGFNPEPGLHGCRMKEPLLSSVFNWL

SEQ ID NO: 177393 - protein, 44 aa, Oryza sativa
  Clone ID: PAT_MRT4530_75049C.1.pep
VLDPFGLCACPRAHTAAVHRPPSAVCPDRPCMSPSHALGPINGF

SEQ ID NO: 177394 - protein, 46 aa, Oryza sativa
  Clone ID: PAT_MRT4530_7504C.1.pep
CFVSSFFHRPFLNFFNLSYKLHLYAQSRLWRVFLACLSFERVCVLC

SEQ ID NO: 177395 - protein, 75 aa, Oryza sativa
  Clone ID: PAT_MRT4530_75050C.1.pep
LIVFLLTFYLIRVHWFIYMFLCNFYGILWFMNLLFFHERGGIRGNLNRGLGEFRILTMGGLFEHWGNDGKKGISG

SEQ ID NO: 177396 - protein, 827 aa, Oryza sativa
  Clone ID: PAT_MRT4530_75051C.1.pep
ELMGSDVMVNGMMRSFSFMHASEEDFMEGMATYDHVVARMAPEPLPLTPPAAPPPSTFSFRFQHQLPEILRETAVVSGEIPVQVLEEHEPEKKPAIAMESKQERERDAEEREVVMEEEEEEEQSREVVEAAAAAPMIVSTTHNYRFLTERDFRGFVKEPEAITVRVQESFVPSPELEAVAVAAAAQPEERRVVDGAPRRGFLTTNDFRPANEPDSARQSVASQLGRKPAASSPSAASRGSAAAAVSGRTSFASEFSGFGGDSDSESTASDGYSVKDLVVDSDSDWFLSEKDFPAAAVAGHDAGSLRGYYKAKVLKALEALDASASNLERSFQDSATTVSPGSVVGQASPDIIGAADDPAKYPEDMWSRSPSPDVEYNEDEHKGNEATNMAEEVSFDMSDDERPPASGGKKTTAMAASSSSSSPVHDAESEDENSLDHSEKETITIHDHSYESVSDVKRRSPEAISDAELDDASSRHAAVLDAKVRSPDVHSSEPIFDNYEEHEVSNDQSQAAVSDEKRSTPHSEREFAGTDDRSHELISDVWKDIVGANDQSLASAHDEERSPDQSVAIISDDHKAIVSATNDSSNGEVSDHKSTPETAEQEFSGNDDPYELVADARIISERAEEDDIPNERPGNATRHVTFSVAEKGKVLDVVEEDQEDKWKDLTEEEEDELESLWEHQDLIEQLKLELKKVRSIGLPTILEESETPKAPMEDLKPWRIDAKFLREDPMDELKPGSVVGQASPGHHRRRRRPRQVPRGHVVPEAPQQSANSLKSFSPEVTSILSRNMWSSRRKSPGDPSQRFDMAHRYDLQTHYYNQMCLSWELLR

SEQ ID NO: 177397 - protein, 1022 aa, Oryza sativa
  Clone ID: PAT_MRT4530_75052C.1.pep
MPTPDRAGAVGATARGGGGGGGHLRGHAHLTNCIHLRHHHAHGGGGGGGGASSSGRRRSPTSVASAALMRDLLALQRSRSLRDPSTRRSVESSSKVAADPDADTDEDDADLPPKSRRSASTTGALKTLLDQLAENPQPKQVRRPPRRFKRGAGRRAGAASKAPDRSAAAAAAAAALSVNSSSQEAVCGNKYLFRDGEDGLDELQQHVPPQDSRNVCGIPWNWSRLHHRGKSILDMAGRSLACGLSDPKSAAGRKSEAGAGASRGHLNGSHSLFPVKSERLASSTSSDSDALPLLVEAAATGARNGGIGGSYSGELGIFSNQTSEMESDLLSEGRSGHKSRGSQHGRGRHRSLTQKFAPKTFKDVVGQSLVVQALSNAVLRRKIGLVYVFYGPHGTGKTSCARVFAKALNCHSPEHPRPCDSCTSCIAHNLGKSRSVMEIGPVGNIDMDGIVDVLDNVMLSPAPSHYRVFIFDDCDTLPADTWSLISKVVDRAPRRVVFILVSPNLDLPHIILSRCQKFFFPKLKECDIVNTLQWISTSESLDVDRDALKLIASRSDGSLRDAEMTLDQLSLLGQRISLSLVQELVGLVSDDKLVDLLDLALSADTVNTVKTLRDITETGVDPLALMSQLATIITDILAGSYTFTRERLRRKFFKRPTLSKDDMEKLRQALKTLSEAEKQLRVSNDKTTWLTAALLQLAPDKQYVLPSSSSTSLNHGVLAGSFPDRDMAIHSALEHNGNMASTSYRERRPVEHTSNSHLLSTSAPRANEQSRNSKIENELIWHAVLESIQSDTLRKIMAKEGRLSSVSLGTAPTVQLIFSSRVNKSKAENYRGQILQAFESVLRSAIILEIRYESKNDVRASHAPAVFSHGENESSNTTLRRSFTKHSPLSSGGENLRRRLKKDRASSSKTTWMQSDPHILTEGEIIEVGPSHMHWHDETNNDVHNVNQRRKDNVWEEESLASPNSKANQGRNGNKQRRQNSIVKGKVSLAHVIGKAEACSQRGGWSRQKALSIAEKLEQENL

SEQ ID NO: 177398 - protein, 111 aa, Oryza sativa
  unsure (1)..(111): unsure at all Xaa locations
  Clone ID: PAT_MRT4530_75053C.1.pep
PPPTSRTAEESPAKIRGRSLFLYVYNVREVSSRSGMDSDLEAFSHYPADGSFAALPGRTTAKTNYLNERFLSYXSSITIAMSSSXGKTNLSHDGLNPAHVPYXWVNNPTLT

SEQ ID NO: 177399 - protein, 36 aa, Oryza sativa
  Clone ID: PAT_MRT4530_75054C.1.pep
CTHLSHQTHITTLQLNYEKQFSHKYCLELLNNQVLP

SEQ ID NO: 177400 - protein, 197 aa, Oryza sativa
  Clone ID: PAT_MRT4530_75055C.1.pep
MEKKYKGVRRRKWGKWVSEIRLPNSRDRIWLGSYDSPEKAARAFDAAFVTLRGHGAAGADLNFPDSPPSCDARSSDPRQVQAAALSHANRAHVTPQQAAAALMSPPSLSPPPGFATGSEVVAPAVRADGSIDWRPVMAHPPPLYSPPGWGGGHAYDFLQPPPPSPPLPSCDDDMVDVVDESSASLWSFDTRDSYFRY

SEQ ID NO: 177401 - protein, 266 aa, Oryza sativa
  Clone ID: PAT_MRT4530_75056C.1.pep
MEWRDSFLDLILIPLSLLVPMAYHVWLWRAVRLTPLRTAAGINSATRRLWAISMTKDNEKKAVLVVQSLRNVIMGSTLVATTAILFCTGIAAVLSSTYTIKKPLSDAVFGAHGEYMMALKYVALLLLFLVAFLSHSLAICFLNEASFLINTSPTLLAGGDGAGDDGGRRLLGLPSTRDYMEEALEKGFTLNFVGNRIFFAGVPLLLWIFGPLLAFLSSLVMIPILYNLDVVNVKSHRGGDCGCGCGNGKSSVDKNGAAAAMDCTLV

SEQ ID NO: 177402 - protein, 202 aa, Oryza sativa
  Clone ID: PAT_MRT4530_75057C.1.pep
MMTPGSNTGLGLLVELCQRSRSKACTTVAMSILVSLAVTVSIFHERGSVQARGREGRGQLPIHGNRCPRSLRHQIHLQTGWLPMDPLPNGVAASGSASERGRRYRICLRTELRPPDPSPLNGVAQSPLLPVDAATVGKGDGGRACGEWGHPSFSRGRCRPCERRRRAHPWGRRRSPSSERRQWGRRQKKGEGGRNGEGGKGT

SEQ ID NO: 177403 - protein, 119 aa, Oryza sativa
  Clone ID: PAT_MRT4530_75058C.1.pep
MELRSCNGEGKRKGPPRASLAAHDPSSFSPLFATRRAPLTTLAAAMPLAAARLSHHPLPPTATSLSYQYALLDAGCLSRQLPRWRADFELIQQQQQQQQQQLASFENDAAVYGKLKLAS

SEQ ID NO: 177404 - protein, 91 aa, Oryza sativa
  Clone ID: PAT_MRT4530_75059C.1.pep
VSRPLDLTSRPDIVNCEQGLVILSYEGERVLISPRHDTVVETDANIDYTQGRSDVSDNVGSHYIHDLEVDMQTASSEENRSSLPNTQGSPP

SEQ ID NO: 177405 - protein, 118 aa, Oryza sativa
  Clone ID: PAT_MRT4530_7505C.1.pep
MASDLGRSTASGRRMSALTISKHEKTLNGHATADIHVRHRINGDFVTLANPTVCNPHTPVVAEFKPVIVSGLDLHDILVVANSADAITGVSTTASDFDLKIVIAAGTVAVLLAMFPCS

SEQ ID NO: 177406 - protein, 72 aa, Oryza sativa
  Clone ID: PAT_MRT4530_75060C.1.pep
MNGIFGKGEGLYNIFGAHELLIFGAVLASNLDQNEGLMTEARSMGHGTKGPIPKGISGKKESSPLHWKILPV

SEQ ID NO: 177407 - protein, 174 aa, Oryza sativa
  unsure (1)..(174): unsure at all Xaa locations
  Clone ID: PAT_MRT4530_75061C.1.pep
LACVPYGLIFASFIPFFLDIPVTSRFRIFGVNFSDKSFIYLAGLQLLLSSGKRSLIPGICGLIAGSLYRLNVLGIRRMKMPQVIASFFARIFAPSSGGSSRPSKSLVGNMSSRXRRAVQNNQPSGFAPVVEPPESSIAMLVSMGFDGNAARQALMRARNDINTATNILLEAQTR

SEQ ID NO: 177408 - protein, 94 aa, Oryza sativa
  Clone ID: PAT_MRT4530_75062C.1.pep
FVTPALWIPTSPSRGLVQNPYGHLPRPGSPNHPCAILFLNELRSNHWFASSRPFTSLVPSSTHIGFVPVMHAKVQETSPKEFKKKDGSSFFLFP

SEQ ID NO: 177409 - protein, 62 aa, Oryza sativa
  Clone ID: PAT_MRT4530_75063C.1.pep
YQHRSIDVQVDALIHDLAHTLYYGITYHARSSYNHQTQLVIINRLQSTQGMTHCFFYTLKHC

SEQ ID NO: 177410 - protein, 126 aa, Oryza sativa
  Clone ID: PAT_MRT4530_75064C.1.pep
MSERTIPPPVSSHGEDFAEVVVVRHGETSANALCIIQGGGESLDQLSERCVSYLNTIAGKHKGERVIVVSHGASIEELCRHADPTSSVRRRIPNTSICVFNISGSTGHWILERFGDVAHLNEDDFP

SEQ ID NO: 177411 - protein, 227 aa, Oryza sativa
  Clone ID: PAT_MRT4530_75065C.1.pep
MAWRQNTIRVCRCGHGGMQLTLAGKEFLLSFSATVNLFFDIYEIIMVVSRLVKLQVKISKLNEVCFAISVHADLGASQLIDQDQRDASPGPRSPSILPTGKAVLNSGDKFAGVQGHDTQANMMSSSTARHSHHLVCVWSRCRMWEMPWISGKDEVLDDEAVQRSPGSDCSGSHRRRSETETMQRSSWQSDARSGPLLAEAAFGKTCSWDKLSQTGPSSSSSAHSNTT

SEQ ID NO: 177412 - protein, 129 aa, Oryza sativa
  Clone ID: PAT_MRT4530_75066C.1.pep
MAQGRGSAAGRRNAAVLAMVLLCVLLHGELAESAVYTVGDRGGWGFNSGGWLRGKRFRAGDVLVFKYSPSAHNVVAVNAAGYKSCSAPRGAKVYKSGSDRVTLARGTNYFICSFPGHCQAGMKIAVTAA

SEQ ID NO: 177413 - protein, 224 aa, Oryza sativa
  Clone ID: PAT_MRT4530_75067C.1.pep
MSERTIPPPVSSHGEDFAEVVVVRHGETSANALCIIQGQTDIELNEAGRQQAVMVARRLAKEAKPVAVYSSDLKRAAETAQTIATACNVSNLVLSPALRERHMGDLHGLKFEDAVRSKPDAYKAFSSEDRSQEIPGGGESLDQLSERCVSYLNTIAGKHKGERVIVVSHGASIEELCRHADPTSSVRRRIPNTSICVFNISGSTGHWILERFGDVAHLNEDDFP

SEQ ID NO: 177414 - protein, 155 aa, Oryza sativa
  Clone ID: PAT_MRT4530_75068C.1.pep
METGGTERQMRWEGEQKLEPLSPPAPARPRACTHASPACTRSARMRSEAQIDRFSRTWLGSPICTRGARLGWPCRQPNTKGLHPWMRASELLKNQLQFSIQIALANLVQIFDNSSVSRMVRQECLLVNYFSSRNFACECDFLPHYTSTQIHYSNQ

SEQ ID NO: 177415 - protein, 110 aa, Oryza sativa
  Clone ID: PAT_MRT4530_75069C.1.pep
CRGKLGGGPPTCLNSWGGPTPQAQKIPYQAHPAGSPFIFGHNYRGLSARLFGFGPGPYYGESPDYPPLNKVGCGWAPPYPPLLDFPPPPQAGGFGYIPPESPGKPRRGGI

SEQ ID NO: 177416 - protein, 39 aa, Oryza sativa
  Clone ID: PAT_MRT4530_7506C.1.pep
FYSKEFCPPLWLEHKNRPRPPSSNLSRGRRRSSVINWPA

SEQ ID NO: 177417 - protein, 71 aa, Oryza sativa
  Clone ID: PAT_MRT4530_75070C.1.pep
RQSTSFSTQISAVKRKKMIYHVFSDLYTSYCCASASIGRFHVHVHAAFKFGNIKNCVLTIKTSYLFYGPIR

SEQ ID NO: 177418 - protein, 90 aa, Oryza sativa
  Clone ID: PAT_MRT4530_75071C.1.pep
MMITATTYDNNRMPVRNIPKVADPFDYGAGFINPNMAADLGLIYDIAASNYLKFFNCIGGLATGDNCTTAKRSLADLNLPSIAIPNLKTF

SEQ ID NO: 177419 - protein, 63 aa, Oryza sativa
  unsure (1)..(63): unsure at all Xaa locations
  Clone ID: PAT_MRT4530_75072C.1.pep
MMSDSGYYDLDDHKVSGFFLKETGPDQMTIKFDDYNLQILPPSEGKXKICGEYRPNTDEDDTL

SEQ ID NO: 177420 - protein, 121 aa, Oryza sativa
  Clone ID: PAT_MRT4530_75073C.1.pep
MGGEREGRSRGRPSSPPPAPAAASSRPLAASPLPRARCRTHAAPARLSRQPPSSPLCGEGGVGHMGSALGEARVSVLRLSPHHLRPRNPSTRSLPGEAHVNPSHSLRQYGFLFGLGPLLSD

SEQ ID NO: 177421 - protein, 55 aa, Oryza sativa
  Clone ID: PAT_MRT4530_75074C.1.pep
MRLRYSAHRTQRTSDSVMETRTTLDLKPGCFFLYAGSATMYGRSGPVAKHAAGVR

SEQ ID NO: 177422 - protein, 189 aa, Oryza sativa
  unsure (1)..(189): unsure at all Xaa locations
  Clone ID: PAT_MRT4530_75075C.1.pep
MPVPLPSAGSAREDRRAVWHRRLVPPPPNLQGEGGEGAGAAGSAAPKPPLRRICTGREGRVRAPPPLLPVTAATAACSPPAARRPLPRICKGKEGRGQAPPDPPPPSPPPSPDLHGNGGEGARAAAAVTRGRRVLSSRHVPPDPPPPPPXCKGKEGRGRAPPDPLPPTPLRWICTIGCTGAMSREGSTI

SEQ ID NO: 177423 - protein, 564 aa, Oryza sativa
  Clone ID: PAT_MRT4530_75076C.1.pep
MATGVSVENINPKVILGPSSIAECIVIRGEVAIHAQVSWFSPSMFWKSISIYSFSANARREINRYLTFFFQHLQQQLQTQPGSLPFDEIVYCNIGNPQSLGQKPITFFREVLALCNHPNLLEREEIKSLFSTDAIARAKKILSMIPGRATGAYSHSQLCEIFNKRCRFKSNTAVFVEFTLLYPRGIKGLRDEIAAGIASRDGFPANADDIFLTNGASPGVHMMMQLLIRNNRDGIMCPIPQYSLYSASLALHGGALVPYYLDESSGWGLEVSKLKNQLEDARSKGITVRALVVINPGNPTGQILDEQQQYELVKFCKDEELVLLADEVYQENIYVTNKKINSFKKIARSMGYNGDDLQLVSLHSVSKGYYGECGKRGGYMEVTGFSTPVREQLYKIASVNLCSNITGQILASLIMDPPKAGDASYDLYEEEKDNILKSLSRRAKAMESAFNSIDGITCNKTEGAMYLFPRIYLPQKAIEAARAVNKAPDVFYALRLLDTTGIVVTPGSGFGQIIRCYLFTCNSEFLTTQVWSFVKGCRDMAREMHDPAAGGEDTFDDLPLQGIP

SEQ ID NO: 177424 - protein, 137 aa, Oryza sativa
  unsure (1)..(137): unsure at all Xaa locations
  Clone ID: PAT_MRT4530_75077C.1.pep
SPLLFFLLTPHLPSPLLSSPQATERQRHTVAVRSDSGAYAEELRRATAAPVQRGAAERRLGASVAVRRRXGPGAGTARVAASMVRKGNGADVEELGRATAAPMRWGAWPEEPRRPSSRERHSTATGAIGRRREPRKE

SEQ ID NO: 177425 - protein, 142 aa, Oryza sativa
  Clone ID: PAT_MRT4530_75078C.1.pep
MATATGDFKEKTLARQLGLVWSTVYSGRNDDDVGCGSAWSALRSAVGTTAFPSICCTIEDEIKRINPRHGKERRSSGEPPQAAKALGGAGTNDAAWPSWPSPWLQPARANGMVYDRFDKGGQRSEELPRDGGTTKFDVAGVE

SEQ ID NO: 177426 - protein, 61 aa, Oryza sativa
  Clone ID: PAT_MRT4530_75079C.1.pep
TTEVTPATIGARAPRLPSAVPERPPSGAPRGCQTLQLRKIHSSWKLKPTFGKASKASHIIF

SEQ ID NO: 177427 - protein, 182 aa, Oryza sativa
  Clone ID: PAT_MRT4530_7507C.1.pep
IIAERERAKSGRKHSRDEEKKTSRHRSSSRGRSKHRRSTKRSDTEDDLEEERSKDKKKKSRRKRHERSDEDSESDSDKKRHRKSRKDRKRRRSHRRSDDTSDEDESGGEDRRRRRHRKRQHHHRKGASDGDSGSGASDSADDRKRSSRRRRHRKSESSGSDGDERHGQGAKRSKEKRGKEEC

SEQ ID NO: 177428 - protein, 77 aa, Oryza sativa
  Clone ID: PAT_MRT4530_75080C.1.pep
HNWCRCSALTPMVGGIHGELGPPNVGPPMAKVFPGSRRGDLERGAGTPPGFCNVDTPHGPGGVCPRLGYPRPPKTGP

SEQ ID NO: 177429 - protein, 119 aa, Oryza sativa
  unsure (1)..(119): unsure at all Xaa locations
  Clone ID: PAT_MRT4530_75081C.1.pep
KKKGHLGKVLNSQRKKRKGPPPKKKGGNTPYSPCPKAKATPPRGXKPPGNTPGWPENKPPRGGGPPPQGGKPAPQGKKRPPVKKQKAARSKTPGGPQPRPPWGKTWETQRSKQRRAKGP

SEQ ID NO: 177430 - protein, 116 aa, Oryza sativa
  Clone ID: PAT_MRT4530_75082C.1.pep
SSIEPIRAMQIRHALVHLITLGMVISSALMIWKGLIIMTGSESPLVVVLSESMELGFERGDILFLQMSKHPIRTGDIVVFNDGREIPIVHRVIEVVKLCNIHTNQSPLTFDLRYYV

SEQ ID NO: 177431 - protein, 34 aa, Oryza sativa
  Clone ID: PAT_MRT4530_75083C.1.pep
MKEEEPMEPLPDPIIARPPAGGQGAEAHVGRSHR

SEQ ID NO: 177432 - protein, 278 aa, Oryza sativa
  unsure (1)..(278): unsure at all Xaa locations
  Clone ID: PAT_MRT4530_75084C.1.pep
PGGGGGGXNRGXKKHXKXRRNFXXIXGXPPXPPKFXXXGXXEXGSPPXPPXKXVFXXFSPKKQNFFFXGNXSREKGGXXPXLXPXXXXIEXPPSWGXXKPXPPFFWPKXWGGXXLNXXSPLWLIPPXPXKEILGFYPLXXSPXPPXKIXPKGLLXLFXQNLXXGFPGPPPPKXXXKKXQPFPPGVSFXXXLPXGEKKPXXVGXXXPFPPXAPXSFLKTFPKGVFPXKTXLGGXXWKXPXXKGXKTXXFXXXXWGGFFXXGGGXPPPXXFGEKKXXXKX

SEQ ID NO: 177433 - protein, 115 aa, Oryza sativa
  Clone ID: PAT_MRT4530_75085C.1.pep
QVFDCDSDSTGMINHVKNKLICKGLTDQQSQEGSPMSAKSLNRWIGRWCRGGTPVFHGTSNLERQEAKSGMPSDDLEGQFPSIAAMAMMGRVMNKLRPCELQKRGPSVVWRTEGL

SEQ ID NO: 177434 - protein, 820 aa, Oryza sativa
  unsure (1)..(820): unsure at all Xaa locations
  Clone ID: PAT_MRT4530_75086C.1.pep
MPESSTNRFCKKVDLEVLPSRSDVGESSYHKHSLWMAHWARSSISPEPQNGQSCSPLKEIDDVGYSKDCGALPFELMKARVAERLMVGVSHGGVSAGNTRQFSTNMRGVARDVCQEVQCKNVDQMGSSFESSVMQKNVNLYAAKTVVSERYSVHKISDILVDSRKLCGTENLSSEWNHFPMFEINRKIDSILNPRRSALVTSSEKIFVPQKSVKINMSTSNVMSFSSKEYQLHTHQVTDENRQCKSARGMLSHLDNYTGLNSDHAGKKLKGHLSIEEPCSCSKDDTDSSCSLADEHHARHYIPNSKKSPHRSCKNSSVYSASKMENQFVEGSLLEHKSEVYGACKKKQHLEGVAFHESALHREYQIKSVKTTAITNEGDMDTNGHHVDFGNLLQSDQQYLNKHTEDSAVNLTESCKTPDAIDSAMILKSKDESLAQEKRTNNKLIDNKRKGPCLFEMFTQPTKSNVKCSIDRTSSGKSCGNMTSGLLGAQKQFSTKTDTFYSEAHHASKSTAGFASASMQKDLGYPSSAKTEQLVTSSVKGVSSGSKGNEAVNTSAEHRDFYPKATCANNQEWSMSKTSSMNLDLVLFQISRLKNPIPNALNESPACPDPSEKWLKRLQHDTSDSHVPCSKKPKVGDGPLAGGXSPMSAKSLNRWIGRWLTGGTPVFXGTSNLERQEAKSGMPSDDLEGQFPSIAAMAMMGRVMNKLRPCELQKRGPSVVWRTEGLESMRGFFINHTMMIGQLLXVILFCPLGAEPTPSALSSTSPRDRHRRFARVGEETEALARVEADEGIDRNCDGVVWFLTPEALKGHPIFCIQIIR

SEQ ID NO: 177435 - protein, 311 aa, Oryza sativa
  Clone ID: PAT_MRT4530_75087C.1.pep
MGDHTDIHGPAAGASTVHGSASKATSNHVFSSAGTAAIKTFKTNDGTAYYEVQPKIESSAEEDLPRGSDKTVFVEIVAPDGDGADPRLALLKCLCPPPATSSCWGAAYGSLTPRHDGTNNVFLYCMNCGRDTWIPPLSDGMTPMGIYFDEYPTQLRAIIVCDDYPRLYFERINMDALPRWDEYPGTGQYHMSSVGFHSGTHFVGATASNIVVIDVVGGEPGHDLLILRAFIVENGGFYLWNLNNNHIFVCSEKIYLCVFFRSGQDMSSVRSSVFVLEQIDGENAFVPTNDVGDFAIYLGSNQPLVLPAEDN

SEQ ID NO: 177436 - protein, 354 aa, Oryza sativa
  unsure (1)..(354): unsure at all Xaa locations
  Clone ID: PAT_MRT4530_75088C.1.pep
IPQGYLVATTTHSSYERPRISTYGKIMNGSCSHHPNSKQAVKDCFIYKQFAEQYASQLKKPTDGEAGTSTQKKDDIDPGPPGFHDHRKELNHIFEGPQAYESKRKQKLTDREINTIQPETPQYLXWSEVTIKFDRSDHPDXVVHLGRYPLVLDLVIRNVKLKRSLIDGDNALNILFAKTLDEMQILRIELRPSSAPFHGVIPRLSSTPLGQITLSVTFGTWENIRTENICFEVADFETTYHAILRRPALAKFMAIPHYTYMMMKMPGPQGVISLXSDIKQAATCDKESCNMVQTHETALGREEIRLAASTLAEGEVPATKLPKTREGDVKTKKIPLDPSDPAKTVVIGAELDYK

SEQ ID NO: 177437 - protein, 154 aa, Oryza sativa
  unsure (1)..(154): unsure at all Xaa locations
  Clone ID: PAT_MRT4530_75089C.1.pep
LPLPLSSRSRACLSGRVEAGTLGGRRGRRPRRWFRVFTTFSIAPAGASVRSFGGASLVKIFDSFEKDRASNFIPGPYXELGDAQPIKTVASMVPGPLGINGNQASPPALGWGNSGGPFPGRFGSGIPSYFGLTTGFTYTRNGGSYSSFHNYGTF

SEQ ID NO: 177438 - protein, 85 aa, Oryza sativa
  Clone ID: PAT_MRT4530_7508C.1.pep
KGPGPQFWRTPVFFKIMISPPLGGPPNNQNPFLLFSPPKRGFSPLTRFPFDPPLKKVGVFRGKTPPGAFGPVFPFAQNCLGAKNF

SEQ ID NO: 177439 - protein, 91 aa, Oryza sativa
  Clone ID: PAT_MRT4530_75090C.1.pep
MVIASKVLGSSDNYPAKRNSDASASSPFAFTSTPCSRGGNNDDNKDTHRSYPLLHLLARSSLNHCRRARPREREGLCWMVTVTMLEIDIRC

SEQ ID NO: 177440 - protein, 76 aa, Oryza sativa
  Clone ID: PAT_MRT4530_75091C.1.pep
MGDCRRGEWRDGRRLAGRRGAGMGARPWAAAEATADDDVYVFLTAVALLAVVGYGVKNRRRRSAKLLPSPPCALPL

SEQ ID NO: 177441 - protein, 50 aa, Oryza sativa
  Clone ID: PAT_MRT4530_75092C.1.pep
IIQVITVWWFTQKFGGSTEPPCAKVDPPLCRGLGGGGYHFRIKPHFPCIK

SEQ ID NO: 177442 - protein, 227 aa, Oryza sativa
  Clone ID: PAT_MRT4530_75093C.1.pep
MASQEEKTSVKSEEASSAAEEQPPQAAAPPPRRGVPPANPFDFSTMMNLLNDPSIKEMAEQIAKDPAFTEMAEQLQKTVQSPPARGAAQEAAAAAAPALDPSKYVSTMQQLMQNPQFVAMAERLGSALMQDPAMSSMLGGLTNPAHKEQLEARIARMKDDPSLKPILDEIENGGPAAMMKYWNDPEALQKFGRAMGVGPSGEGAAAAGGEHEEAEEEGGEEGEYDDN

SEQ ID NO: 177443 - protein, 409 aa, Oryza sativa
  Clone ID: PAT_MRT4530_75094C.1.pep
MGNYSPSKPVAFLLLLLLFGCLHYAQANPGHRRPKIDSVFSFGNSFADTGNFVELAAPLLPIMPFNNLPYGETFFGHPTGRATNGRIIMDFIADEFHVPFVPPFLGQGRQNFTHGANFAVVGASALDLAFFLKNNITNVPPLNISLSVQLEWFQKLKPTLCQTAQECREYFKRSLFFMGEFGGNDYVFILAAGKTLEELVPYVPKVVQAISAGIEAAVKFSLTIYTELTLPLSRTNNIVIQAVIKEGARYVVVPGELPNGCVPIILTLYASKSRGDYDARGCLKKQNALARYHNSALFEAVSRLRHRYPWVKIVYADYYKPVIDFIKKPARFGFNGSSTLRACCGAGGGPYNYDATAACGLPGAAACPDPAAFISWDGIHLTEAAYARISAGWLHGPYAHPPILSALRH

SEQ ID NO: 177444 - protein, 88 aa, Oryza sativa
  Clone ID: PAT_MRT4530_75095C.1.pep
EGTPLFPDPQTPVGRLRRRHADVDAAVPVADAAVDDADADPGVHAAPRPRRHPRRRAPTRHGRVLPRGHAERDPQDQQLPDDHRYYYR

SEQ ID NO: 177445 - protein, 440 aa, Oryza sativa
  Clone ID: PAT_MRT4530_75096C.1.pep
MGDFNVALVIVAAVVSVLVLLVSVYLLINYQHPDDANQAYFPKLVVVLGITVALLSILMLPADVANRQACRRAIYSGACSLTLPMKTLWLAVYIADAVLVFLVIPFAMFYYEGDQDKSVGKRLTSALLWVAVSAVVCGLILGILYGLVGKVDFTVRHLSSAVETFPNSFTSFSTGQPCISTSPKQCAAYTAPANSQTTWTMRATFPEYVVALATIVGSVLFTEATELGKKARELKKAAEALHQEEKSGKKGRKWRKNVKALGKELVLLEDDMKALEEMYPQGEQAEATWALTVLGYIGKLLFGAVGLLGTAAFAFFCFYLLIAVIAGEMMLGLKLVFITIHPMKWGGTLMNSFLFNVGLILLCSISVIQFCATAFAYYAQATAAQEIFGHTLQSLRGIKYLYKYNVFQYGFVALAILTLFYYAIFGWRKRKPTGRFQLSN

SEQ ID NO: 177446 - protein, 226 aa, Oryza sativa
  unsure (1)..(226): unsure at all Xaa locations
  Clone ID: PAT_MRT4530_75097C.1.pep
MSMPTFHLAPDLAVSRLCFGTMTMGEQSRLPESLRLLDAAFDAGVNFFDSAEMYSVPQRSETHGRSEEILGRWLRARRAPRDSVVLATKVAGPSGEMTWIRGGPASLDSRNIAEAIDGSLRRLGVDYIDLYQIHWPDRYVPMFGETEYDPSHQYMSVPMEEQLLALGRALDAGRIRYIGLSNETPYGLMKFLPLSRDSQLHSQILTVXNSYNLVLSNFHSWLADAA

SEQ ID NO: 177447 - protein, 82 aa, Oryza sativa
  Clone ID: PAT_MRT4530_75098C.1.pep
MTRPKYGSTRIGPLGPFGPSCEEINPRENDTGGVHSKEPTWERRTKTEREGEAVQGGGAAGGDGMEATGGGDAAAEGKKGER

SEQ ID NO: 177448 - protein, 80 aa, Oryza sativa
  unsure (1)..(80): unsure at all Xaa locations
  Clone ID: PAT_MRT4530_75099C.1.pep
ATSVQLLIVLXMQLAWLVSYMFRVQYEHITYCQQLTPYDKQVLQXKLQSLTEVELLVXLQQVEEEKLSPVSSQGLGCLLI

SEQ ID NO: 177449 - protein, 68 aa, Oryza sativa
  Clone ID: PAT_MRT4530_7509C.1.pep
MNGWIISQINSPHQSVSPISFDQLIIKRTATPNTDDFYDEENSGVPEDELSPEDEEEEERSWLGGRII

SEQ ID NO: 177450 - protein, 208 aa, Oryza sativa
  unsure (1)..(208): unsure at all Xaa locations
  Clone ID: PAT_MRT4530_750C.1.pep
NLGLSLATEVATELQRPSLPKRRHNNIHILSXAELATQAPQQLRLHCDATPTPKXTNKNDTHEGHQPKLLKNXILLTTSINNPIKRLHCVIIAKLRRTPTAKQLRLYSTITXKSDEHPSASETLQESTNXHCKQRVLGARRGQRXTTPPRRGTTPKDVVVVMPARGLARLSPAIPNQSSTQPSRTTTIAGPPRYPSTPKLSPPSHSSS

SEQ ID NO: 177451 - protein, 322 aa, Oryza sativa
  unsure (1)..(322): unsure at all Xaa locations
  Clone ID: PAT_MRT4530_75100C.1.pep
FVLVGKVDFTVRHLSSAVETFPNSFTSFSTGQPCISTSPKQCAAYTAPANSQTTWTMRATFPEYVVALATIVGSVLFTIFGGVGIACLPRPLIFSFVRRPKAVITRSQYIKEATELGKKARELKKAAEALHQEEKSGKKGRKWRKNVKALGKELVLLEDDMKALEEMYPQGEQAEATWALTVLGYIGKLLFGAVGLIISIAWVAHIVIYLLIDPPLSSFLNEIFVKLDGVWGLLGTAAFAFFCFYLLIAVIAGEMMLGLKLVFITIHPMKWGGTLMNSFLFNVGLILLCSISXEFKFCATAFXYYAQATAXLKEIFGHTXAS

SEQ ID NO: 177452 - protein, 99 aa, Oryza sativa
  Clone ID: PAT_MRT4530_75101C.1.pep
CYTTATYFSFLQELLMEGCASSKNKLNGVDHEHDYMNGVRGGDTAWQLRAATNKDCFICDFTLTTKSLETSFFEEDICLRPFFKPSNSISKSNCIPFTE

SEQ ID NO: 177453 - protein, 260 aa, Oryza sativa
  Clone ID: PAT_MRT4530_75102C.1.pep
MADDAGAGRTRSRRDPSDRPTRSGQFLIRALLRGELEERTADARFIPLTPIMEDLFVSGIEEIPEDTSVHHQQTDEPPPSYNTIRRGEGTLMAELREATEQLRLSFYANTDEETRAQMKQFWDEEFNAISEEATIERGLEWMRAEVVEAFSTHSGANVVEYELEDISHQCLIFDDCAKSYHHYNFIMKSKCPDSHLEGSCLFFAEVKVVDGEKHYFCCPLQPDDDGHCHGCQNSGIDLKHPSDGGYEEGNADSGFPFDPI

SEQ ID NO: 177454 - protein, 48 aa, Oryza sativa
  Clone ID: PAT_MRT4530_75103C.1.pep
INKLQQFFVSVENKKIPKLLIFSNNYIFVMKHPCHTHGYGICVPHCIL

SEQ ID NO: 177455 - protein, 169 aa, Oryza sativa
  Clone ID: PAT_MRT4530_75104C.1.pep
MVAIHGHLHLREAMPDPFGVDEGFPLPVKLRGVQVNEEALVHLPLFRAAEAESFAVVFNSFAALEADFAEYYRSLDGSPKKVFLVGPARAAVSKLSKGIAADGVDRDPILQWLDGQPAVPLLYACFGSTCWMGASQLTELAAGLRASGRPFLWVIPTTAAEVTEQEERA

SEQ ID NO: 177456 - protein, 69 aa, Oryza sativa
  unsure (1)..(69): unsure at all Xaa locations
  Clone ID: PAT_MRT4530_75105C.1.pep
STRPAACSXSSSRGGPVPNSPYNEXYYNSLAVVLQRRDWENPGVTQLNRLAXHPFRTAYTARTIASTCH

SEQ ID NO: 177457 - protein, 115 aa, Oryza sativa
  unsure (1)..(115): unsure at all Xaa locations
  Clone ID: PAT_MRT4530_75106C.1.pep
GTQSQAMSSRRGMVVDDGGCNLRRXAPAHGYGRRRMQPPVTSSGVAAGDELRRDAMHGQRRTWPLATSPAWRMAAEDATTSNKPGVGVVAKDVAXGDDLRRGAWTTEDATTGDDL

SEQ ID NO: 177458 - protein, 69 aa, Oryza sativa
  Clone ID: PAT_MRT4530_75107C.1.pep
MTVPSLAHVSYLRRRSSLERGEAMHQRCQIRPYLRRSSVRSAPRGRDAGELVARAAIGLLDSRPCVDSG

SEQ ID NO: 177459 - protein, 120 aa, Oryza sativa
  Clone ID: PAT_MRT4530_75108C.1.pep
MFLLYEYDIFWAFLIIASLIPILAFWISALLAPVREGPEKLSSYESGIEPMGGAWLQFRIRYYMFALVFVVFDVETVFLYPWAMSFDVLGISVFIEAFIFVLILVVGLVYAWRKGALEWS

SEQ ID NO: 177460 - protein, 194 aa, Oryza sativa
  Clone ID: PAT_MRT4530_75109C.1.pep
MAMVRSALGKISRRLSGSSAVICQAPPLPSLHPAAQLMTTAFSSPAAAAAARVRRIPNLQGLQHPPFICKGTERMQWAGQKRFFSVEAKAKDAKLMESARSSVKRLMAWMNEQANPRNTAIVLTIINVVYLGIFIRECLRSDEHAKDCTADDNGDRNSSYRIVKYGCHDPYACPWYRALVAQYAVMLVLVLFTM

SEQ ID NO: 177461 - protein, 45 aa, Oryza sativa
  Clone ID: PAT_MRT4530_7510C.1.pep
MRAGKGRTILLGRVLINWAASEGEAHARRTAGVALATWVRWMGIR

SEQ ID NO: 177462 - protein, 32 aa, Oryza sativa
  Clone ID: PAT_MRT4530_75110C.1.pep
GNYALMMATQNVEHALAAGCTDVLKYLNCYMT

SEQ ID NO: 177463 - protein, 596 aa, Oryza sativa
  Clone ID: PAT_MRT4530_75111C.1.pep
MEGGVHEFDGSTFRECFSLSWRNPYVLRLAFSAGIGGLLFGYDTGVISGALLYIRDDFPSVDKNTWLQEMIVSMAVAGAIIGAAIGGWANDRYGRRTSILVADALFFAGAAVMASATGPAQLVVGRVFVGLGVGTASMTSPLYISEASPARIRGALVSTNGLLITGGQFLSYLINLAFTKAPGTWRWMLGVAAIPAVVQFFLMLFLPESPRWLYRKGREEEAEAILRKIYSAEEVEREKEELKESVEAEARERSSSEKTSLVALLMTTATVRRGLVAGVGLQVFQQLVGINTVMYYSPTIVQLAGFASNQTALALSLVTAGLNAAGSLVSIYFIDRTGRRKLLVISLAGVILSLALLSAVFHEATSHSPPVGAAETAHFHGGALTCPDYSSRSSSSFWDCTRCLKAAAASAGCGFCAAGGGDKLRAGACLAAAAAASNATARDACRGEGREWYTRGCPSRYGWLAMAGLALYIAAFSPGMGTVPWIVNSEVYPLRHRGVCGGAAATANWVSNLAVAQSFLSLTDAIGAAWTFLIFGGLSVAALAFVLVCVPETKGLPIEEVEKMLEGRELRLRFWAKRRHHHGGDGDGGGEKTGGV

SEQ ID NO: 177464 - protein, 1226 aa, Oryza sativa
  Clone ID: PAT_MRT4530_75112C.1.pep
MDSAALSLTCAGLGGAEEDDGGAVVGYAKGEHCLDNLKDLQRFLRRDDPQRREVFKQVCKWKIASRDLVPIIENYQADRNLVITAVKVLVFLTMPVEPSSENVAQQIEYLWDLKAALTRNVAMAVIVSLLEDPLDHLERASFTEDDWKLVQLVLTLFRNILAIQEITLGQKASGEATQLLCLADSFLELMFQENVMDLILVLTQHMDEPSGYLQQENLLLLEIFHYLFLGRDPELIARASTAGSKDGSKSLCKGNPNSASANSLRKIRNVQRGPQKRIAWDNELLYTPREGTMEMIRNFLEQFLSGGYNGETTIFHFHVKLGITQCLPVLMQSVCDDIVKEHHSIQKSDITTFFKVARFVLAFQHEKASNAQKSNAAVQLPEASPSDHLDDNLPFLGDICGPVAATLNEGMFNLVISRWREAYDSLKETHDYKTLSAAGSLMKNMIDMVYLVLKVLPDDSRESQTARVLLYKLFYDQTEQGLTQFLLNLFRSFDTHKQPKSDLADLLGTIHIMLQLMEKLQARGALRVAKRTRKGRKKKASKNKIENTNLNAEKMEQSNVDSTDGTKSALESLPDLKNVDSVAEPPLTEQEKVVSNGMDAPDELAGTSVNLDSTSHCEGEPSRADNGELKGNLIDEEDGTSDSSLDDQPPATSEVDFNVSRLISTLANNSVVQNICWLLKHYKSNSFRTNHYIICMLRRFCEDLELAPMLYQLSLLTTFYDILADEKSSNSKEYTNIVNFLSKIVRKMLRVMKKQPLLFVDVLFWKTRKECHCIDADALLSDITKDATNKGGEIGSSKGWRGSINIADSLGDDEVDLVIPHEPYNADKDDDSSSGEHEDVSKRSMGATNKSNRILSFSDSEADDNDSSIQIEKNRNTVSRGSQNSEAPKRRGRSIFSEEQEKLMRDLYEKYKDDRKCTHLIAEALDPSGKISSVQVYRKLTQLGLRNAMKRRTKVPEAPLSAQELATQTDQMLGEHNCDPKPETTRRRRKRQNVSHASYEDNTTDGKSSDEETLQAIKSRTKNKKVPLVGFSPSTSQHQDGLADPDSDDETIGSMLRSGKKKRLLTPDNAMNIEKHQESPDSTNTSNYSPEISQKQEALQDTYSGDEIIDSMHRSGKKKRLLKSGFAANTQEHEEPLKNIGQDDETISSKDNLHHGLNSSNNSGGAGETELLDDFIEPELDNVENTEQRVIDDINITESGDMESSFADQKPGLKRRHKLVIDDDDD

SEQ ID NO: 177465 - protein, 65 aa, Oryza sativa
  unsure (1)..(65): unsure at all Xaa locations
  Clone ID: PAT_MRT4530_75113C.1.pep
WEPAPYGEVGLLVSSDGSSPLRVLLDAGALLRDPPDVPDLXSPAQRWLPDCGQLGPPGSKANSCE

SEQ ID NO: 177466 - protein, 105 aa, Oryza sativa
  Clone ID: PAT_MRT4530_75114C.1.pep
GRVGQHLVAVDLQMVKVSEEDGVEPCSTSHVLAWELSPSLRTTLLGSSPGQDTNSTSHFDSVANSFLEAYSSALVDMEFHQLATTALASLNKEKKRTVENIFKLF

SEQ ID NO: 177467 - protein, 48 aa, Oryza sativa
  Clone ID: PAT_MRT4530_75115C.1.pep
AQAFELVKEGPVPVEGKPIYGHPAPANGHGYGASLAAAAARASAHTSQ

SEQ ID NO: 177468 - protein, 367 aa, Oryza sativa
  Clone ID: PAT_MRT4530_75116C.1.pep
MAMERLISSPLLPRRPPRAAFSRPPPSLAAAPPHHRAGGAASGYGSRPPLASLLLSRHHHHHQPPVLAANPAADVAAGEAVPPATATASRRFLQKVASAAAATLLATIALTLIQPAWAPPALASFHSAAKAGGGIFKSELLSSAWTGFLAGCLHTLSGPDHLAALAPLSIGRSRVESAAVGALWGCGHDAGQVIFGLLFLSLKDRLHIEVIRTWGTRVVGLTLLVIGALGIREATEVPTPCVALENGGGGGGAHRGPLDALPATRKKITFATFATGIVHGLQPDALMMVLPALALPSRVAGAAFLGMFLVGTVVAMGSYTVLIGSCTEALKERVPRITEKLTWAASLVAISMGLGILISQSLGFSLY

SEQ ID NO: 177469 - protein, 66 aa, Oryza sativa
  unsure (1)..(66): unsure at all Xaa locations
  Clone ID: PAT_MRT4530_75117C.1.pep
AXXASCCXAASAMEXSAVLMXXPXPVALLLLHGHLPQXCTPLILIPPCTSMRERERERXRXRXSFL

SEQ ID NO: 177470 - protein, 71 aa, Oryza sativa
  Clone ID: PAT_MRT4530_75118C.1.pep
LRFIGHSICQRQTLVNSSRQVDGNNQLSRVGLASQVVVVCMCQASQVVTRSKVTGQNKLYNKQCTSHLTLT

SEQ ID NO: 177471 - protein, 98 aa, Oryza sativa
  Clone ID: PAT_MRT4530_75119C.1.pep
MVEAEATKGPHRDRLDDAAISRRRWRRAAVAGGGSGRADTADTPHASSVVPLLCYVLPSLSDPKLARVASSFLSTSDSARRAALALIVASELVGTRGI

SEQ ID NO: 177472 - protein, 765 aa, Oryza sativa
  unsure (1)..(765): unsure at all Xaa locations
  Clone ID: PAT_MRT4530_7511C.1.pep
MDPDENPTPPPPYQEAEAAVPVDEQPPPPVEEEQAEAARQESAAPVEQDAAAAEGGGGDRAAGGERSREELERVVMELGFQNDYLKSQIAAAEGGSGAAESELVKGLKEQVERLRKEVEEHKQTQKATEAALEHVNVAYAEADAKVQDLTAKLTQAQQKMDKELKERDEKYVELDTKFQRLHKRAKQRIQDIQKEKDDMEARFNEINQKAEQASSLQSAAQQELERARQQASEALRSMDAERQQLRTVNSKLRTNLDEARVALEARNNVLEKLRQSMFEKEQLLEQTQASLQSAEEKRNASIAELTAKHQKQLESLEAQLTEVSAERTKASETIQSLQMLLVEKDSEIAEIEAASTGEAARIRAAMEELKGELAHLKDQHEKERQNWETTCESLRTKLEASESACHISVIESTKVKSQLELELSKQNQLLQTKDSDLLAAKDEISRLESEFSAYKVRAHALLQKKDAELNTAKNSDLIKAHEEAIREAEKEISAALAERDKAIHDLQIAQSKYGEEIEARDLALADSDKKLKNVMAKLDSLTSKFLSEKESWEKNVASVEESWRLKCESVKAESNGHAGDELKKNLVELTVKHEKLKEEHDSFRDIADRMLEEKDREVAKLLRENKDLHNSLEAKAAFGVDLVSINGNQNPGPAKQDAMDIELAEQQILLLARQQAQREEELAQSQRHILALQQEIEELERENRLHDQQEAMLKTELRNMERSQKREGIDMTYLKNVILKLLETGXKWEHCCLWLQHYCNLAPKS

SEQ ID NO: 177473 - protein, 324 aa, Oryza sativa
  Clone ID: PAT_MRT4530_75120C.1.pep
MVEAEATKGPHRDRLDDAAISRRRWRRAAVAGGGSGRADTADTPHASSVVPLLCYVLPSLSDPKLARVASSFLSTSDSARRAALALIVATASSPLEQWMKRFEEAERLVADVVERIAERESVSPSLPQELQRRTAEIRRKVAILETRLDMMQEDLSQLPNKQRISLKELNKLAAKHSTLSSKVKEVGAPFTRKRFSNRSDLLGPDDNHAKIDVSSIANMDNREIIELQRNVIKEQDDELDKLEETIVSTKHIALAINEELDLHTRLIDDLDEKTEETSNQLQRAQKKLKSVTTRMRKSASCSCLLLSVIAVVILVALLWALIMY

SEQ ID NO: 177474 - protein, 264 aa, Oryza sativa
  Clone ID: PAT_MRT4530_75121C.1.pep
MPKPPLSPEEEAKFEAADCLFCGALISVLTDNIVDVYMHMPLGKNMWDALEAKFGLSDAGSELYIMEQFYDYKMMLAKELENNNCELPDKFVAEGIIAKLPPSCSDFATSLKHKRQGFSVTDLIGFLGVEEKGRAKDNRGKVIEGGSTANLVQKTNPHASYNNKKKVKPDVKPKATTNFKKKGKGKAKSDCFVCGKPGHWVKNCPERKDKKSANMVISEGGETLGYGACLATMTQVGPYPLSFSLGLGSKLVSRQGFPNPGVRT

SEQ ID NO: 177475 - protein, 70 aa, Oryza sativa
  Clone ID: PAT_MRT4530_75122C.1.pep
MTRILPSSPISASTCSSAPVAASEAISESTTQKEMSMTSIRAYHLRTRYVDLLYHHTAQLPLYIHDDYEL

SEQ ID NO: 177476 - protein, 104 aa, Oryza sativa
  unsure (1)..(104): unsure at all Xaa locations
  Clone ID: PAT_MRT4530_75123C.1.pep
APGWGGCKFCFFFPRTAXLFLFFGANKGFGFVSGGSKFGLENGSFGCNPCKCGPRGGGSCCFCDQKEIISIQFFPWSPSSQHQVQMPCFCHLGCRQVLNLVGAR

SEQ ID NO: 177477 - protein, 121 aa, Oryza sativa
  unsure (1)..(121): unsure at all Xaa locations
  Clone ID: PAT_MRT4530_75124C.1.pep
QYWRVLDFLYHHPESLHTFLFLXDDLCIPTDHRHMDGVXVNTYTFVSXDTHKAWFVKFHWXPTCGVCWFADDQATRRKGMIHTHRTKXLCCSMCHGNFRECELLLQVINPEEEEWFDFYRV

SEQ ID NO: 177478 - protein, 67 aa, Oryza sativa
  Clone ID: PAT_MRT4530_75125C.1.pep
ISAPVMYPLPTVGVKAIVLSTDNTLPMNHRHFVCLKRLESPTHNTLAVLYTYLPTNDVFCVPTFCQQ

SEQ ID NO: 177479 - protein, 76 aa, Oryza sativa
  Clone ID: PAT_MRT4530_75126C.1.pep
MAMATAAPILDVAAVAAAAPCMTSSSVWQRLLPLPSPTWWQRLLLTSPDSCRAKLLADWPIEARPLVDRSVRVTRL

SEQ ID NO: 177480 - protein, 268 aa, Oryza sativa
  Clone ID: PAT_MRT4530_75127C.1.pep
MVTALAHVIRAAPDLHLPHHPSSSASAAAHPQQASSFYPTAAAAASSPSDQLAAAAAAEEQGRRRHYRGVRQRPWGKWAAEIRDPKKAARVWLGTFDTAEDAAIAYDEAALRFKGTKAKLNFPERVQGRTDLGFLVTRGIPPAATHGGGYYPSSSPAAGACPPPRQQQTVVPYPDLMRYAQLLQGGVGGSYMPFGGAATMSSSTVSSSSAPQILDFSTQQLIRAGPPSPMPSSGSGSATAAASSTTSASSPGAWPYGGSERKKKDSSS

SEQ ID NO: 177481 - protein, 87 aa, Oryza sativa
  Clone ID: PAT_MRT4530_75128C.1.pep
ILFWGPLKKSNSFQAAGFKLWSFKGAPPCFFTFIYFLYFQQRSDAAGPGVCPPCPGSSPSLFSIEFFFSSFFFFFIFFFFKKFVTFI

SEQ ID NO: 177482 - protein, 211 aa, Oryza sativa
  Clone ID: PAT_MRT4530_75129C.1.pep
MALSALFLLKPFAAHRARAGAPPPPGPPGDAFAADIVASFMLQKTVSELSGSTSKLEFDIYGEIGIPNSTVAVNFLQPIGAPNWTNVIFSIVPYPKYSSISSMYLSILRASFMSLVVEQSTLHLTESLFGDTSLFEVLKFPGGITIIPPQAAFLLQKPYASFNFTLNFPIYKVQGRMNELKDQMKAGLQLDPYELCKKSIFLFHGDEELKD

SEQ ID NO: 177483 - protein, 177 aa, Oryza sativa
  Clone ID: PAT_MRT4530_7512C.1.pep
ARGHSPLQIHPQASVGGGSRRREAARGGGRRLTAAALLGQLLASAAAGGSSRRRLFTGSGARRQPRREAGARQQTTTGGVRAAATATGGVRAAATATGGRRAASAATGRGRAPVASTRTLADDTAAPRWYESFHVYRAHLTTHVAFTLKAENPIGISLVGFGYLSPSRTSCICELIA

SEQ ID NO: 177484 - protein, 367 aa, Oryza sativa
  Clone ID: PAT_MRT4530_75130C.1.pep
MEDAAVEEAEVSGGAAEFAPALVAAHPLGRSVAVAVGPELRVFDLKASSAVSLSDNSGGGSHSDAIRAISFSANGALFASAGDDKLVKVWKTDSWCCIRTITSEKRVSAVAISNDGTYVTFADKFGVIWLVTMGESGGEQEPTDNKPVSIFGHYCSIITSMVRLWDYINGCLLDTCQVRDKVGELLEPNETEDNNLSVADICPTNDGLLVAVAIQSLNGVMLLACDLIAKKLSFLKVVTTEKCYIPTSLSSSFSADLLWTVMGASNMPNQATSQLCTRLKIIPHFKKDPLAGCDHVPTVLEDSEVPHGEKLLLALQGSLDIAKQEEVLASVLAALKVSMHKMLVKKHYSEERREQRKRGRNDKKIKK

SEQ ID NO: 177485 - protein, 129 aa, Oryza sativa
  unsure (1)..(129): unsure at all Xaa locations
  Clone ID: PAT_MRT4530_75131C.1.pep
TWFSYSIFNLSIVYFACQTFCPAGALLVEDAIATFTALDHISWLQCVLSSTISSFHNPHHLVDISKHMDADANADDATILNPAAAAEGKEKKTDQEEAVAGTTEQPRRVKLPAELHPGVGXGPSPNFGD

SEQ ID NO: 177486 - protein, 132 aa, Oryza sativa
  unsure (1)..(132): unsure at all Xaa locations
  Clone ID: PAT_MRT4530_75132C.1.pep
MHVVDEDFIWHTMEVLCAYRMRSXIWKESKFGMIGYAKFVSCTRRFPRGLGXSMSLVRGFRLSTSYINREGASNRRHTGGRTSGKAAVRPAANLRSDRRRLQATAADLGGPTGRSTPVRPTAIKRSDRDPSN

SEQ ID NO: 177487 - protein, 154 aa, Oryza sativa
  unsure (1)..(154): unsure at all Xaa locations
  Clone ID: PAT_MRT4530_75133C.1.pep
PWPRGRRPPASLPGPPRRAGRTPPARASARLAAAPPAAGRRSRPSPGTTRTPPRRAAAPPXPAPPGTPPARPPCPPAPSPASPPPPRSPPCSPGSGGRGAARPARRRARPWSAAAADAAAEAGAGAPPPPPPRNPPPGSAPRRPATAPARVLPP

SEQ ID NO: 177488 - protein, 320 aa, Oryza sativa
  unsure (1)..(320): unsure at all Xaa locations
  Clone ID: PAT_MRT4530_75134C.1.pep
SGSPGCRLLHANQDEKFGMLKTMFSAFSSSYDRACDYHMIWHQCSILXEAIGAFSSNDLHVLDLSFVYQLLCLGKCHWAIYVILHMPHLDDAPYIHEKLIREILSQYCESWSKDETQRVYIAELGIPVEWMHDALALYNEYYGDQQSALENYILCGNWKKAHTIFMTSIAHSLFLSSKHQEIWDITSSLEVHKSEIADWELSAGIYIDFFILRNSMQEKSTMDDPDQLEKKNESCSTFFGRLNDSLIVWGSKLPVEARACFSKMAEELCELLMNSPGEGLTPDLYMGCFQTMLNAPVPDDHRSSYLQEAVSVFTDILCRD

SEQ ID NO: 177489 - protein, 296 aa, Oryza sativa
  Clone ID: PAT_MRT4530_75135C.1.pep
MEEVESSYRSEMMDGEGWKMMQPNTNKQLVQIKTRSSSMQVVKEEIEEEEVAGGRGRRRGGLRRSVSGRGYNSSNQKVIANANTNRDTNNLAMQTQVPTHTREGPTFTQLLLGEEDFDLPPYVPDDAKESNQFYQQTTNEFLNMNQLDNNGIGTAQLESREHMMTYGLSSGISSQLLGSQAIDVVDVVGCLTSPRGTQLHEGHLAHLMSYIRACRDLEQHTPPNFVMHQSIGPVLNHYALSAEMSYSMRYPENAATRGPQNILGFPIKNADTRTERDTHKHMYTHPNTDTCMYTHT

SEQ ID NO: 177490 - protein, 1303 aa, Oryza sativa
  Clone ID: PAT_MRT4530_75136C.1.pep
MLRLRAFRPTSDKVVKIQLHPTHPWLVTADANDRVSVWDWEHRQVIYELKAGGVDERRLVGVKLEKLAEGDTDSKGKPTEAIRGGRSSSSDAPLVAFGSSDGVIRVLSMLTWKLVRRYTGGHKGAISCLMTFMSAAGEVHLVSGGSDGLLILWSADHIHDSRELVPKISLKAHDGGVVAVELSRVMGSAPQLITIGADKTLAIWDTVTFKEIRRIKPVPKLACHSVASWCHPRAPNLDILTCVKDSHIWAIEHPTYSALTRPLCELSSLVPPQVLTQHKKLRVYCMVAHPLQPHLVATGTNIGIILSEFDPRALPAVAPLPTPAESKEHSAVYIVERELKLLNFQLSNTANPSLGNAGVTSETGRSRNDPLEQLVVKQTKKHISTPAPHDSYSILSVSSSGKYVAVIWPDIPSFAVYKASDWSVVDSGTGKLFAWDTCRDRYALVESALPPRMPLIVKGGSSKKAKEAAAVAAQAAAAAASAASAATVQVRILLDDGTAHVLQRSIDGRSEPVIGLHGGALLGVTYRTSRRISPVTATAISTVQSMPLSGFGGSGSSFASDDPFSSKEGPPQNFQLYSWETYQPVSGLLAQPEWTVWDQTVEYCAFAYQQYIVISSLRPQFRYLGDVSIPFATGAVWHRRQLFVATPTTIECVFVDAGVAAIDIETKKRKEEMKAREAQSRAAAEHGDLALITVEGPKTTTSEKIALRPPMLQVVRLASFQYAPSIPPFIVPKQSKLDGEDSVFQKELDDRRYAEVAVAGGGVSVAVTRFPPEQKRPIGPLVVVGVRDGVLWLVDRYMCAHALSLSHPGIRCRCLAAYGDPVSAVKWATRLGREHHDDLAQFMLGMGYATEALHLPGISKRLEFDLAMQSNDLKRALACLLTMSNSRDVGQETTATDVTQILNLAVAKQAKQESLADAVQGIVKFVKEFFDLIDAADATGQADIAREVLKRLAAAASVKGALHGQMLRGLALRLANHGELTRLSGLVTNLIIAGHGREAAFAAAVLGDNALMEKAWQDTGMLAEAVLHSQNVCDYQTLTRIFYFQAHGRPSLRNLVIAWNKMLQKELDHTPTVKTDAAAAFLASLEDPKLTSLGETEKKPPIEILPPGMPPLSAPPIVIKKSGAKPGLPNAAQAPTAAIGAPMAQDTPMVQGTPMVQGTPMAEGTTGAQAAPTAQGAPAQTQNPEEAKPSESTAAPDNAEKTATPDNAERMAAPGNVEATTEPAAAPGNVEGTAAAATDATSNADATSGAPAPAADSNGADPPAVTPGQVTNGAPSTETPETADKPSSTEPSPAPPIPNVPAV

SEQ ID NO: 177491 - protein, 522 aa, Oryza sativa
  Clone ID: PAT_MRT4530_75137C.1.pep
MAFLNIKDTNRVMFLASLLLMAMVYSCAAQGYWYSYLVDVDADVDDDMMPLRVLPNARAALIRAVADAPGRREEQALHCLACKLGLAGDAVLATALLTRYARRGLLDPARRLFDEMPRRDAVAFNAMLAALVASRRMADARELFERMPDRTPASWNTMVTCYCKAGDLGSAREVFEASLGATASNVVSWNTMIDGYCKAGRMDAAQELFDCMGCSFSSSPSPDVVTWNTMMAGYLRRGDPATAIAMFRRLMRQTVQQQTLMMPTTVTIATVVTACTQAGDFAFGRRVHHYIRQLGTRIDAVLSNALIDMYFKCGSVDRALDVFATMPDGPNLFCWNTVIAGLGMNGRGEDAVRAFHDMVGRSRTCRGIIRPDGVTFVALLSACSHSGLVAEGRRFFAEMVPVHGVEPREEHYGCMVDLLCRAGLLGDAVRVVRAMPVRPNAKILGCLLLHARRLSSASEEDGVRVGEWVADRISELDLDDGAAYGLSNMYASLQRWDHVEMHRIKVNAAVRHKQPGQSSCMI

SEQ ID NO: 177492 - protein, 366 aa, Oryza sativa
  unsure (1)..(366): unsure at all Xaa locations
  Clone ID: PAT_MRT4530_75138C.1.pep
MEKRRNHGGGLTLLFHFHLAVLVVLPSLLPRARAAAAADSSWHPNHPPTRRGHHVGGGNASPSAAAGHGLPPLSAPAPAPIAGADDLPAFGRAPKQAPPHFGFPLQPTFGVAAPPVAPTAAGEGYPFIGSNPTVPLPTGMTDTSTVLPLPDRGDGNDKQQRLRRXQTLSMVTATVAAVGDERGGIGRGRGRLRRTRKREAAAVEGGSGRGRGGCTRRWRRRTRMRAVAAVEGGGSDDDGGHGQGQQHLCFCCSCCYHRFLSLGSSPTLLLQLFKDGVLQTKIRDKDDPRLSKMRKEVVAGGKDAMEVDNDFFLVPVKISDHQWRRPKFYGNYVRKKMDIAIDSTNRIPRIRKRNQILSKPKTALIR

SEQ ID NO: 177493 - protein, 115 aa, Oryza sativa
  Clone ID: PAT_MRT4530_75139C.1.pep
MFCLKESSDQDDDIPSLAEDHKAKAEFDDLPPLVDSDEDDMPPLTDSSEEDNPKPSKVTKTEPPKKQAVKKGAIKKEQPKKIPPTKEIFDDLPPLVDSDEDDMPPLTDSSGEDDP

SEQ ID NO: 177494 - protein, 77 aa, Oryza sativa
  Clone ID: PAT_MRT4530_7513C.1.pep
LHSKQYCWAARCTCLLLSGVLLKLLQHMNSDVKVAGEHRSSLLQVVSIVPALAGSDRLEAATPVPILRGVRPVPGRH

SEQ ID NO: 177495 - protein, 146 aa, Oryza sativa
  unsure (1)..(146): unsure at all Xaa locations
  Clone ID: PAT_MRT4530_75140C.1.pep
TRKPDMTNPELSIPDKLPPSTXFRAVLSYVAYTWQPGQHFLFLKHGGAYLLYILSLLFPPSPLSLSLSLGAHSLSLVXRCRAAGGGAGHRDRSGHGRDSGATHEGGGRAGRGTTQSPPGGPHPTPPPPSYSRSWAPLALCPMMTMT

SEQ ID NO: 177496 - protein, 92 aa, Oryza sativa
  Clone ID: PAT_MRT4530_75141C.1.pep
EKWGERERGSRGVIAPSLLHAGTTGGGGIRGGGGARARARRREQREVGDDGEEMRWDEDGSGRRRRRKKGQSPGPSIPGQSDRQGAAGQTGP

SEQ ID NO: 177497 - protein, 99 aa, Oryza sativa
  Clone ID: PAT_MRT4530_75142C.1.pep
ISSLVPQILNPTHKNCGAVIHPKFTLFFESYVKRLLHTFTLCDLTCKNCMAFENKSCHTHFFEGETTSGKSSCSNKLNICYYRLCQVNRLLTSYTKKGS

SEQ ID NO: 177498 - protein, 110 aa, Oryza sativa
  unsure (1)..(110): unsure at all Xaa locations
  Clone ID: PAT_MRT4530_75143C.1.pep
XTQRTSLVFSARYSNMSTTYGEQSSYIHESAADVTDAQGRRRRRRFDGEGTGRHGSERTNESYVRASSIRQCRGRQTTGGGEGELYARFAGDHPAGVPAGRAALVYMLSR

SEQ ID NO: 177499 - protein, 79 aa, Oryza sativa
  Clone ID: PAT_MRT4530_75144C.1.pep
MGVEILLRWLANGEVSAQWLCIEGGLAGGFAEADMHSLARESITMGEGLAFGPAMAMTVGAFSPWGVVVFSVLSHGFFR

SEQ ID NO: 177500 - protein, 38 aa, Oryza sativa
  Clone ID: PAT_MRT4530_75145C.1.pep
FYLYIMHIKDKKFFFSFSKSSYKLLQQIISLSIGWLIN

SEQ ID NO: 177501 - protein, 55 aa, Oryza sativa
  Clone ID: PAT_MRT4530_75146C.1.pep
FMNRRPKPGIMDSHVQSKEKSPVISRGCYEQAFTLILFLFFYVSALRNLKILFFS

SEQ ID NO: 177502 - protein, 173 aa, Oryza sativa
  unsure (1)..(173): unsure at all Xaa locations
  Clone ID: PAT_MRT4530_75147C.1.pep
TTGVLXHGKASVIKEXHKSFPSXHTSWSFAGLGFLSWYLAGKIKVFDRRGHVAKLCIIILPLLLAALVAVSRVDDYWHHWQDVFTGGILGLVVSSFCYLQFFPMPSDENGLWPHAYARHILNPDQLENNAQPTSVDRPNSLPNGSFRSPNGLEMGNTGQGQALDFMEAGRRYQ

SEQ ID NO: 177503 - protein, 1293 aa, Oryza sativa
  unsure (1)..(1293): unsure at all Xaa locations
  Clone ID: PAT_MRT4530_75148C.1.pep
LEEKLIEIFMLAVFDCCFSTETMEQFEYKNYLDNIVLQLREQFVDSSLMVFNFRDEGKSLVSGLFSLYGITVKDYPCQYLGCPLLPLEMVLHFLRLSERWLMLEGQQNFLLMHCEKGGWPVLAFMLAGLLLYMKQYNGEERTLVMVYKQAPKELLQMLTTLNPQPSHLRYLQYICKMDDELEWPIQPIPFTLDCVILREVPNFDGVGGCRPIVRVYGQDFLTVDKRCNVMLPPSKPRKHARRYKQADNISVKLNVGSCVQGDVVLECLHIDDSLEDERLMFRVMFNTYFIQSHILPLNFENIDVSWDAEQRFTKKFKAEVLFSEFDGESDASIEVASDYDDEVEVGSIDVFFEAVEIFSNLDSQEGQRDAERSSFQANGDPTCANTSTDANESTQLELKRKSFHDFASSYGPPPNIPCTSLRTSKVSSLVHPSLRPLRTVSSLSQSSFEEYLDISPPSPTFHEKHQQHFNLDPPSLIPPWQLRLAKTKENEIYPCTLSFLPLSPSNKYAHHPPFPPPPPPPPNSLSSKIPQHGTPPPPPPPPPRASHPSSSNYVEEVPMETILNQPTLSIPLEACKDELLHCKENGGIPIPPPPPPLCGKCVQISTEKFLVGCEMFLIPSLIPQSPPSPPPSIPLSFPSALPSTSTSFTALHQLSHIKTAPPPPPPPPRGLLETSCLSPITSSLREHSKILPPPPPPLPKECLPTPSPPQSPDCPSFPTKYATTSPLPSPPPPPSPPSPPPPQRENTSVGIQGGIPPLPPPLPPTLGDYGVAPPPPSIPPPPPVGGLGGPPAPPPPPGVPGGPPPPPGGRGLPAPPGGRGVVGHGLTRSLGLNSAATARRSTLKPLHWVKVTRAMQGSLWAEIQKQADANRYXLFFSFLITRKYNFSTSFTIVTTKNTYHVCSHSEFDVKELESLFAIAPKTKGGSKSDGASKSLGSKPDKVHLIDLRRANNTEIMLTKIKMPLPDMMSAALALDDSVLDADQLENLIKFCPTKEEMELLKNYTGDKETLGKCEQFFLELMKVPRVESKFRIFAFKIQFQSQLRGSEKLKVIMEKILFLGNKLNQGTPRGQALGFRLDSLLKLTDTRANNSRMTLMHFLCKVWRYXLSYTSCSYKIKHEYERXMLIPVYQGLADKSPHLLDFYEEFVNLEAASKLQLKALAEEQQAVVKGLQKVEQELAASESDGPVSEVFRKTLKEFTDASGADVRSLSALYAEVGKSADALAYYFGEDPAKCPFEQVTSTLLNFVGLFRKAHEENIKQIEADKKKAQKEAEKEANQGLERIVTKFLANRLL

SEQ ID NO: 177504 - protein, 47 aa, Oryza sativa
  Clone ID: PAT_MRT4530_75149C.1.pep
MAKVVAEDGCSEISMEVSVAAVIPRRGPGEDTTGHGKYDEVSGCTKM

SEQ ID NO: 177505 - protein, 43 aa, Oryza sativa
  Clone ID: PAT_MRT4530_7514C.1.pep
CLICPWMKARTAEIDGLLIVSTTCCESVIMKDNKSIIQIHSAL

SEQ ID NO: 177506 - protein, 112 aa, Oryza sativa
  unsure (1)..(112): unsure at all Xaa locations
  Clone ID: PAT_MRT4530_75150C.1.pep
LLTMKFACFLIANKGSIGVSADELSGRCIGLQGLHPIGFYSIILLFYYISRLPLYHHLHWTYSRLLKPYRYRLDQTDWHARISSIFGLAQELSRSPRPVCSIFXINTSAPTV

SEQ ID NO: 177507 - protein, 132 aa, Oryza sativa
  unsure (1)..(132): unsure at all Xaa locations
  Clone ID: PAT_MRT4530_75151C.1.pep
HFKLHKHTDVTMVTIDTTIVHIIAQLEDIAVEVXNPIRSPATVLISNGRQMCIQAPFLAHEYLMESSWSLISNXSSLISKFHLGRPQSQKLGVASSIMDVXACNFIXGLDPSGMCPTWWSTTLETPWSSSHL

SEQ ID NO: 177508 - protein, 40 aa, Oryza sativa
  Clone ID: PAT_MRT4530_75152C.1.pep
GILEGRDTFYLVQIHITTDTYSPYPLKTRYTTILGPDGTY

SEQ ID NO: 177509 - protein, 189 aa, Oryza sativa
  Clone ID: PAT_MRT4530_75153C.1.pep
MPESVIGEDEPATAFTRRRRLALPPPSPSPVLHRRPSERRPPSPANHRLEEKEHFAGDGGGGGMAFWQARDFLFCGVCGTLLKFDSVRSASCPLCGFKRKAKDIEGKETRYTVTAEDIRRELKLDPYVILETTLKEEDVIVERATVNKECEKCKNPELQYYTKQLRSADEGQTVFYKCANCRHEFNENQ

SEQ ID NO: 177510 - protein, 156 aa, Oryza sativa
  Clone ID: PAT_MRT4530_75154C.1.pep
MAFWQARDFLFCGVCGTLLKFDSVRSASCPLCGFKRKAKGRRLPHLSPCKALGCVLLAADAFVLFFYGADIEGKETRYTVTAEDIRRELKLDPYVILETTLKEEDVIVERATVNKECEKCKNPELQYYTKQLRSADEGQTVFYKCANCRHEFNENQ

SEQ ID NO: 177511 - protein, 533 aa, Oryza sativa
  Clone ID: PAT_MRT4530_75155C.1.pep
MAGKMDKTTIIASAVVGSLGLLSAILGFSAEVTKITATDVLVGARGECLYPQNPAAELGVCAAVFLLLVQITVSAVGGCCGCCMSGRSIPSETKRIIGVVCAVMSWLVTTDITAGTDSGIAWFLFGVGAVVNIEGKGATMPDCYVVKRGIFAGAAVLALAATAFGITSYVMLRTQADEAPAKKPPLAGVAMGQPQFLPPQASHEPPLARHSATRVRGPPAKIKQGNKKKSALGVERPVLSALPPLSASPPPPASGGKEVGAQSRRRSSWPFAPLGRLLLSLRADQAIGSSSTDIVMAPFLPPPPTSRCRRRRTRGHRPPPAPSQAKSGRERGRGASPATALPPPPSGQIWEGGRDREPLPPTSATARHHLPPPAGQIWEGAREGSAAGRRPPPSAAAFNGSRRAPYAAVSAGERRRGGPHKRSACINEIGQAGHLRGHLPNDNTRRHGCRSCCILSETVQVVCAITSWIVPVIVFVLLLHAAVEDSDCDKIHEGVYAGPHLHGARGNRCQSSAAAEPAAVRSSGYFAATRWVV

SEQ ID NO: 177512 - protein, 184 aa, Oryza sativa
  Clone ID: PAT_MRT4530_75156C.1.pep
MAGKMDKTTIIVSAVVGSLGLLSAILGFSAEGTKITVTDILVGGKCLYPENPATALGVCAAVFLLLAQITVSAVGGCCGCCKSRSIPSETKRIIGVICAVMSWIAAGIAWFLFGMGAVVNNDCYVVKDGIFAGAAVLALAATASGITSYVMLRRQADEAPAKQPPLAGVAMGQPQFPPPPDSQV

SEQ ID NO: 177513 - protein, 71 aa, Oryza sativa
  unsure (1)..(71): unsure at all Xaa locations
  Clone ID: PAT_MRT4530_75157C.1.pep
SEMAKDIEAAVAVVGPEYISNDFXDQLSDAADRHLLRSSTTSLSPNGNHQFLCVPLLFLYITKSTWKSYNF

SEQ ID NO: 177514 - protein, 60 aa, Oryza sativa
  Clone ID: PAT_MRT4530_75158C.1.pep
MAMPHNFATICGHYYTSYQNRIENLNKSVHNSPRQFNSSVDNERSHTFDPQMDGSRTGQA

SEQ ID NO: 177515 - protein, 366 aa, Oryza sativa
  Clone ID: PAT_MRT4530_75159C.1.pep
MATPQISRKALASLLLLVAAAAAVSTASADDVLALTESTFEKEVGQDRAALVEFYAPWCGHCKKLAPEYEKLGASFKKAKSVLIAKVDCDEHKSVCSKYGVSGYPTIQWFPKGSLEPKKYEGQRTAEALAEYVNSEAATNVKIAAVPSSVVVLTPETFDSVVLDETKDVLVEFYAPWCGHCKHLAPIYEKLASVYKQDEGVVIANLDADKHTALAEKYGVSGFPTLKFFPKGNKAGEDYDGGRELDDFVKFINEKCGTSRDSKGQLTSEAGIVESLAPLVKEFLGAANDKRKEALSKMEEDVAKLTGPAAKYGKIYVNSAKKIMEKGSEYTKKESERLQRMLEKSISPSKADEFVIKKNILSTFSS

SEQ ID NO: 177516 - protein, 113 aa, Oryza sativa
  Clone ID: PAT_MRT4530_7515C.1.pep
LSLFFLFISGVFLNYCGGPNQFDARKLTYWQQQKLHFGSSKQNGPQKQTSLAKKKFKKGDCPRKIRKTNRWVFLEVRSKLIPPCLNPAKKARPIYRKGCFPVKERSPTPPPNN

SEQ ID NO: 177517 - protein, 291 aa, Oryza sativa
  Clone ID: PAT_MRT4530_75160C.1.pep
QILVLPNFERVNFSIKVDRPFKYPVLFTLEGYVEYIVSLLIRLFSSIAGKLSFVWTGPKPFVIIRDPGLAREILSNKSGNFAKQTTAGIAKFVVGGVVTYEGEKWAKHRRILNPAFHQEKIKRMLPVFLACCTKMITRWVNSMSSEGISELDVWDEFQNLTGDVISRTAFGSSYQEGWRIFQLQEEQAKRVLKAFQRIFIPGYWYLPIENNRRIREIDQEIRTILRGIIVKRDKAVRNGEGSNDDLLGLLVESNMRQSNEKEDVGMSIEDMIEECKLFYAAGSETTSMLLT

SEQ ID NO: 177518 - protein, 45 aa, Oryza sativa
  Clone ID: PAT_MRT4530_75161C.1.pep
MAAGRVRCIPRTRGLWTRKDEDAARPLPPSRRRFPRSWIGRDKYG

SEQ ID NO: 177519 - protein, 74 aa, Oryza sativa
  unsure (1)..(74): unsure at all Xaa locations
  Clone ID: PAT_MRT4530_75162C.1.pep
YHSDQNMPPRTXPWHPIDQDLLSQDAVKPLDVEAWSSMQGAQAEHKRIKSYIPEGCHRSSFPSVIEIDTQGVYR

SEQ ID NO: 177520 - protein, 59 aa, Oryza sativa
  Clone ID: PAT_MRT4530_75163C.1.pep
FPMILSFINSQIYSYFPVSFFFYSLPHSFFFYTIYLYFSLFTFSPFYAFFCYILFLFHF

SEQ ID NO: 177521 - protein, 401 aa, Oryza sativa
  Clone ID: PAT_MRT4530_75164C.1.pep
MGCFPCFGSGGKGEAKKGGGGRKDGGSADRRVARVGSGAVLVVGAVAVKQLDRNGLQGNREFLVEVLMLSLLHHDNLVNLIGYCADGDQRLLVYEFMPLGSLEDHLHDIPPDKEPLDWNTRMKIAAGAAKGLEFLHDKANPPVIYRDFKSSNILLGEGYHPKLSDFGLAKLGPVGDKTHVSTRVMGTYGYCAPEYAMTGQLTVKSDVYSFGVVFLELITGRKAIDNTKPLGEQNLVAWARPLFKDRRKFPKMADPLLAGRFPMRGLYQALAVAAMCLQEQAATRPFIGDVVTALSYLASQTYDPNAPVQHSRSNASTPRARNRVGANFDQRRLHSPNHQQSPDLRKEGPPTSKYEAEVSRTNSGSGSGRRAGLDSMDVTVFLSVYCDFFKKPDFFKKPDEE

SEQ ID NO: 177522 - protein, 117 aa, Oryza sativa
  Clone ID: PAT_MRT4530_75165C.1.pep
MAVMEVGAPTTIIERLSGTLEGQEERSQWRVDGSSLHLRTINQEPLYTGKTTGRAHSAAPWEDKVVGGDANREGLASVADPFWPSRDHVAVKRRWHRRWRSILSHARARETGGSGQD

SEQ ID NO: 177523 - protein, 108 aa, Oryza sativa
  Clone ID: PAT_MRT4530_75166C.1.pep
SLNPRRHRGRSQARRRQVAATINTNDADDTGPRSRRATPTTPAAPSAAAGPRRRCRPLLPQVAAAGPQGHADDAAPPAAAAPCRRHRPCRSSRTLLVCFTDRERRLVS

SEQ ID NO: 177524 - protein, 276 aa, Oryza sativa
  Clone ID: PAT_MRT4530_75167C.1.pep
MSEFEEEEKSKCRMQAKERGREVVVECGAGSMQAEGITRNGIKVFDGQAHPLTLHDGGTEPPMGRILSISILQVTSPSSIHAVGGRPQATKENRNADVSSLLDQSHRSLSLGLNGSSFIHATKASAPLGPKPSRFPPASLNPRRHRGRSQARRRQVAATINTNDADDTGPRSRRATPTTPAAPSAAAGPRRRCRPLLPQVAAAGPQGHADDAAPPAAAAPCRRHRPCRSSRTLLVCFTDRERRLFSRMVARENNKVMSRKIDFVVVLYAIFQVQNL

SEQ ID NO: 177525 - protein, 598 aa, Oryza sativa
  Clone ID: PAT_MRT4530_75168C.1.pep
MGGCHAKPLTHEEADGACSPPRERPQPPATPPRGSGAATPAWKTKPWASPFFGFSTPSPSPAHHLFSASSPRRSPAPSAPTTPARRLLRLPFPPPSPAKHIRQALARRHGPPRPPIPEEGGDVEGEGGRGLDKGFGFNKGFAAKYDMGDEVGRGHFGYTCAAKIKKGARKGDAVAVKVIPKAKMTTSIAIEDVRREVKILKALAGHKNLVQFYDAYEDNDNVYIVMELCEGGELLDRILSRGGKYSEDDAKAVLVQILNVVSFCHIQGVVHRDLKPENFLFTSKDENSQLKAIDFGLSDFVKPDERLNDIVGSAYYVAPEVLHRCYSTEADVWSIGVIAYILLCGSRPFWARTESGIFRSVLKADPSYNEAPWPSLTLEAMDFVKRLLCKDPRRRMTAAQALSHPWIRNYNDIKLPLDILIFRLIKAYIRSSSLRKAALRALSKTLTVDELFYLKGQFSLLEPDRNGCITLDNIRMALTREATYAMKESRVQEILVSLSALQYRRMDFQEFCAAAVSVHQLEALDRWEQHARSAYDFFEKDGNRAIVIDELASELGLSPSVPLHVVLQDWIRHTDGKLSFLGFVKLLHGMSSRLGYND

SEQ ID NO: 177526 - protein, 84 aa, Oryza sativa
  Clone ID: PAT_MRT4530_75169C.1.pep
MRVEAGGLPELGSGARDPAGARRQRRRRQQRRPAMPSAGAAAQPAPSPAVQGLFEACREVFGASAGAVPSPAGVERIKSVLGNP

SEQ ID NO: 177527 - protein, 68 aa, Oryza sativa
  Clone ID: PAT_MRT4530_7516C.1.pep
LIAKGVIGLVSIASSYLTGSLPRSIQTCVVITREKTTILMDSIITKKGTLIVLISPKSHFQVKVPPPY

SEQ ID NO: 177528 - protein, 80 aa, Oryza sativa
  Clone ID: PAT_MRT4530_75170C.1.pep
MHGSIGCCKVRIQRRTTGRSVTYTIDADAGGIWGALNCRLPAAWLAASRADRLPSRGGDSWTWTLQIIWSTHSCLCLSAK

SEQ ID NO: 177529 - protein, 324 aa, Oryza sativa
  Clone ID: PAT_MRT4530_75171C.1.pep
MESIARYLSRDLPYELSADDVYLTSGCAQAIEIICSVLARPGANILCPRPGYLFHEARAVFNGMEVRYFDLLPESGWEVDLDGVQELADKNTVAMVIINPGNPCGNVYTSEHLAKANEVYAHLTFGQNKFVPMGVFGSVAPVLTLGSISKRWVVPGWRLGWIVTSDPNGVFQRTKVVESIQSYLDISADPATFIQGAIPQLIENTKEEFFEKTVDVLRQTADICWEKLKGISCITCPSKPEGSMFVMVKLDLSCLQGIKDDMDFCCQLAKEELVILLPGCAVGYKNWLRITFAIEPSSLEDGIDRLKSFCSRHSKPKVHRSLET

SEQ ID NO: 177530 - protein, 62 aa, Oryza sativa
  Clone ID: PAT_MRT4530_75172C.1.pep
FIVFYPGYARHKVHATIQKCLMTPSIELNPTPYVKKSHGRPSPQDFDDTLPTHLGARCDEQS

SEQ ID NO: 177531 - protein, 113 aa, Oryza sativa
  Clone ID: PAT_MRT4530_75173C.1.pep
VKRQCVGQWASGGVVDEQLRQVCFRQLSAVGDSWCRCLVLFSMVVGIYRELGAGNVGHTMAEVFPGCRRGDLERAAASLSAFCIVDIPNGAGGVCCWIGYPRFPENWSVGYYS

SEQ ID NO: 177532 - protein, 70 aa, Oryza sativa
  unsure (1)..(70): unsure at all Xaa locations
  Clone ID: PAT_MRT4530_75174C.1.pep
CYVLISVSVXSXTVVQWFRPEKYFPPXHVGLVLVRPXSICLFVTXFXXXKKXKQKKKKKKKKKXXXXXXX

SEQ ID NO: 177533 - protein, 1007 aa, Oryza sativa
  unsure (1)..(1007): unsure at all Xaa locations
  Clone ID: PAT_MRT4530_75175C.1.pep
MDFSWTTGWEKAAADDDEAESAPAPAPPAPSPQEAAESMILVPGPRVVLSGLMRGDCRADDSVLFINAGGSATEGCEPSSKLSEDSFFEGGDAIETSEDIVEGGDYPSLYHSARYGNFSYKIDGLAPGDYFLDLHFAEIVNTYGPKGIRAFDVLVQEEKANTLTHILSELDVYAVVGGNRPLQVRDIRVTVESDSAIVINFKGVRGSPMVCGICIRKRVAMAVTDMVTEGNVLCKRCSAHTGNSPLQTRTSKLISKYEKQIEELTNQCNMKSDECYMAWSSVESTNQELERLKIELHQKVMQSDNIEQVVDRQADQLRSVSQKYENAKKLWAAAISNLENKIKAMKQEQTLLSLEAHDCANAVPDLSKMIGAVQTLVAQCEDLKLKYYEEMAKRKKLHNIVEETKGNIRVFCRCRPLSKDETSSGYKCAVDFDGAKDGDIAIVNGGAAKKTFKFDRVYMPTDNQADVYADASPLVTSVLDGYNVCIFAYGQTGTGKTFTMEGTERNRGVNYRTLEELFKIAEERKETVTYSISVSVLEVYNEQIRDLLASSPSSKKLEIKQASEGSHHVPGIVEAKVENIXSMLCIMVRAENLMNGECTRXERLAKTDVQGERLKEAQNINRSLSALGDVISALATKNSHIPYRNSKLTHLLQDSLELGPAKKQVDTAELQKVKQMLERAKQDIRLKDDSLRKLEDNCQNLENKAKGKEQFYKNLQEKVKELESQLDSKMHSQITSEKQQNELFGKLKEKEEMCTTLQQKIAEESEHKLRLQQQSESEIKELELKLKEQEHHRSVAESKIKELELKLKEQEHHRSVAESKAMEIGQELLETQRTEAMLQIKPRDLENNLQERTTLQDTNMILDSTNCMRVASTPGEAKAHLLTREEAMSEKEQHILRSSDSMNKKVTNNSSIVGAPEVVNEKKRKGDARNSSIGGELENQPVGSQNASRKRSLQGEPRLKRKSTEPLKNPGRVTATSKTAAATHKTGPVTRATRQQPAVNKTRGWVR

SEQ ID NO: 177534 - protein, 173 aa, Oryza sativa
  Clone ID: PAT_MRT4530_75176C.1.pep
MAVLAARGNLGGWMYPDLILSEFDVYAVVGGNRPLHMRDIRVTVESDGAFVINFKGVRGSPMVCAICIRKTVAIAEQVLDRQADQLRSVSQKYEYANKLWAAAISNLENKIKCEDLKLKYYEEMAKRKKLHNIVEETKGASSDLLLCIMMLSLSTMDVGRHVLPTVSHVLALC

SEQ ID NO: 177535 - protein, 48 aa, Oryza sativa
  unsure (1)..(48): unsure at all Xaa locations
  Clone ID: PAT_MRT4530_75177C.1.pep
RSATMIQEVDWGPYQDLLQVYFYXSTSLLVHRRQEIKFYTFWIWIQAS

SEQ ID NO: 177536 - protein, 1045 aa, Oryza sativa
  Clone ID: PAT_MRT4530_75178C.1.pep
MDFSWTTGWEKAAADDDEAESAPAPAPPAPSPQEAAESMILVPGPRVVLSGLMRGDCRADDSVLFINAGGSATEGCEPSSKLSEDSFFEGGDAIETSEDIVEGGDYPSLYHSARYGNFSYKIDGLAPGDYFLDLHFAEIVNTYGPKGIRAFDVLVQEEKANTLTHILSELDVYAVVGGNRPLQVRDIRVTVESDSAIVINFKGVRGSPMVCGICIRKRVAMAVTDMVTEGNVLCKRCSAHTGNSPLQTRTSKLISKYEKQIEELTNQCNMKSDECYMAWSSVESTNQELERLKIELHQKVMQSDNIEQVVDRQADQLRSVSQKYENAKKLWAAAISNLENKIKAMKQEQTLLSLEAHDCANAVPDLSKMIGAVQTLVAQCEDLKLKYYEEMAKRKKLHNIVEETKGNIRVFCRCRPLSKDETSSGYKCAVDFDGAKDGDIAIVNGGAAKKTFKFDRVYMPTDNQADVYADASPLVTSVLDGYNVCIFAYGQTGTGKTFTMEGTERNRGVNYRTLEELFKIAEERKETVTYSISVSVLEVYNEQIRDLLASSPSSKKLEIKQASEGSHHVPGIVEAKVENIKEVWDVLQAGSNARAVGSNNVNEHSSRSHCMLCIMVRAENLMNGECTRSKLWLVDLAGSERLAKTDVQGERLKEAQNINRSLSALGDVISALATKNSHIPYRNSKLTHLLQDSLELGPAKKQVDTAELQKVKQMLERAKQDIRLKDDSLRKLEDNCQNLENKAKGKEQFYKNLQEKVKELESQLDSKMHSQITSEKQQNELFGKLKEKEEMCTTLQQKIAEESEHKLRLQQQSESEIKELELKLKEQEHHRSVAESKIKELELKLKEQEHHRSVAESKAMEIGQELLETQRTEAMLQIKPRDLENNLQERTTLQDTNMILDSTNCMRVASTPGEAKAHLLTREEAMSEKEQHILRSSDSMNKKVTNNSSIVGAPEVVNEKKRKGDARNSSIGGELENQPVGSQNASRKRSLQGEPRLKRKSTEPLKNPGRVTATSKTAAATHKTGPVTRATRQQPAVNKTRGWVR

SEQ ID NO: 177537 - protein, 56 aa, Oryza sativa
  Clone ID: PAT_MRT4530_75179C.1.pep
PCTHQSLKIDLKLFITCISLILYFFPSLQQSTLKACVFKKLFSQLILRGGQKSFNL

SEQ ID NO: 177538 - protein, 126 aa, Oryza sativa
  unsure (1)..(126): unsure at all Xaa locations
  Clone ID: PAT_MRT4530_7517C.1.pep
GILTLLGLFQLGAGLIRSREQSPKRNPPPGEKPPPGGVGPHRPPNKNPEDPNPGEKSPPRGKKREKGPRRQLTPPEQDPYRRRPGENPXPKGPPWGAPPPGGTAPDQPPTRRGGALGQPPPRGPPG

SEQ ID NO: 177539 - protein, 139 aa, Oryza sativa
  Clone ID: PAT_MRT4530_75180C.1.pep
APTSSPPFAAGRCQPRRRAPPPSAAAGTRRPRSQALPQSADAGSRRHRPQHPAAKLRHHSAVVRRSPCWGAITAPPHPTPPNSPGNSSCPPAALACFGPGPLLTATPRSGAPPLSRLGCAIASISRPRTLPAPLTPFLY

SEQ ID NO: 177540 - protein, 419 aa, Oryza sativa
  unsure (1)..(419): unsure at all Xaa locations
  Clone ID: PAT_MRT4530_75181C.1.pep
MRSGSEDICYAWFFNAPRPILKAVLFSDRQRWQSLKRSACKNILSGRQRKLVTAIRLKYIYKRAFIKSASTNKRVLLRKMVSIVATYQTPVESLANRSPAQSVPRISAYITHVEWPRRSVRCTSLMMALLARLPWACDSGGVVQFADKLKFFHLRAQVENFGMRKFRRLDVPRFGIFWCFTYIGSKVVIPILRPSGVVILSEFDVYAVVGEQVLDRQADQLRSVSQKYEYANKLWAAAISNLENKIKVMKQEQTLLSLEARWXANAVPELSKMVGAVQALVVQCEDLKLKYYEEMAKRKKLHNIVEETKGAGLQGAVVPSNSTNMGCLHGPPVLARASAGTAGLAAARGAGAVGRAQLFLLPRDDHDCCSHSGGHALQGSECELTTWSATKQVCLGIARLARSISLVTSCSPSSDHNLY

SEQ ID NO: 177541 - protein, 434 aa, Oryza sativa
  Clone ID: PAT_MRT4530_75182C.1.pep
CTHAPMSWLARSIAATLSSPRGEPDPDADEPDHAGDRASSPEGSSPRDPDSDEVEQPDTPSRRGVKDDISELTETLTRRLWGVASFLAPPPPPESSTPRGEEEEEGRDGEEESAQSPRIAGIRSDLAEIGGRVRSGISMLQSNKAVAEISKIASSLLPFGQGDADEGEPVAGVTEEVVVFVRHISTRPETWLDFPLFISERYADDFELSDAQYVHALSMEHLVPSLSDIKAAICSTDMSEACFWKIYFVLLHSKLNKQDAELLSTPQILQAREELLQSLQTKNKRGSEVPEEEESSKTVIMSSAPAEEKVIQPSSIENKAGKPEVSSFADAWADISPDVEAEKFPIAITEMEIVDKSVIEEELSVKNETKSLAIEPKIHSETDEDEVDEWPDDDDDAEEVVGTEGNRTSLGQEEDVSFSDLEDDDDDGNKGIAK

SEQ ID NO: 177542 - protein, 487 aa, Oryza sativa
  Clone ID: PAT_MRT4530_75183C.1.pep
MTETEPDGDGNGDEEKEELGDDASSPSVDSVTQENGSAESETNADNFPMPRQTKDETVNTEPLSSSDTVQNIDGDATPASDAQENVEVVDVAVGSPLPGMKQQLDESVRIPKATIDILKDQVFGFDTFFVTSQEPYEGGILFKGNLRGQPAKSYEKITNRLQNKFGDQYKLFLLINPEDDKPVAVVVPRQTLQPETTAVPEWFAAASFGVVTIFTLLLRNVPLLQDNLLSTFDNLELLKDGVYGALVTAAIIGVHEIAHILAARDTGIKLAVPYFVPSWQIGSFGAITRIVNIVRNREDLLKVAAAGPLAGFSLGFVLLLLGFILPPSDGLGLVIDPAVFHESFLVGGLAKLILGDALKEGTKLSINPLVLWAWAGLLINAINSIPAGELDGGRIAFAMWGRKISSRISSLAIGLLGISALFNDVAFYWVVLIFFLQRGPISPLSEEITEPENNYISIGVAILLFGLLVCLPYPFPFDPSQLTDFDL

SEQ ID NO: 177543 - protein, 65 aa, Oryza sativa
  Clone ID: PAT_MRT4530_75184C.1.pep
MAQSSAVHHVRVQQRGHQPLVHTKNYTLDYLDSLLKRIDDFEYNSSYIPLKSRTPMNSNTAASLK

SEQ ID NO: 177544 - protein, 86 aa, Oryza sativa
  Clone ID: PAT_MRT4530_75185C.1.pep
TYHEGLTVWTMGPILMEDYHVIKTVAHFNLKRIPERVVHAHGAIHKDVLECNHNVTDITCVDLVRSRGAQTHEIVRFSTDIHERRR

SEQ ID NO: 177545 - protein, 45 aa, Oryza sativa
  Clone ID: PAT_MRT4530_75186C.1.pep
SDTNYFGEVRRCRCVCSSHGAAVRAFSRDKLAYTLTGGCTGISRD

SEQ ID NO: 177546 - protein, 96 aa, Oryza sativa
  Clone ID: PAT_MRT4530_75187C.1.pep
MREIRGGLLRLAKRTRRGESYRRRAIHGCMWYLLRYWYSLSSNGVAVGLSDYAMNHTQQEGSSAISDLDESMLEKEDYPAVEYELVIHVGKTTMAR

SEQ ID NO: 177547 - protein, 73 aa, Oryza sativa
  Clone ID: PAT_MRT4530_75188C.1.pep
MAVAFLVTLCRPGHSGQWAGRQRAAPLVSPHVRATCWVTGLFPPVNVEANVSDCSLAPDSSSLHKKSGMIYRG

SEQ ID NO: 177548 - protein, 48 aa, Oryza sativa
  Clone ID: PAT_MRT4530_75189C.1.pep
MSPSLEDFAARTPSSCKQGGIMSYKLSTEVKIQNQKLEELIVHHVSGV

SEQ ID NO: 177549 - protein, 90 aa, Oryza sativa
  Clone ID: PAT_MRT4530_7518C.1.pep
CQANVWAANIFRVVYLVMEVPFLRIRRNSVPCPYSNPFLVSLSWFVPRCSCQHGMAIIGAVAHAFIWRSIDSIDTLNYAHLLVSLHHAGY

SEQ ID NO: 177550 - protein, 68 aa, Oryza sativa
  unsure (1)..(68): unsure at all Xaa locations
  Clone ID: PAT_MRT4530_75190C.1.pep
VIFLQSRTKTFETTWSGGAGTPRTGLDEFVTGGKIIIGSXRRSRGGEALVASCSTSSTKTTQGHLRGS

SEQ ID NO: 177551 - protein, 153 aa, Oryza sativa
  Clone ID: PAT_MRT4530_75191C.1.pep
MPTAHANPQQAQLYPTACRPTRSAKADLVTLPVGGGCRVADLLHLILDVIIFVHVIELLLPLYAMCLVIHSPAIALDVAHPGRGGDCGFWGVTVATMHILLVLFQGESFYQTSHAPQAALSVSQPGGVGPCWSDERACHQCWSSRICGHSTDG

SEQ ID NO: 177552 - protein, 185 aa, Oryza sativa
  unsure (1)..(185): unsure at all Xaa locations
  Clone ID: PAT_MRT4530_75192C.1.pep
MEHAASVARLVELLGHGQGAEAALEAAMEAMEADYERLLQQRDAAEASELAEMAALEEIPQLPRATEEEDQLTLEAAGRFCDDTAALTVDCILPLPPIASHVSDARAPPSPPPPPVLLPLHICRLHHPRRSQPPTLLPLPPPPLASXCTTPPLPAGAALPLPGRVAAPPPSGLGAKAGSHRPPIP

SEQ ID NO: 177553 - protein, 672 aa, Oryza sativa
  unsure (1)..(672): unsure at all Xaa locations
  Clone ID: PAT_MRT4530_75193C.1.pep
MARWFYHTIPFEAGSDSAKALRCRRRAIAPNRKPKIAVDAAMEARFALLRKDCSRLSCRDLVEEFCMLRIFPLSQSWQVAVDQGEEVDGLPKLVLPEGTNVLTLDQVDAEARRMIGDVSVVEYSQLLTRQPAGQANRVYNGELPPRANPHKADDDAGPSRKRTHGQVKLAPRKRRVPTSSDSDADDEDDVEERDGEDEGEEEEEAEVAAEKAADEAVENHVDTPGYTPTPSPGHNKTGVESNSSPLRRKDLEGAKALVAFSAGNAAKGGPIKKISKKKGLVDVAHVFSDDESSNETPTSPAGRSLDLSTAPILSLGADGAGGSAAAWASASAERIVTAAAMVFGSPQRQPVVSPLVKAKGKGAAVETSASEYSLAAPHFAPGDFETRADLIPFVEGILAAHCSTERTVRARLDGFKNRLRAKDDEIGRKNLEMEALANTLKEAKAENKQLQSELEKGKEARAEVDRLKAEREKEKAHSAMLTDYYNLTEPKMEALRLEVSKAKASAVEESQRFSREMAKTTESARTACQTLRLAITDMGAKVSGVPAEDASAFDFSEWTQQAGGSISNCATVYSDCCACISATFTMGLLQQFGCEHVAEFPNYAKGDWEISVQNISRALRAWRKQFWQKDXRSADKAHLLEQLAKAEAADQCEEEDAAAEGGGGDAQDHPEV

SEQ ID NO: 177554 - protein, 868 aa, Oryza sativa
  Clone ID: PAT_MRT4530_75194C.1.pep
MAPRKPNPSSAKGLDPGRIDDDTTAYLGISLIDDSELAKLVSSGALVEGQAFAPGKAVVPKPVDNWTVVFAVFFEAGLRFPCNTLLPEILRLFQVELPQLSPSTLVRIAIFDWACRTSSFEPSAELFGAIFFATVNSKTVITPAGTKKSVFGSVNFNVRPERSDLWPVNAAMSKWDRHWMARWFYHTIPFEAGSDSAKALRCRRRAIAPNRKPKIAVDGAMEACRDLVEEFCMLRIFPLSQSWQVAVDQGEEVDGLPKLVLPEGTNVLTLDQADAEARRMIGDVSVVEYSQLLTRQAAGQANRVYNGELPPRVNPHKADDDVGPSRKRTRGQVKLAPRKRRVPASSDSDADDEEDVEERDDEEEGEEDEEAEVVAEKAADGAVENRVDTPGYTPTPSPGHNETGVESNSSPLRRKDLDGAKALIAFSAGRAAKGGPVKKISKKKGLVDVARVFSDDESFEETPTSPTGRSLDLSTAPILSIGAGGAGGSAAAGASASAERIVAAAARIFGSPLRQPVVSPLVKAKGKGSAVETSASEYSLAAPHFAPGDFETRADLIPFVEGVSNLVLPASTLSLFTELNEFDEGCSAIKSLAVRNRLRAKDDEIGRKNLQVEALANTLKEAKAENKRLQSELEKGKEARAEVDRLKAELEKGREAIAEVDRLQAKLKKEKAHSAVLTDYYNLTEPKMEALRLEVSKADANAAAESQQFSREMAKTTESARTTCQTLRLALTDMGAKVRGVPAEDASAFDFSEWTQQAGGSVSDFTTAYGDCCARVSVAFTMGLLQQFGCEHVAEFPNYAKGDWEISAQNISPALRAWRKQFWQKDGRSTAKTRLLEQLAKAKAANRCEEEDATAEGGGGDAQDHPEV

SEQ ID NO: 177555 - protein, 886 aa, Oryza sativa
  Clone ID: PAT_MRT4530_75195C.1.pep
MLILAVLDISRKRGKAAGAEDRCRRGHSPVLVQQIRPREAQIGASPAGRSLYHRPQGREAMTRPCRGPLPAPQRRPPQQPPPASTTASSAHTVLLHPVPPDATTTSRRRRPGAACSAQIRAPSRLGLAVAIPDGRTVLRCWFREAARKSVRLALSGATATATTATAKTATREGSEGEFFGQEKRQEMERFGRDIADHMEAIRFQAIRGLCCACPRIQGPQAIDFAANLFTRSAQAVAVAVAATAFCVSMLHSASYHTANKPLMGKGEIGASAETVQTMWRTVALLGYICSPVIFSPPDLPLSPLALSSSVLALTAPLGPLDFSLTPLVRHCTHPSPLHTSFVMAPRKPNPSSAKGPDPGRIDDNTTAYLGISLIDDGELAKLVSSGALVEGQDFAPGKAVVPKPVDNQTVLSPSALVQIAIFDWACRTSWFEPGAELIGAIFFATVNSKTVITPARTKKTVFGSVNFNVRPERSDLWWVNAAMSKWDRHWMARAIAPNRKPKIAVDGAMEAWFALLRKVCSGLSCRDLVEEFCMLRIFPLSQSWQVAVEQGEEVDGLPKLVLLEGTNVLTLDQADAEARSMIGDVSVVEKRRVPVLSDSDADDEDDVEERDGEEEGEEEEEVEVVVEKAADEAVENRVDTPGYTPTPSPGHNETGVESNSSPLRRKEMDGAKALIAFSAGKAAKGVGAGGSAAAGASASVERIVTAAARVFGSPLRQPVVSPLVKAKGKGATVETSGSEYSLAAPHFAPGDFETRTDLIPFVEGVSNLVLPASTPSLFTELNEFDEGCSAIKSLAVRARLDGFKNRLRAKDDEIGRKNLEMEALANTLKESKAENKWLQSELEKGREARAECRQSKGFHPGFVLDEVRSFPLRFKLANGYRVRLFP

SEQ ID NO: 177556 - protein, 677 aa, Oryza sativa
  Clone ID: PAT_MRT4530_75196C.1.pep
MRRGYEEIDDDEWSNHSFKPSRVLKRPSRGAQPDSQPPPPIDSFRYNPRPSSSSAAAAATATVVLSDDDDDFELGEEERLRRAGKSTRVLNRPQRQHSPPGRALPPRESFRYNPKPAKAAAAVSVSDDDDDGFDLEDDDFDIPSSRTSRPRRTAGRRLATAVADLSEEDDDLELADDDFDHPDPRPTRPRRATARRFVIKDDDDSDGDVGASEVDGVEAEEDDGVNWSELENEDDEDGDYGETKVEVEEGDVVGKALRKCARISADLRQELYGSSTRNCESYAEIDDSSVRIVTQVWSFDSMDVSEQDDVDAACTSEESEFEPILKPYQLVGVNFLLLLHRKNIGGAILADEMGLGKTVQAVTYLTLLRHLYNDPGPHLIVCPASVLENWERELKKWCPSFSIIMFHGAGRTAYSKELSSLGKAGYPPPFNVLLVCYSLFERRSAQQKDDRKALKRWRWSCVLMDEAHVLKDKGSFRWRNLMAVAQHARQRLMLTGTPLQNDLHELWSLLEFMMPDIFATGDIDLKKLLNAEDHELISRIKSILGPFILRRLKSDVMQQLVPKIQHVNFVTMDSEQFQAYNYAIDEYRGACQARSAKSTSNFSNNVVGLIPKRQISNYFMQFRKIANHPLLIRRIYSDKDVDRIAKLLYPKGAFGFECSLERATQELRKYNDFAIHQ

SEQ ID NO: 177557 - protein, 267 aa, Oryza sativa
  unsure (1)..(267): unsure at all Xaa locations
  Clone ID: PAT_MRT4530_75197C.1.pep
MSQEGSSGASLLHAIVGGRGGGGILSPGKIGTTTGDRRRQGRIRTNPHMLDPIALSIDDDVAPPASAFCCAAPLDVLARTSTDRSPALSSPSARLIICCLEQDACVDLAGGIRSCGASDAAPGPPCSSSTIAASSLQGFPSPPQPPLPARSPGKGMMLLDIYEVEWITRELERVLVRESGCRNGGGGGRAGDGHRRRKGTTRKAATSSYMRPTTDKGGFMGRHAVSVCGDTATAAVSVSDXFMPVAVAVGAWASSRSRHHRCDERLV

SEQ ID NO: 177558 - protein, 784 aa, Oryza sativa
  Clone ID: PAT_MRT4530_75198C.1.pep
MGDFALTNLDVSGLNPHWSHGFSRFGQRASCHIANKPLTGKGEIGASAETVQTMWYDNGELAKLVSSRALVEGQAFALGKAVVPKPVDNRTVVELPQLSPSALVRITIFDWACRTSGFEPNAELFDAIFFATVNSKTVITPAGMKKTVFGSVNFNVRPEHSNLWPVNAAMSKWDRHWMARWFFHIIPFEAGSESAKALRCRRKAIAPNWKPKIAVDGAMKAWFALLRKSWQVAVDQGEEVDGLSKLVLPKGTNVLTLNQADAEARKMIGDEGEEKEEAEAVAEKAADEAVENRVDTPGYTPTPSPGHNETGVESNSSLLHRKDLEGAKALVAFSAGKAAKGGPVKKISKKKGLVDVARVFSDDESSDETPTSPAGHSLYLSTAPILPLDASGAGGSAAAGASTSADRIVMAAARVFGSPLRQPVVSPLVKAKGKGAAVETSASEYSLVVPHFAPGDFETRADLIPFVEGVSNLVLPACTQSLFTELNEFDEGCSAIKSLAVRILAAHCSTERTVRAHLDGFKNRLRAKDDEIGRKSLKMEAIAKTLKEAKAENKWLQTELEKGKEARAEVDRLKAELEKGREARAEVDRLQAELKKEKAHSTMLTDYYNLTKPKMEALRLEVSKAEASTVEESQRFSREMAKATESARTACQTLRLALTDMGARVRGVPAEDASAFNFFEWTQQAGGAVSNCATTYSDCCVHQFGCEHVTEFPNYTKGDWEVSAQNVSPTLRVWRKQFWQNDGRSTAKARLLEQLAKAEAADRCEEEDAAAEGGGGDAQDHLEV

SEQ ID NO: 177559 - protein, 110 aa, Oryza sativa
  Clone ID: PAT_MRT4530_75199C.1.pep
NCNHATPVTFSVLLSHAVSVPVLIPTTAVDLPARETIDDDVAPPASAFCCAAPLDVLARTSTDRSPALSSPSARLIICCLEQDACVDLAGGIRSCGASDAAPGPPCSSST

SEQ ID NO: 177560 - protein, 90 aa, Oryza sativa
  Clone ID: PAT_MRT4530_7519C.1.pep
SFQDACETAFERCRNPLTSHIGREQLADVLRSSMLELMTDNGMMKLFKTLDVDDDDGISKDDLMASLRKLPFMIALFAGRINVEVYIEIV

SEQ ID NO: 177561 - protein, 619 aa, Oryza sativa
  Clone ID: PAT_MRT4530_751C.1.pep
MQAQDVKNVFCMKGGQGESSYLKNSKAQLRDLQMMLYALEETLDKIAIPPRGPGRLLLTAADLGCSCGRSSLVVADAIVQHMTKLCRGRGKHVDAVAAADPEFWFYFSDLPSNDFNTLFSLLPPHAASSGDGSGRRYFAAAVPGSFHDRLFPERSIDVFTSTFCLHWLSQVPDEVADTRSPAYNKGKVFVQGSSEETGTAYRRQFQSDMARFLRCRAAELKPGGAMFLVFVGRPSSAGPTDQGRSLNLLGTMFEESWRDLVDEGLIDGGRMDSFNIPSYAATLEEFRESVDADGSFAVNRLEHVMGGRLAVDDDPHDDRCAVGRRVANNQRSIFGPLVEAHIGRALADELFVRMERRAEELSDELVDEMGVPDKVADTRSPAYNKGKVFVQGSSEETDTSYRRQFQSDMTRFLRCRAAELKPGRALFLVFIGRSSSAGPTDLGRSFNLLGAMFEESWRDLVDEGLIDGGTMDSFNIPSYAATLEVFREAADGSFAVNRLEHVMGSHLAMDDDPHDRRVVGRRVANKQRSIFGPLVEAHIGRALVDELFVRMESPVGELADELGDEMGVHFHIGFMREVEGEYADANQSVISLLACSINVADVEHLLVAATGSGEHLFAG

SEQ ID NO: 177562 - protein, 256 aa, Oryza sativa
  Clone ID: PAT_MRT4530_75200C.1.pep
MGAKMRGVPAEVASAFDFSEWTQQTGGSVSDCATAYGDCCACVSAAFTTGHLQQFGYEHVAEFPNYAKGDWEISAQNISPALCAWLKQIWQKDGRSTAKARLLEQLAKAEAADRCEEEDAAAEGGGGDAQDHPETGGSTAVRPAAATQRAAADLGGRTGDIIAVRPTATRLSDRQDNFDESDDNDHDEVSSAGQTGCQAGRTAGTPPRLQLRPVLIQNVDQLQKSLLLCTFSDDIRRNKSLAEGRRCFFLDAIAVR

SEQ ID NO: 177563 - protein, 224 aa, Oryza sativa
  unsure (1)..(224): unsure at all Xaa locations
  Clone ID: PAT_MRT4530_75201C.1.pep
AIAGPMASRLDGPEXRLLWPSRGRACFGEVVSLRHVLFALHPLPKRPPAXQSTRTILRLXAPSLFHSLRHGFGRFWSKGLMPXANKPLTGKGEIGASAETIQTMWYGKAVVPKPIDNRTVVFAVFFEAGLWFPCNTLLPEILRLFQVELPQLSPSALVRXAIFDWACRTSGFEPSAELFGAIFFATVNSKTVITEAGTMKTVFESVNFNVHPEWSDLWPVNAAM

SEQ ID NO: 177564 - protein, 62 aa, Oryza sativa
  Clone ID: PAT_MRT4530_75202C.1.pep
GESEVHKMSCNLLLFVSMHGFIHSWKYFTLSPRHWIKHSLSYDLFLKQVSVYLSAGSYFHDY

SEQ ID NO: 177565 - protein, 200 aa, Oryza sativa
  unsure (1)..(200): unsure at all Xaa locations
  Clone ID: PAT_MRT4530_75203C.1.pep
MHFSTFATILDAXPSILLCKGYTRXLPKHTGTKTLSTPLHIAGGQMFXASCIWYDRGAXVPGQSEXVERDSVFLLEERDKLRNAIIAVXNKKDDTARXSCTLECLRLEYDGYDYVSIKGGGTINIINKXAYHAXDKIIQHFGCCHVXVINFYANGYRXVYRSCGNCRGNWRRSVHMEDTTAVDGGEIMLINLNYGDNATY

SEQ ID NO: 177566 - protein, 309 aa, Oryza sativa
  unsure (1)..(309): unsure at all Xaa locations
  Clone ID: PAT_MRT4530_75204C.1.pep
MAQYEGKHGPARYGYGPCLGQGIRQVGDLDAVSTSMLYLILDDWIFRKIDLSSNQPDGRQVPGGIAREAASSLPPPFFRWNAQRGMPLHFVAIGSKILAMPPMEEKRDTDHLDVGGACFDVRTGCVVFVPRHGGDQHGDPVYFQIGSRLFTLGCSRFQLLDLLPLALDGDPRSTRRQQWSWRDLPMPPFLHSMRALSHVLLPQEDQTILVGVGFLSPSSSSTYSFRIAEDGSSAWKCLGNWGLPFHGRGYFDPKLNAMIGLSMDGRICSGQLVSDHCPDVKYCRENLXAETRVGATLVYMGQRSRFCLV

SEQ ID NO: 177567 - protein, 90 aa, Oryza sativa
  Clone ID: PAT_MRT4530_75205C.1.pep
MCQEVKRDLSHTVHGFPADEHHVREVIALTLHSRACVASLSRCLGVTLKMLVLVHRLLADGDPAFEQEPASSSLGRRAPFQPASSSLRRP

SEQ ID NO: 177568 - protein, 148 aa, Oryza sativa
  unsure (1)..(148): unsure at all Xaa locations
  Clone ID: PAT_MRT4530_75206C.1.pep
MCQEVKRDLSHTVHGFPADEHHVREVIALTLHSRACVASLSRCLGVTLKMLVLVHRLLADGDPAFEQEVFYAMRRGTRSVHPXPPAPPRRRPLQPASSSLGRPGLLVAPPPMSGRETRGRERGQREESKEATSVPPQPKPESNTAEGI

SEQ ID NO: 177569 - protein, 398 aa, Oryza sativa
  unsure (1)..(398): unsure at all Xaa locations
  Clone ID: PAT_MRT4530_75207C.1.pep
PGLRLASPPRPIAPPCCSPPPIPSPVHRHGSQQQQQQQQQPASRGQQARPQHPQGHATAAAAAAAVTPAAAAAAGLQHQQEPVPRHSPAAHRGDPLPASXPPQPQHQHHPHRPLPPQHQQPKPPSMRLQKIRPPPISTPVARPPPVHNHQIPNPNHNPAFHRPPPPQPMPMPMPGPPVWADSPVTAYMRILENSLFSATPPGAAAAAAAAAAAATGQQAPPHHPHPPPPPPVPSPGILPSPSGFLNLLSPTPRSPYPLLSPGFQHPGPLTPNFPALSPLPGTGILGPGPMAPPSPGLWFPQSPSGLLSPSGFLPILSPRLQEKKSAGRRTTNHVSASVSFPVAQIYRYDNDDDDDDGKDKLIIDFSKHTLIRLAEIFDQDDDYWSLQPPDASNPTEWE

SEQ ID NO: 177570 - protein, 268 aa, Oryza sativa
  Clone ID: PAT_MRT4530_75208C.1.pep
MRSMMRLMICCLLVSAGAGGIAGEGNLDVALLLQCVKPALRREGGNTQLATWTASTPLCLWRGLRSTIQMALSRSVEVAVPADPAGDGDRDKIRLRQLGYKQELKRGLSVLSNFAFSFSIISVMAGVTTTYSTGLRYGGPVSMTLGWLVVSAFNGCMALSMAEICSAYPTSGGLYYWSAKLAGNDWAPFASWITGWFNITGQVGTFGFLGPGFSLIDGPFYWAMSTERNKFTLGPFICCPVRFSSLNHKTGYDGSPNLRNRLNSLGSI

SEQ ID NO: 177571 - protein, 87 aa, Oryza sativa
  Clone ID: PAT_MRT4530_75209C.1.pep
IPFAAYTTNVCNGLLLAILTNKSSGMPVSLPNLVLYLRMAKENHGERDRLLNAPHQQRLLRHPSSTSLEMLVHCNGKPAGSIVRYLN

SEQ ID NO: 177572 - protein, 624 aa, Oryza sativa
  Clone ID: PAT_MRT4530_7520C.1.pep
MASRNPSPASLSTPLLSDSISPTPTTNGHAGHHNHDDDDEESPTVCGGDGGGGGDPFAFLSEDRPAWWSPRGVSPADPFRNGTPGWCGAYELVRALVCAPVAAARLVLFGLSIAVGYAATWVALRGWVDVRERAAQEGAGPMPAWRRRLMWITRISARCILFSFGYHWIRRKGKPAPRELAPIVVSNHVSYIEPIYFFYELFPTIVSSDSHDSIPFVGTIIRAMQVIYVDRFSPASRKSAVNEIKRKAACNSFPRVLLFPEGTTTNGRFLISFQHGAFIPGYPVQPVIVRYPHVHFDQSWGNISLGKLMFKMFTQFHNFMEVHTLIPFSLECKIFMSLVITTYTIRSLHEPYFLQVEYLPVVYPPEIKQENALHFAENTSYAMAHALNVIPTSYSYGDSMIMARAVEDGKVNCSNYMVEMAWVKETYGVSTSEAMALLEDFLCMSPDKDGRVNAQDFWAHFGLNCTPLCKKIFQYFDFEAKESITFRQFLIGCAHLRKQPSFQDACETAFERCRNPLTSHIGREQLADVLRSSMLELMTDNGVSRQFASCNISNHLSSNAITQFRLICHCLPFTLQMMKLFKTLDVDDDDGISKDDLMASLRKLPFMIALFAGRINGEVYIEIV

SEQ ID NO: 177573 - protein, 64 aa, Oryza sativa
  Clone ID: PAT_MRT4530_75210C.1.pep
CSPTGFSRRSTETSKSASLGGGLGGTSLGTTKTRSPPRPLPSCTSSASSSPPCAGCRWGQRSGP

SEQ ID NO: 177574 - protein, 123 aa, Oryza sativa
  Clone ID: PAT_MRT4530_75211C.1.pep
MVARDRLMPRSLAACALLLHRCPYQEKIGWSPASAHRQLCIAGRPPSWASTLLVRNLRGEGWEEEEEAECAGGCSDARSGVGKVGLGKIRVSVSDREVDRSLFSPFIHARGYIDRIGGENGEF

SEQ ID NO: 177575 - protein, 295 aa, Oryza sativa
  Clone ID: PAT_MRT4530_75212C.1.pep
MMQRTMQLVLRVKRSSGLLHQFSTAANSQRLAGKVAVITGAASGIGKASAKEFIGNGAKVILADVQDDLGRAVAAELGPGATYTRCDVTDEAQVAAAVDLAVARHGALDVFYSNAGVLGSIAPAPLASLDLGEFDRVMAVNARAAVAAAKHAARAMVPRRSGCVLFTGSVSGVVGGTGPTSYGVSKAAVLGVVRAVAGELARHGVRANAVSPCGVATPLSMVQVLEAYPGMSFEELKNAMAASMEQMEAGPLIDPEDVARAAVFLASDEARYINGHNLVVDGGFTVGKLLKIPKE

SEQ ID NO: 177576 - protein, 273 aa, Oryza sativa
  Clone ID: PAT_MRT4530_75213C.1.pep
MPPPLLLLPVVLALFAAADASPSACRNATCGDVPVAYPFWLIDNSSALGCGYPGLGLRCVDNTTLILPFRTHQYRVLDIEYGKHTISLTDADMQHSDTNNSCPHLHANLTIDDNSWLQLASSDSNITFLYNCKSNSSLLSSTSVVKLTGCGAGPEHIGSSYVFLDGWITGEAYDYECETVVVAPVIDAHKKAMVDAHGGLPPADGSFGDVLSAGFELTYSAHSDKCGKCERTKGWCGYRHNETSTTMDFTCFCDEGPTKSHCELGPWISNSNY

SEQ ID NO: 177577 - protein, 82 aa, Oryza sativa
  unsure (1)..(82): unsure at all Xaa locations
  Clone ID: PAT_MRT4530_75214C.1.pep
SIRCRLAGKVAVITGAASGIGKGVREESSSAMAPKVILAXDVQDDLGCAVAAELGPGXTYTQCDVTDERMSPGGGPPVARTG

SEQ ID NO: 177578 - protein, 102 aa, Oryza sativa
  Clone ID: PAT_MRT4530_75215C.1.pep
TRCHFILSHWQRLSISYVPNPSRGFCVRKREYLFHSIKNKKPILFVRRKRSRSILYSISANMQWAAWLIWKKRRIDPYLFLFSIRITHSFFFIQSVLSYLYV

SEQ ID NO: 177579 - protein, 126 aa, Oryza sativa
  Clone ID: PAT_MRT4530_75216C.1.pep
MMFFFSFDIVEELMQDEDDHDAAANENTASLQATKTGIPSSEFVHHATVESQLARCRPQDPNANIVLYNPTELACTILREVEHQSVNRLPCSPDSDGCRVDNLRIERLAVHSSKRSANRTEESRLA

SEQ ID NO: 177580 - protein, 115 aa, Oryza sativa
  unsure (1)..(115): unsure at all Xaa locations
  Clone ID: PAT_MRT4530_75217C.1.pep
MELLSYSCGPLASSPLHFLSTSKRSKKNEVSVTCRLSKNCGAMDAGATARSSSSSAMMMNQKKPLLSDGELVELLWQDGGXXXXXXXXPXXXXXLPPNAXSCDDETARPLLAGTL

SEQ ID NO: 177581 - protein, 70 aa, Oryza sativa
  Clone ID: PAT_MRT4530_75218C.1.pep
TRVLFIQEGALSELIVCGWGEGPAGEYVHYNMTDNASEIWNIVSQGGCIFVCCDANGLVRDVHIAFYTIV

SEQ ID NO: 177582 - protein, 185 aa, Oryza sativa
  Clone ID: PAT_MRT4530_75219C.1.pep
RNSARGLVADLRRHFDALPNSYAQAGFDMKDVLLHARLVEQAAGEDQPAVSIEEVPGSNGRGGANEGTVFQLTFACSAPLSWQSMSGSLDSPSFCCKRIQIFEKRGLTLGVVMILVQPGNEVFFKNRVDAALKSAIKKQRKNSGGVKLPFGLCGCQEEGSRNFDEESMFDPDDGQVLDNEPTCKP

SEQ ID NO: 177583 - protein, 51 aa, Oryza sativa
  Clone ID: PAT_MRT4530_7521C.1.pep
MEERVTRLDRLLVMAVGTAAALAGCYAKGSGVRDGEQTILLTCTLIGFYWL

SEQ ID NO: 177584 - protein, 105 aa, Oryza sativa
  unsure (1)..(105): unsure at all Xaa locations
  Clone ID: PAT_MRT4530_75220C.1.pep
GRNPPRRVRIHFRISTVQSSMCKEERRVRKIKLDXVKAHAKARGQVISPQRQPEGTETGSKVHAATMKTVTPIPHDVVHVSRKVNSVPDTRPGKSGQPQAPKKIF

SEQ ID NO: 177585 - protein, 123 aa, Oryza sativa
  Clone ID: PAT_MRT4530_75221C.1.pep
MASGGTVCSMCGDVGFPDKLFRCARCRRRFQHSYCTNYYGDGAPVEAGAGVCDWCLSDAAVVAGKKGPSSEGNEEPFSREYRGRSKQAASTGGGEQEGGGGGGRRVSKAGAVRRYKLLKDVLC

SEQ ID NO: 177586 - protein, 90 aa, Oryza sativa
  Clone ID: PAT_MRT4530_75222C.1.pep
MMGPACYGFGCKAKCWSAMLGDKAHHDIDGARLQPSSMSDATQESSRYPRKGPSPPSEASPGSDELCCRPSTREVGNVISSPIAPSFPLP

SEQ ID NO: 177587 - protein, 162 aa, Oryza sativa
  Clone ID: PAT_MRT4530_75223C.1.pep
MNKEELQLALFKNQRKENLFANRISDLFDAKKRGVIDFGDFVRALNVSHPNIPMEEKIDFSFKLYDMDNTGFIERKEVKQMLIALLGESEMRLSDEIIETILDKTFSDADTNQDGRIDRTEWENFVSRNPSLLKIMTLPYLKDITTTFPSFVFNSEVDDLVT

SEQ ID NO: 177588 - protein, 1140 aa, Oryza sativa
  unsure (1)..(1140): unsure at all Xaa locations
  Clone ID: PAT_MRT4530_75224C.1.pep
EEEEEEIPRAMSTGPGKKAIRNAGGVGGGAGPSAGGPRGPAGQAVKFARRTSSGRYVSLSREDIDMEGELAADYTNYTVQIPPTPDNQPMLNGAEPASVAMKAEEQYVSNSLFTGGFNSATRAHLMDKVIESSVSHPQMAGAKGSRCAMPACDGSAMRNERGEDVDPCECHFKICRDCYLDAQKDGCICPGCKEHYKIGEYADDDPHDGKLHLPGPGGGGNKSLLARNQNGEFDHNRWLFESSGTYGYGNAFWPKGGMYDDDLDDDVDKLGGDGGGGGGGGPLPEQKPFKPLTRKIPMPTSVISPYRIFIVIRMFVLLFYLTWRIRNPNMEALWLWGMSIVCELWFAFSWLLDMLPKVNPVNRSTDLAVLKEKFETPSPSNPHGRSDLPGLDVFVSTADPEKEPVLTTATTILSILAVDYPVEKLACYVSDDGGALLTFEAMAEAASFANVWVPFCKKHDIEPRNPDSYFSVKGDPTKGKRRNDFVKDRRRVKREFDEFKVRINGLPDSIRRRSDAFNAREDMKMLKHLRETGADPSEQPKVKKATWMADGSHWPGTWAASAPDHAKGNHAGILQVMLKPPSPDPLYGMHDDDQMIDFSDVDIRLPMLVYMSREKRPGYDHNKKAGAMNALVRCSAVMSNGPFMLNFDCDHYINNAQAVREAMCFFMDRGGERIAYIQFPQRFEGIDPSDRYANNNTVFFDGNMRALDGLQGPMYVGTGCMFRRFAVYGFDPPRTAEYTGWLFTKKKVTTFKDPESDTQTLKAEDFDAELTSHLVPRRFGNSSPFMASIPVAEFQARPLADHPAVLHGRPSGALTVPRPPLDPPTVAEAVSVISCWYEDKTEWGDRVGWIYGSVTEDVVTGYRMHNRGWRSVYCITKRDAFLGTAPINLTDRLHQVLRWATGSVEIFFSRNNAFLASRKLMLLQRISYLNVGIYPFTSIFLLVYCFIPALSLFSGFFIVQKLDIAFLCYLLTMTITLVALGXHPAAVLQGLLKVIAGVDISFTLTSKPGNGGGDGGVGGEGNDDEAFADLYEVRWSYLMVPPVTIMMVNAVAIAVAAARTLYSEFPQWSKLLGGAFFSFWVLCHLYPFAKGLLGRRGQTPTIVFVWSGLLSITVSLLWVAISPPEANSNGGARGGGFQFP

SEQ ID NO: 177589 - protein, 1060 aa, Oryza sativa
  Clone ID: PAT_MRT4530_75225C.1.pep
MSCKMRGCDMPAFLNGGRPPCDCGFMICKECYAECAAGNCPGCKEAFSAGSDTDESDSVTDDDDDEAVSSSEERDQLPLTSMARKFSVVHSMKVPGAAANGNGKPAEFDHARWLFETKGTYGYGNALWPKDGHAHSGAGFVAADEPPNFGARCRRPLTRKTSVSQAILSPYRLLIAIRLVALGFFLAWRIRHPNPEAVWLWAMSVACEVWFAFSWLLDSLPKLCPVHRAADLAVLAERFESPTARNPKGRSDLPGIDVFVTSADPEKEPPLVTANTILSILAADYPVEKLACYLSDDGGALLSFEALAETASFARTWVPFCRKHGVEPRCPEAYFGQKRDFLKNKVRVDFVRERRKVKREYDEFKVRVNSLPEAIRRRSDAYNAGEELRARRRQQEEAAAAAAAGNGELGAAAVETAAVKATWMSDGSHWPGTWTCPAADHARGDHAGIIQAMLAPPTSEPVMGGEAAECGGLIDTTGVDVRLPMLVYVSREKRPGYDHNKKAGAMNALVRTSAIMSNGPFILNLDCDHYVHNSSALREGMCFMLDRGGDRVCFVQFPQRFEGVDPSDRYANHNLVFFDVSMRAMDGLQGPMYVGTGCVFRRTALYGFSPPRATEHHGWLARAWVKLFLTKKKSMGKKTDRAEDDTEMMLPPIEDDDGGADIEASAMLPKRFGGSATFVASIPVAEYQGRLLQDTPGCHHGRPAGALAVPREPLDAATVAEAIGVISCFYEEKTEWGRRIGWIYGSVTEDVVTGYRMHNRGWRSVYCVTPRRDAFRGTAPINLTDRLHQVLRWATGSVEIFFSRNNALFASPRMKLLQRVAYFNAGMYPFTSVFLLAYCLLPAVSLFSGKFIVQRLSATFLAFLLVITLTLCLLALLEIKWSGITLHEWWRNEQFWVIGGTSAHPAAVLQGLLKVIAGVDISFTLTSKPGNGGGDGGVGGEGNDDEAFAELYEVRWSYLMVPPVTIMMVNAVAIAVAAARTLYSEFPQWSKLLGGAFFSFWVLCHLYPFAKGLLGRRGRVPTIVFVWSGLISMIISLLWVYINPPAGARERIGGGGFSFP

SEQ ID NO: 177590 - protein, 37 aa, Oryza sativa
  Clone ID: PAT_MRT4530_75226C.1.pep
MAGDFYITRGPLNSLKIPSLWVVEAKAQTAPGAPWNN

SEQ ID NO: 177591 - protein, 408 aa, Oryza sativa
  Clone ID: PAT_MRT4530_75227C.1.pep
MVREPQDLRLGERDLLEEMSMNEEVEDGEVKPLGRVESMDETPGEVAKLRCRHGARGAAVVASAWRGSNTGSFVLVRSYITITFRGFRPPRLARLIRSPSSPCSKTCRLITPESIIATISHRSTMNGIELSSEDKAILVETLKNKLQALAEQHVDVLESLAPSVRKRVDVLMEIQSQHDELEVKFFEEKAALEAKYQKLYGPLYSKEKGVPDFWLNAMKNNEILAEEIHESDEEALKYLKDIKWCRIDDPKGFKFEFFFYTNPFFKNQVLTKTYHMIDEDDEPILEKAIGTEIEWHPGYCLTQEVLTKESSESTKPITKTEECESFFNFFSPPQVPDDDAKIDENTAEELQNQMERDYDIASTLRDKIIPHAVSWFTREAVQDEDYGASWVDDEEEDDNNDEYSDEEA

SEQ ID NO: 177592 - protein, 432 aa, Oryza sativa
  Clone ID: PAT_MRT4530_75228C.1.pep
LLMAPKRKVNESIVANLPIPDPSMPIKIPGDSKIEIQNRSRNLTVYASKVVDSVAYNAMLSYPEGQQEKCVAVCRRLEHAHALFDILASCSHSNIIEPIGIWEEKGTKLAYIVFPCFDGPLSLIPTEEIFDVEDATNDKSYTFGFTDQGCKIFVEMFMAVKYVNDLYDDEQIPLKALNFDESKIFYQLNAQRDYRVLLTDFKLEISPTGNARNNRKGKGKASSTVPTVDELKVANWNGLGQLLQKLHKNLGLHAELNHFAELLGKKTVKYEDLVWEAGLWEHNSKVQFIREIYWHYNNDEAKISQLKLRASLGLKSCIDKLEVNKSREPNKEINDKSLYNSLFFLRVYMVAHRDDLIKGYSGAKETVEDRKAVVRLLMKECPTYMVKLIAEIRHLGWIKESPFLRTALRKSADEGNFGTNDISFLTWSGKLH

SEQ ID NO: 177593 - protein, 186 aa, Oryza sativa
  Clone ID: PAT_MRT4530_75229C.1.pep
MNGIELSSGDKAKLVETLKNKLQALAEQHVDMLESLAPAVRKRVDVLMEIQRSKIVSGVLEVEGETEEREEKGVPDFWLNAMKKNEILAEEVLTKESSESTKPITKTEECESFFNFFSPPQVPDDDAKNDEYTLAHVARSTLRDKIIPHAVSWFTREAVQDEDYGASWVDDEEEDDDDDEYSDEEA

SEQ ID NO: 177594 - protein, 122 aa, Oryza sativa
  Clone ID: PAT_MRT4530_7522C.1.pep
MQTAKVKVQDMVSGAKEKVKEGTAKAHGKAGQATAATHGEKEMAKQEEKAGKAQAKADEHQERAEHRANATTGRHGTRVPLTAGGNRHHHAPVGGPAVDPAYPAAGTGTGTGTYAASDKSYI

SEQ ID NO: 177595 - protein, 301 aa, Oryza sativa
  Clone ID: PAT_MRT4530_75230C.1.pep
MSNPELLSEEKAILVETLKNKLQALAEQHVDVLESLAPVVRKRVDVLIEIQSQHDELEAKFLEEKAALEANYQKLYGPLYSKRSEIVSGVLEVEGETEEREEKGVPDFWLKAMKNNEILAEEIHESDEEALKYLKDIKWCRIDDPKGFKFEFFFDTNPFFKNQVLTKTYHMIDEDDEPILEKAIGTEIEWHPGNCLTQEVLTKESSESTKPITKTEEYESFFNFFSPPQVPEDDAKIDENTAEELQNQMERDYDIASTLRDKIIPHVVSWFTGEAVQDEDYGASWVDDEEDDDDEYSDEEA

SEQ ID NO: 177596 - protein, 74 aa, Oryza sativa
  Clone ID: PAT_MRT4530_75231C.1.pep
MASRGKKWAWWHRGGDSGMSSAHTFREDAARARCRAATVWAASEWGQRDDASHISQHEWCTGRRESRFLGPASG

SEQ ID NO: 177597 - protein, 54 aa, Oryza sativa
  Clone ID: PAT_MRT4530_75232C.1.pep
VPTILVITRKNLSLDGTRMIAIMMGSYSSRFVKCILPLFDSLLLGISSSRYINK

SEQ ID NO: 177598 - protein, 111 aa, Oryza sativa
  Clone ID: PAT_MRT4530_75233C.1.pep
NAPSAQPTAPVSAPGSQLGQHAANQVVPEHLVHQVQPDQTVIPQVVPEHLVRNIQPDFQNYQGGNLNYQYQPPSPQVQYQQEASSQPQFVPQYNQFEPMSQQPQGAPQQQP

SEQ ID NO: 177599 - protein, 313 aa, Oryza sativa
  unsure (1)..(313): unsure at all Xaa locations
  Clone ID: PAT_MRT4530_75234C.1.pep
MAFTLTIPRFSAISRKPITCSSSRTQCPAPFTHGRSISLRRRLTLLPLKASTDQSGQVGGEEVDSKILPYCSINKNEKRTIGEMEQEFLQAMQSFYYEGKAIMSNEEFDNLKEELMWEGSSVVMLSSDEQRFLEASMAYVSGNPILSDEEYDKLKMKLKMDGSEIVCEGPRCSLRSKKVYSDLAIDYFKMFLLNVPATVVALGLFFFLDDITXFEITYLLELPEPFSFIFTWFAAVPAIVYLALSLTKLILKDFLILKGPCPNCGTENVSFFGTILSIPNDSNTNNVKCSGCGTEMVYDSGSRLITLPEGGKA

SEQ ID NO: 177600 - protein, 287 aa, Oryza sativa
  unsure (1)..(287): unsure at all Xaa locations
  Clone ID: PAT_MRT4530_75235C.1.pep
MRSPTPARLALALVAALAAAALLGGAAAAAATEEAYVTLLYGDEFVLGVRVLGKSIRDTGTRRDLVVLVSDGVSDYSRKLLQADGWIVSHITLLANPNQVRPKRFWGVYTKPARGHMTSYRKVVYLDADTVVVRSIEDLFXCGKFCGNLKHSERMNSGVMVVEPSETVFKDMMRQIDTLPSYTGGDQGFLNSYYADFANSHVYEPEKPYTPEPETQRLSTLYNADVGLYMLANKWMVDEKELRVIHYTLGPLKTWDWWTAWLVKPVGVWQDVRQTLEESLPGTGGGR

SEQ ID NO: 177601 - protein, 41 aa, Oryza sativa
  Clone ID: PAT_MRT4530_75236C.1.pep
ANHPNTPLINFTENSTGTSHHTNSYLDTPIVAQTTSFFINR

SEQ ID NO: 177602 - protein, 89 aa, Oryza sativa
  Clone ID: PAT_MRT4530_75237C.1.pep
SFSNPDCARSSIKHRPLDTYKEINSCHQMQSKVELKNKIWSMVESSRLWQTAYGPWSRSVVYVYKDKENHGAGKRIQKRKKIAQKPSPP

SEQ ID NO: 177603 - protein, 486 aa, Oryza sativa
  unsure (1)..(486): unsure at all Xaa locations
  Clone ID: PAT_MRT4530_75238C.1.pep
MALASLPKVVMGSVAFGVFWMLAVFPSVPFLPIGRTAGALLGAVLMIVFHVISADDAYASIDLPILGLLFATMVVGGYLKNAGMFRHLGRLLAWRSQGGRDLMCRVCVVTALASALFTNDTCCVVLTEFVLELAAERNLPAKPFLLALATSANIGSSATPIGNPQNLVIAFNSKISFISFLLGILPAMLAGMGINMLMLLCMYWKELDGGACSPDEVAAGKQMEAIEEGRRTALNNNKKDDGDAATPASPEDDDGGDAXSMMSENISTKHRWFMQCTEARRKLFLKSFAYVVTVGMVVAYMVGLNMSWTAITTALALVVVDFRDAEPCLDNVSYSLLVFFSGMFITVSGFNKTGLPGXAIWDVMAPYSKINNVTGITVLSVIILLLSNLASNVPTVLLMGDEVAAAAATISPAAETRSWLLLPCVSTMAGNLSLLGSAANLIVCEQARRATRNAYDLTFWNHVIFGLPSTLVVTAIGIPLIGKINI

SEQ ID NO: 177604 - protein, 495 aa, Oryza sativa
  Clone ID: PAT_MRT4530_75239C.1.pep
MGSLMAGWDSPDLGEENRVLARRNNELASAPKVALGSIAFAVFWMMAVFPSVPFLPIGRTAGSLLSAVLMVIFHVISPDDAYASIDLPILGLLFATMVVGSYLRNAGMFKHLGRLLAWKSQGGRDLMCRVCVVTALASALFTNDTCCVVLTEFVLELAAERNLPAKPFLLALASSANIGSAATPIGNPQNLVIAFNSKITFPKFLMGILPAMLVGMAVNMVMLLCMYWRELGGGAELSVDGKQMEAVEEGRSPASAKSTPQLNGNGNTMMSLEMSENITTKHPWFMQCTEARRKLFLKSFAYVVTVGMVVAYMVGLNMSWTAITTALALVVVDFRDAEPCLDTVSYSLLVFFSGMFITVSGFNKTGLPGAIWDFMAPYSKVNSVGGISVLSVIILLLSNLASNVPTVLLMGDEVAKAAALISPAAVTTSWLLLAWVSTVAGNLSLLGSAANLIVCEQARRAPRNAYDLTFWQHIVFGVPSTLIVTAVGIPLIGKI

SEQ ID NO: 177605 - protein, 84 aa, Oryza sativa
  unsure (1)..(84): unsure at all Xaa locations
  Clone ID: PAT_MRT4530_7523C.1.pep
AATDLSPCGEFVRHQCSTVAXPFFQSPVFQLRNCQVMQXQCCQQLRMIAQTVSLQAIXSVQAIAQTVQQFWRYSIRSSQAQVFA

SEQ ID NO: 177606 - protein, 123 aa, Oryza sativa
  unsure (1)..(123): unsure at all Xaa locations
  Clone ID: PAT_MRT4530_75240C.1.pep
IPSHPHTNPNPSRLRARAAAAAARRXPERRRIARFPPTXPVEAAPEAEEGREEEIEVADLGREGGGEKKMEGPDSGARXGXEQAVEDEGXTTPVXDTVQVGSFTKXYXFDKXFGKGDFWQYMF

SEQ ID NO: 177607 - protein, 92 aa, Oryza sativa
  Clone ID: PAT_MRT4530_75241C.1.pep
SLVAAARTPRVRSKSPVASFPAPRKTSRGSTAEWRGADFHRRGEQSRGGEGILVSAFGAGLISKRILGREGKVKHGRGSCPPSILLRTRLIF

SEQ ID NO: 177608 - protein, 166 aa, Oryza sativa
  Clone ID: PAT_MRT4530_75242C.1.pep
MLVLKLRLNSIKTLTLLVPLSIFADVVDLGAVGVILRKDMSVWLTKPPLVFACGGLSAILYSIGVSVYAFEGFGMVHPLEAEAANKKKLGAPRSGYPWGHPVSAPLPHLRPPAEEEMRSGRRPATVSAPLIGRRIFPSRRALAGRRGRMAGRERGGAGPSSPVVRG

SEQ ID NO: 177609 - protein, 103 aa, Oryza sativa
  Clone ID: PAT_MRT4530_75243C.1.pep
MWLLPQEEVDWILAESNEPVSTEFHELKRASPSLVPLPEEEKDEGGGGGGVQAVRRSTGGGVPTYQPTSSDVAAASPWPPLLHRARSQPAHELKEIFPFPSPP

SEQ ID NO: 177610 - protein, 203 aa, Oryza sativa
  Clone ID: PAT_MRT4530_75244C.1.pep
MTGFLRGKRLARPSGYDCAAAPPANDKRQSLWPRHPVTDGWSRLRNGVRRMGGDQKYGHVRTSRERPPGHCVVDPTVAPPYWALLFSVTWMGRVICVSAVVVGSRLFKAPRLLSLSIYTTREKKKIWLPRRKQKGKKSRAKALFSSPRPRAEEREGEKGGRRRKHETLIPRQRASPINSGVSPLTALHPRSLARSRRSVLQSG

SEQ ID NO: 177611 - protein, 510 aa, Oryza sativa
  Clone ID: PAT_MRT4530_75245C.1.pep
MASMNNLYRLCIRSKQVTKQILQILGDLPALLDLELRSESDDPMEILIISKCIFRCLKIFRLYGSFVGLIFEDGSMQKVREISVVVRAHKAKSAFADHPDLGIRNLTSLMDLNVWINCEGARVQEVKVLEAAIADATALLPNHPTPHFFRENEENMVKDYLPNHPTPHFFRENEEKMYVPNSRLMSCASLLSAAIRRGVAGCRASPPSASAIVSRPATGSHILRIDGYTNTKSILATGESATSRRFAVGGHSFVMRYYPNGLDDGCADSISLFVDVAGGGGCGRSGIAGHARFSVLDHAGSPARRTDDASSEALAAGADAGVVVPPSDLHRHLAELLWSKEGADVVIELDGGDGETTTFHAHRWVLAARSPVLKAKLSASPSSPATLRLAAMDADAFRALLHFIYTDTLPDDDDDDDAMARRLLAAADAYGMERLRLICEDRLRRRVAMGNVAVTLALAEQHHCRALKEACVEFLSSPGNLKAAMATDGFEHLKATCPSVLTELVMKQLV

SEQ ID NO: 177612 - protein, 50 aa, Oryza sativa
  Clone ID: PAT_MRT4530_75246C.1.pep
MGVYSGRNASFVSARRSIDVFHGAVPASSFSTAHQLSSSSADHLLSSSVA

SEQ ID NO: 177613 - protein, 97 aa, Oryza sativa
  unsure (1)..(97): unsure at all Xaa locations
  Clone ID: PAT_MRT4530_75247C.1.pep
ANKRVGRACRRLSSSNKLTTKFGNISVRKEDWIKARSEAEIEFXTEQESAGVQIGYGXDRLGLSQAKDKYGQKSAAKTYGILEFVRDNSRVRYGHIL

SEQ ID NO: 177614 - protein, 70 aa, Oryza sativa
  Clone ID: PAT_MRT4530_75248C.1.pep
NAHTLGTHHLHARQTLEGPAHAEFNRGHTVRTHIKTTDELYGRSDAYNSSSQEHRWKVHLMKMDANYRRH

SEQ ID NO: 177615 - protein, 69 aa, Oryza sativa
  Clone ID: PAT_MRT4530_75249C.1.pep
MLHIRAQAVGWPPVRSFRRNIMTVQSVKSKKEEEADKQQQQPAANASGSNSSAFVKVSMDGAPYLRRGT

SEQ ID NO: 177616 - protein, 56 aa, Oryza sativa
  Clone ID: PAT_MRT4530_7524C.1.pep
MGSWHSSESLPQSLDHDTILSFLNLSQFAVARFLAIQVVLACVKVCGGTLQGIIQQ

SEQ ID NO: 177617 - protein, 175 aa, Oryza sativa
  Clone ID: PAT_MRT4530_75250C.1.pep
MRRQSTRGRSTGSGGGEESEALAAAVHAGRISSEDAAAQRQNIRGGGGASEEEEKRSLRVWSDVFAGGGGGAKASSMMNEMAVTEGEQQITRNVVRKKWSPPGLETQKTGGWGFILRNSEGQGLLAGAGRLAFVHDADSAEARACQAALLAASVQGITEVGIETDSLILVSALKS

SEQ ID NO: 177618 - protein, 90 aa, Oryza sativa
  unsure (1)..(90): unsure at all Xaa locations
  Clone ID: PAT_MRT4530_75251C.1.pep
RTRGSHETTGGTPGSSLADPETSAKNRELEVIHSRRAMLRCAGLRVPRXLIAANGVKFAEACWFKAGXMIFSEGGVDYXGTPSLIHAAEH

SEQ ID NO: 177619 - protein, 580 aa, Oryza sativa
  Clone ID: PAT_MRT4530_75252C.1.pep
MALWWPLLVLAAAYALCRILLFLIPPTVPSIDVDASDAHGSWGLCGIYSNGIGSDRVLLYAVLEDANQNKEDSYIYISNDIGSHIASSFQIPPRKGKGAQTDKVQCYEPATMKYLGYFPALTPDEVKEHVAQARKAQKIWAKSSFKQRRQFLRILLKYILEHQDLICEISSRDTGKTMVDASLGEIMTTCEKITWLLDEGEKWLKPEYRSCGRSMLHKKAKVEFYPLGVIGAIVSWNYPFHNVFNPMLAAIFSGNAAVIKIMNRASDTLIPVTLELGGKDAFIVCEDVDLPSVVQVAVRAALQSSGQNCAGAERFYVHKDIYSTFVSQVVKIIKSISVGPPLSGRYDMGAICMIEHSEKLQNLVNDAVDKGAEIAGRGSFGHLGEDAVDQFFPPTVLVNVNHTMKIMQEEAFGPILPIMKFNSDEEVVKLANDSKYGLGCAVFSGNQKRAIKIASQLHCGVAAINDFASSYMCQSLPFGGVKDSGFGRFAGVEGLRACCLVKAVVEDRWWPYVKTMIPKPIQLMIFIQYPVSENGFEFQELLVETLYGLSVWDRLRSLVNLLKMISEQNNSPANTRKKSR

SEQ ID NO: 177620 - protein, 230 aa, Oryza sativa
  Clone ID: PAT_MRT4530_75253C.1.pep
MAVAAPAKAAHALAAAAAGMVLLWCVHFRGGLALSSPTNKGLIFNVHPVLMLIGFIILGSEAIMGYKIWPWGHDTNKMVHLLLHAIALLLGSVGIYAAFKFHNESGIANLYSLHSWVGLGTICLYGVQWIFGFVTFFFPGASPSLRRAALPWHVRSGLLVYILALLAAELGFLEKLTFLEAGGLGRYSSEALLVNFTAVLVILLGSAVVMYVTAPMHNEHSHGYSAVRKP

SEQ ID NO: 177621 - protein, 225 aa, Oryza sativa
  Clone ID: PAT_MRT4530_75254C.1.pep
GRSSFTRSKVEFYPLGVIGAIVSWNYPFHNVFNPMLAAIFSGNAAVIKVSEHASWSGCFYFRIIQAALAAVGAPDNLVHIITGFAETGQALVSSVDKIIFVGSPGVGRMIMNRASDTLIPVTLELGGKDAFIVCEDVDLPSVVQVAVRAALQSSGQNCAGAERFYVHKDIYSTFVSQVVKIIKSISVGPSLSGRYDMGAICMIEHSEKLQNLVNDAVDIVLRLLA

SEQ ID NO: 177622 - protein, 93 aa, Oryza sativa
  Clone ID: PAT_MRT4530_75255C.1.pep
KDSGFGRFAGVEGLRACCLVKAVVEDRWWPYVKTMIPKPIQYPVSENGFEFQELLVETLYGLSVWDRLRSLVNLLKMISEQNNSPANTRKKSR

SEQ ID NO: 177623 - protein, 86 aa, Oryza sativa
  unsure (1)..(86): unsure at all Xaa locations
  Clone ID: PAT_MRT4530_75256C.1.pep
VRYHVXKAXKANRKEGAALVRLIFHDCFVXGCDASXXLDPTAENXHTEKTAXINIGLXXFELIDEIKAXXEERCPXVVSCADIVIY

SEQ ID NO: 177624 - protein, 99 aa, Oryza sativa
  Clone ID: PAT_MRT4530_75257C.1.pep
RPHYMSFRYMIYAPIAICLKLNLSCHLTPFLSMVSLLLSYLVFLSLNFPTLCHVLCSSWYSLLVVQTYFPYCSPSHLFLSVLCISHNLSAFFESQSSLR

SEQ ID NO: 177625 - protein, 94 aa, Oryza sativa
  Clone ID: PAT_MRT4530_75258C.1.pep
RGQGSACSVSGHGVAMIDYPRGGEFANPKCSFDHSMYNCVRISVLLFIGVSSIVQTFGSNTLLLALGLYSLSPGIYNFVQVTYLSYVQYCFNMH

SEQ ID NO: 177626 - protein, 129 aa, Oryza sativa
  Clone ID: PAT_MRT4530_75259C.1.pep
MQEFHPVPGLAGRLFGGAAAAAAVAAVEEVRCPRCDSSNTKFCYYNNYNLSQPRHFCKACRRYWTKGGLLRNVPVGGGCLKPKRPAPPEFFFLHRGGGISLLLATQTDCVLSACLTVSGDSSRFAFVML

SEQ ID NO: 177627 - protein, 95 aa, Oryza sativa
  Clone ID: PAT_MRT4530_7525C.1.pep
RQRLRAQVRLNLNQYSGLAELVESTVGDKLVLVSFFLFKNPIPGTGKSNNVGTRWHSSVNNRCLIRLSCRNQSFSSFLSSRSNMTVLNLKQSGLS

SEQ ID NO: 177628 - protein, 40 aa, Oryza sativa
  Clone ID: PAT_MRT4530_75260C.1.pep
RLYQKRYFLFGGNFKHLDVYQSSTIYQNLLRLTTTITKTY

SEQ ID NO: 177629 - protein, 105 aa, Oryza sativa
  Clone ID: PAT_MRT4530_75261C.1.pep
MGAYFSVLYATTSYAQLFLPRTPVRVYDNIFDAGTWGGFFIICIMVCVVLGLRVDDARVLVACTCVVAAFVVGVVVVWVWLARTYGGDEDEDEASSESTSARLTV

SEQ ID NO: 177630 - protein, 149 aa, Oryza sativa
  Clone ID: PAT_MRT4530_75262C.1.pep
PVIIELEGKNKGVRGRNGHNDFRFEAAWLEEEKFKEVVKEAWDVSAGLQGLLVHASLAGVAAGLSSWSSNVLGDLEKRLKKVKKELETCRRQPISRDQVVREEVLRYRLEKLEQQNLLDVVDRKVSGAMNESLRAEFTREEVKEALDAI

SEQ ID NO: 177631 - protein, 91 aa, Oryza sativa
  Clone ID: PAT_MRT4530_75263C.1.pep
MGTAHGKVVKPPCVRYRVMAHGSVDFIIMSIAQPTRYVCSRTLQILVVQVEEERHLPHLSPLLLKRLKSYDFVPLLGLHTSKHWEVGRWSS

SEQ ID NO: 177632 - protein, 128 aa, Oryza sativa
  unsure (1)..(128): unsure at all Xaa locations
  Clone ID: PAT_MRT4530_75264C.1.pep
DEDTTSSDITMIILYINQPKHXLQMDLAADLEGIXGPMSTYWKAYGVYFXMVFVPRQNSYRATGNLQNKPLISLLGEVNQVLARLITKGDVVLRLRGSVACSFRSRIELCSDSAQIDCLLIHFERSGP

SEQ ID NO: 177633 - protein, 64 aa, Oryza sativa
  Clone ID: PAT_MRT4530_75265C.1.pep
VLYDHAYRCHFHAAILRSGDEAWMLMDRHLIVNFPHLLRDDCRVPIYPRLLRCYCTMVRIIGAT

SEQ ID NO: 177634 - protein, 390 aa, Oryza sativa
  Clone ID: PAT_MRT4530_75266C.1.pep
MKQPYADDDGDRLSALPDCLLHTVMSFLSARQAVRTCVLSRRWRGLWLSMPCLNIDGDEYRPATAGGGGGATITERWERLENFTTSLLFAHNAPFLDRFRLHLPNFQRITATQQHHGRQMERWILRGFRYRPAALEIAVGVAAVAFKLPLLGTSSASRLKRLHLSGVVLDGGFGECIRSWCPVLEAMELKACIFEDLKEIVSSTIKSLAIVDCRSGHHTDALVCRMDSLVEASISGTRFGSDFDKTTSTLIGSLINVRELNVSWFQPVELKYGESANFQTFHELTTLNIYECDLGQNLHILLSFLQNTPNLKKVILQNCEISGHSRKRKRTPRANRNQIHSKRRSLITSKSEISKIMKMTYEDDGVSDLIELLLRNWRKLEDHTIIITKI

SEQ ID NO: 177635 - protein, 52 aa, Oryza sativa
  unsure (1)..(52): unsure at all Xaa locations
  Clone ID: PAT_MRT4530_75267C.1.pep
MPIDVALAXSTSAGXAAAAAARALAARVTXTRGYAASAXSSXIQVVHSDSFR

SEQ ID NO: 177636 - protein, 135 aa, Oryza sativa
  unsure (1)..(135): unsure at all Xaa locations
  Clone ID: PAT_MRT4530_75268C.1.pep
NSGSGCRNSARVLACXYATQXNDPNNNCATTMFSYIKLYSIYPPGXXANECRDSKRGLESSQSQSSPAASTSATAALSLFHRQSQPLLFILSAATFLPISSTCFDFVTAYTSHWHSVLIYRYMLVQVPLPAVHHV

SEQ ID NO: 177637 - protein, 94 aa, Oryza sativa
  Clone ID: PAT_MRT4530_75269C.1.pep
GGVYLRRAKKALCGWPRLIYQTTQLRHSLFNLTGPKSPKRNGLTKNYLVYRGFHHWRQKGTLLTGGHTVLWGHPPPNLRRTLPASLDTAGASSP

SEQ ID NO: 177638 - protein, 122 aa, Oryza sativa
  unsure (1)..(122): unsure at all Xaa locations
  Clone ID: PAT_MRT4530_7526C.1.pep
APVLSTIPSPLQMRKETRASTGAEAXRRDGNGTEARRTLTYGGRRTQSHASCSSPMAGNEGRRSQPSIHPSFGHIATLHTNRRWCVGSILHRRSSLSDAVLKGSVSSIERIPDVEVNYSLSV

SEQ ID NO: 177639 - protein, 1729 aa, Oryza sativa
  unsure (1)..(1729): unsure at all Xaa locations
  Clone ID: PAT_MRT4530_75270C.1.pep
MSFDVTQLSFDDSWRRPWGPPSEPLRARAKPLMPPKIIAKERVAKRKESGNEGEMASKEGAEPSAFEAEAGVASLLPPSAPTAPTSYKSRGRPKSPPRRNKLQLRPHSPPRKPTPTMKARXEADMGVMCQNMDKPQDTLRQMQVQQQAYEAARQAKAYTQQFSTVYTQPQALPSHVAQVLQAXSLALQAQFQAFLQQQLNQPNNNIPAEGSPSQRAPAGQLLNQFGIPSQANQPAQGASPQTQPTQFDPSATTQAPMTFIQPRPAGFGTAPPPNQAWTQTMIDPTVATQVIPANQQAQALLFGAGHQSTPVAQPHVQAMTSPFALSYPQLSWPSRQGVMVKPGGEKGLPLSWGLKNHSIPPQFKFPPVPRYSGETNPKEFLSIYESAIEAAHGDENTKAKLIYLALDSIARSWSSTLNKQATTSNRFTRKPRKIYVAPFTDTLPTPLSSVETSDKKTIHKLQGSSKFKPKSRLAKQLRTVRTRLSSARMYNEGQRAPRYLAQQISFGPEDAEGVLFPHQDPLVVSAEIAGFEVRRILVDGGSSADVIFAETYAKMGLALSQAPTSLHGFKGEAVHVLGQVHMTVAFGTQENKREEEILFDVVDIPYNYNAIFKAISHHNYLKLKIPGPAGVIFVKGLQPSTASLSPTGREVHTVEVEGQDRARLVLKPAPHGKVTQNIDIFTWGPDEVGGVSPDLIMHHMAVKPDAKPRKQKLRKMSADRQEAAKAKVQKLLKVGVIEEIDHPEWLANPVLVKKSNGKWRMRIDFTDFNKVCPKDDIPLPRIDQLVDSTAGCELMSFLDAHSGYHQIDMNPADIAMTSFITPFGTFCHLRMPFGLRNAGATFARLVYKVLGPQLGRNVEAYFDDIVVKSRKAFDHASDLQETFDNLRAAGMKLNPDKCVIGVHASKLLGFLVSERGIEANPEKINAIQQMKPPSSARQNEEADALAKSASCGGPHSPGVFFDVLYAPSVPKDGLEIMVIDQVELAKIRTIGDRRSSGTSKRAGCQMRPKQNNCSSELLAHASLRLFCQRRGNGERDTSRDVWCSPSHKNRSIQEFQIGILLDKWKLILAWYLVLLDDIWNARDWDILRCSLPNNHLGSRIITTTRIVDVARSCCSHKEDHIYKMGPLSDLDSQRLFFRRIFGSDDGCPTQLKRISMDILKRCRGLPLATLTLASILADVPMLAEKWKQVHNSIGLATPGENMNRILSLSFHDLPNHLKTCLLYLSIFPEDYVIEREQLVWRWIAEGFIPETRGIPLEGVGSAYFNELINRSMIQPADVQYDGTVQSCRVHDMILELIVSISTKINFVAVLHKDQDETRFTDYKTKVRRLAHQSNCIEKLLERMSRDDLSHIRSIISFDYVKGIPHLGDFQALRVLDLGSCRSIENHHIENLEMLYQLKYLDLSRTSISELPMQIDNLRYLETLDLRGCAIEKLPASTVRLQNMQRLLVNRSVKFPDEIGHMQALQTLLFVSMSCNSIKFVEELSKLIKMRVLNITFSKPVDMVDEVRKYTDSLVSSLNELFNLESLKIDPEEGCSLDSLMGVYLTFGCLKKLVIGYISRIPKWINPSMYNLVHLELKVDIVREEDLHSLELLPCLLYLQLEMTDGSSKMLTVGSEGFRCLRESQFIWKNDGMGLVFLEGAMPELQTLHLYFRTHETIANYSGVDGNGIENLSRLKKLCVDVDCSGSTREEVEAAEDSIRKAADRHRTKLTLEIRRWCEACMIEEEAHDG

SEQ ID NO: 177640 - protein, 104 aa, Oryza sativa
  Clone ID: PAT_MRT4530_75271C.1.pep
TAAKLWFIVVEWICRPQVRCIWSRCSFVMWPIMHDRVGVVYYTGMQHGLRFVQYWIYSSPDHRSRILSFRGTMVTALSPFFLSFNMYSVGPGISPFLAMKSVSM

SEQ ID NO: 177641 - protein, 38 aa, Oryza sativa
  Clone ID: PAT_MRT4530_75272C.1.pep
TLKTKDSESNLLKQTLSPLVLLSLWKSALNRTHTVTLA

SEQ ID NO: 177642 - protein, 83 aa, Oryza sativa
  Clone ID: PAT_MRT4530_75273C.1.pep
HGHVHHISYMIVGHGLVSLLMWHDQASAFSSTHRLILLHCLNSVDDVSLNIWTPMVHLYHKLTYPCTKRYDMNRISNVPARSP

SEQ ID NO: 177643 - protein, 36 aa, Oryza sativa
  unsure (1)..(36): unsure at all Xaa locations
  Clone ID: PAT_MRT4530_75274C.1.pep
PEQLADPKTYRRCVXWCLPGLQDTWNXLLXXKLFYP

SEQ ID NO: 177644 - protein, 1099 aa, Oryza sativa
  unsure (1)..(1099): unsure at all Xaa locations
  Clone ID: PAT_MRT4530_75275C.1.pep
MEGLLQDAGLQQIAASTTPSSSASTAGSGVAPRRTGGVSAGTLGGGAGGGSLLTSLLMHGPGSRTIEVKQRLSMLLINLKFNXDIAPPSISEPYTPTAQSFGGGNSLEGFYSPELRGELGAGLLDLHAMDDTELLSEDVASEPFEPSPFIPKEMDEDDDDMLPGSQPGPSDNYNAVAFEKDSTARRNNVVKNIAVEGNRPLNGKEASRKEENIVSVYDPSSLAIFVPKLNADSIAXIEEQEXGIEALLNEQVWNCEVYREIVKSIMQISIXIHQRDAFCXGQTFIGKIDSMPHLPLIAAQDLVRYLHHPLFCIRNFKMFVRYFQSYVGKLFDLLSDRRDLLMREDGKKQVCIVGLQEFEVSDVQIVKEYIERGNAARSTGSTGANEESSRSHAILQLAIKKHIIVTDTRRQRDRDANESKNTKAVGKISFIDLAGSERGADTTDNDRQTRIEGAEINKSLLALKECIRALDNDQIHIPFRGSKLTEVLRDSFVGSCEHTLNTLRYADRVKSLSKGSNTRKEQPTGPTIPSSKDSSSAPSYPMPIETEEIANQIQEKRPVETSRKAAENFTSNSSMEPDRNPVSMIPSYSNRGKEENGSSGLNDRERVDLNSSRISYNSKPQSVQSSANLQEEEKVTKVSPPRRKAYRDDKPERQSNYAKKDSGPETSRPGYKVQQAKQLQQQQRPTSASASQNSSRQSEKESSCDDVEIDAILEEEEALIAAHRKEIENTMEIVREEMNLLAEVDQPGSLIDNYVTQLSFLLSRKAAGLVSLQARLARFQHRLKEQEILSHAWLGLFCQFFHCMMRRVTTVFADMDGPNTKGEVERGEREREGRESSRARAARREEMSGEVAAAVGGGAPEENGAPPNVTIYINNLNEKIKLEELKKSLRAVFSQFGKILDVLAFKTLKHKGQAWVVFEDVASATEALKSMQDFPFHNKPMRIQYAKTKSDIIAKADGTFVPRERRKRNDEKPEKKQKREQHHDVSQVGLGVNAYPGVYGAPPLSQLPFAGAQKVMMPEIIVPNNILFVQNLPHETTPMMLQMLFCQYPGFKEVRMVEAKPGIAFVEYGDEGQATAAMNHLQGFKITKDNQMLISYAKK

SEQ ID NO: 177645 - protein, 172 aa, Oryza sativa
  unsure (1)..(172): unsure at all Xaa locations
  Clone ID: PAT_MRT4530_75276C.1.pep
SANLQEEEKVTKVSPPRRKAYRDDKPERQSNYAKKDSGPETSRPGYKVQQAKQLQQQQRPTSASASQNSSRQSEKESSCDDVEIDAILEEEEALIAAHRKEIENTMEIVREEMNLLAEVDQPGSLIDNYVTXTXSFFLSRKAAGLVSLQARLARFQHRLKEQEILSRKKSSR

SEQ ID NO: 177646 - protein, 174 aa, Oryza sativa
  unsure (1)..(174): unsure at all Xaa locations
  Clone ID: PAT_MRT4530_75277C.1.pep
LFVKEYIERGNAARSTGSTGANEESSRSHAILQLAIKKHIIVTDTRRQRDRDANESKNTKAVGKISFIDLAGSERGADTTDNDRQTRIEGAEINKSLLALKECIRALDNDQIHIPFRGSKLTEVLRDSFVGNSRTVMISCISPNAGSCEHTLNTLRYADRVKSLSRGXHTRKEQ

SEQ ID NO: 177647 - protein, 1002 aa, Oryza sativa
  Clone ID: PAT_MRT4530_75278C.1.pep
MGSGSLLLSLLLVLVVVNVGVAVNQDGLSLLDARRALAAPDGALADWNARDATPCSWTGVSCDAGVGGGAVTGISLAGLNLTGSFPAALCRLPRVASIDLSYNYIGPNLSSDAVAPCKALRRLDLSMNALVGPLPDALAALPELVYLKLDSNNFSGPIPESFGRFKKLESLSLVYNLLGGEVPPFLGGVSTLRELNLSYNPFVAGPVPAELGNLSALRVLWLAGCNLIGAIPASLGRLGNLTDLDLSTNALTGSIPPEITRLTSVVQIELYNNSLTGPIPVGFGKLAELQGVDLAMNRLNGAIPDDFFEAPKLESVHLYANSLTGPVPESVAKAASLVELRLFANRLNGTLPADLGKNSPLVCVDMSDNSISGEIPPAICDRGELEELLMLDNKLSGRIPDGLGRCRRLRRVRLSNNRLDGDVPAAVWGLPHMSLLELNDNQLTGVISPVIGGAANLSKLVLSNNRLTGSIPPEIGSASKLYELSADGNMLSGPLPGSLGGLEELGRLVLRNNSLSGQLLRGINSWKKLSELNLADNGFTGAIPAELGDLPVLNYLDLSGNRLTGEVPMQLENLKLNQFNVSNNQLSGALPPQYATAAYRSSFLGNPGLCGDNAGLCANSQGGPRSRAGFAWMMRSIFIFAAVVLVAGVAWFYWRYRSFNNSKLSADRSKWSLTSFHKLSFSEYEILDCLDEDNVIGSGASGKVYKAVLSNGEVVAVKKLWGLKKGTDVENGGEGSTADNSFEAEVKTLGKIRHKNIVKLWCSCTHNDTKLLVYEYMPNGSLGDVLHSSKAGLLDWSTRYKIALDAAEGLSYLHHDYVPAIVHRDVKSNNILLDAEFGARVADFGVAKVVEATVRGPKSMSVIAGSCGYIAPEYAYTLRVNEKSDIYSFGVVLLELVTGKPPVDPEFGEKDLVKWVCSTIDQKGVEHVLDSKLDMTFKDEINRVLNIALLCSSSLPINRPAMRRVVKMLQEVRAEATRPRLEKDGKLSPYYYEDTSDQGSSV

SEQ ID NO: 177648 - protein, 109 aa, Oryza sativa
  unsure (1)..(109): unsure at all Xaa locations
  Clone ID: PAT_MRT4530_75279C.1.pep
ALNNTPSWAXGKRQSSSTNYSTHLHLIPSQTFLLSMDSRRAICPTGINGTVHIQQGQPRTPGTHQLTVLHCRTGVHSSRVNRAVGGRRRRRANSALKISNYRILDTTGL

SEQ ID NO: 177649 - protein, 113 aa, Oryza sativa
  Clone ID: PAT_MRT4530_7527C.1.pep
IRNTQKIKSPPGFSSGYSKLHQVCRNRARVFLTHVHPRNASISNNNSHYQHIYRIRTRATEGIDNGLSGQWSLQLTSQVTNVQNATRSFTGPPKHTHQTVISKPHNHGSRALA

SEQ ID NO: 177650 - protein, 124 aa, Oryza sativa
  Clone ID: PAT_MRT4530_75280C.1.pep
SAPLSNPPTPVSIHRDAIDQAGRGPRSGGSRGGAGSRPPSAGDDHSGGALMGNLSEAGGGGQRGGGLGVEKKSRGFVGFREGFREGTREDWKSGIGATISGRDLSLRLFSPFSLIFFFLFFRGN

SEQ ID NO: 177651 - protein, 53 aa, Oryza sativa
  Clone ID: PAT_MRT4530_75281C.1.pep
LVLPVTENIFYYFSFCQVLVEANGVTRTLVLNRPKQLNALSSAMITCFLRCFT

SEQ ID NO: 177652 - protein, 53 aa, Oryza sativa
  unsure (1)..(53): unsure at all Xaa locations
  Clone ID: PAT_MRT4530_75282C.1.pep
PISRCGVLEHLLKKIEIVFSVEKLGEGEVVEHGSYPHVMSKKGALYNXGGFQK

SEQ ID NO: 177653 - protein, 124 aa, Oryza sativa
  Clone ID: PAT_MRT4530_75283C.1.pep
MVMMVIAGGALVEAAMAAHEAAGGRWPPLHYIRREERLGGGSGRRGGLPRGSGSGREAAHGRVASPLLDPALRGGQASKAAATASGRQCTAGRLAAPRLSCVRGLRRRVVAIIAGSSGVVGYST

SEQ ID NO: 177654 - protein, 103 aa, Oryza sativa
  Clone ID: PAT_MRT4530_75284C.1.pep
YQLDTQGNRYQLIPGYQVSGWRGGRGSRAGCRRRCGSRGTGTASFLRSRRWRPWRGARGRRGAAPAPAATGSVRTEATPQWAEDGVEEARRDHPRRPKRPRHN

SEQ ID NO: 177655 - protein, 36 aa, Oryza sativa
  Clone ID: PAT_MRT4530_75285C.1.pep
EKSLSVLSREDEPTQATHRQRTHFQKQCGKVVTSCR

SEQ ID NO: 177656 - protein, 273 aa, Oryza sativa
  unsure (1)..(273): unsure at all Xaa locations
  Clone ID: PAT_MRT4530_75286C.1.pep
SLALTGRNAPLNWHSLASFYTLLSQITRHCSPPHRRRPLLTGASGRRREGGRDGEELGGEREGERERGAVEPERGAVAATSSMAGSKQIYYSVGDEDLHGRQQGCAEHVVVHSRLRRLGRHGTRSDTXIPARYPGYQVSVDTQVARPDTQGTRYQDGEEVEVPEQVVVGVAAVEAPGPPASSASTVAAEDPSTLTGKEAAGAAGKDSGTRGSREVGDGDLGEEHEGGGERPRRRQRRGACARRRRRSGRRTASKRRGEITPDAPLTSPTTPQK

SEQ ID NO: 177657 - protein, 114 aa, Oryza sativa
  Clone ID: PAT_MRT4530_75287C.1.pep
MASSSLTAHVTNPPVIMASSSLAAAAWTSLPPQGASLYAAPPASTDCPSLATGSPIPMALSRERREGFSRKRDVVVADRQAPFAAPPTVRRTRVDLSTAHDQATCTHIGPKRMP

SEQ ID NO: 177658 - protein, 150 aa, Oryza sativa
  Clone ID: PAT_MRT4530_75288C.1.pep
MEEEQEAARGAAWDCGSPLYDSFEVARLHHVLESNLMILPPFPPDDDDDAAAQRIMLDDGRRAAEVDDANGAAARKSGGRRRKRRTAGWKAAAAIYRAVACWRRPWSNPTPPRGNQEEGGYLTLGPDVPEGMRSGMTPLLKPGDRWDRSP

SEQ ID NO: 177659 - protein, 84 aa, Oryza sativa
  Clone ID: PAT_MRT4530_75289C.1.pep
MLVARLDVARWREMVPLASATNLPWSTPDPITSSQSTALTKQLVFAASRRGGHLARGARASGHGAGALTGEHRARARTYARRRF

SEQ ID NO: 177660 - protein, 387 aa, Oryza sativa
  Clone ID: PAT_MRT4530_7528C.1.pep
MVAAAEAKAAIGVATPTPTAAPCGSTTTPRDADVDDKMTIVGHPAASLPLETRWPPFPLRRLGGFWMPESLLPAVAALHTSFAPAPDGVLLASFPKSGTSWLKALAFAAANRAAHPPSDADHPLRRRNPHDCVEFFEMRPDEHTGATSDGIAVDAASPPPPPRVLATHLPYSLLPKRITAGDGCRIIYICRDPKDTLVSFWHFSKKMAATMAVDAGAFTFDEAFELFCDGNCTGGPQWRHVLEYWEASRRCPGKVLFLRYEDMLRRPASGLRKMAEFMGCPFAAAEEAAGVADAIVELCSLDELRSLEVNRNGTDVLGLKNESYFRKGVAGDWRNHMTPAMAARLDKIVDDATRGSGLSLANATPSPPMHENEIKGNLTIYHSQNDI

SEQ ID NO: 177661 - protein, 376 aa, Oryza sativa
  unsure (1)..(376): unsure at all Xaa locations
  Clone ID: PAT_MRT4530_75290C.1.pep
MSWRRGDGGVARRWVLLLCTGSFFLGLLFTDRMWTLPEVTEVARPNGRREKEDELTAGDCNSAKVNVKRDYREILQTQDTHHAVWTLDKTIAKLETELSAARTLQESFLNGSPVSEGHKGSDSTGRQKYLMVIGINTAFSSRQRRDSIRNTWMPQANNGXGIKRRKLEEEKGIVIRFVIGHXDHVEGYLELSGKTKTYFATAVSLWDADFYVKVDDDVHVNIATLGQILSNHVKKPRVYIGCMKSGPVLSDKDVRYYEPEHWKFGDQYFRHATGQLYAISKDLATYISINKRVLHKYINEDVSLGSWFIGLDVEHIDDRRLCCGTPPDCEWKAQAGNTCAASFDWRCSGICNSEGRIWEVHNKCAEGEKALWNATF

SEQ ID NO: 177662 - protein, 66 aa, Oryza sativa
  Clone ID: PAT_MRT4530_75291C.1.pep
GLSTVRQLVLYGRENMKRLFDYIVLISGLNRLSTKIAMILGLAGAKARNVHDKHSVTYGSYHAPYY

SEQ ID NO: 177663 - protein, 27 aa, Oryza sativa
  Clone ID: PAT_MRT4530_75292C.1.pep
NYCLASTTSLMCFILLRACVSTRILPA

SEQ ID NO: 177664 - protein, 55 aa, Oryza sativa
  Clone ID: PAT_MRT4530_75293C.1.pep
LKIKVSKRLLPPFFPPVASFSYHHYQRHGLFSYVSCTWSVAIRAAADQLVSKLVP

SEQ ID NO: 177665 - protein, 105 aa, Oryza sativa
  Clone ID: PAT_MRT4530_75294C.1.pep
LDQSPSPLVSLILQAMGSPRASRGGMRCGGGGGGDGAGWGVAEEMLSQKNVESVLFRGKKLAEQTNAEKLEWFAHELVKERDRRRTAGALAPAVVKQQPSESAPA

SEQ ID NO: 177666 - protein, 153 aa, Oryza sativa
  Clone ID: PAT_MRT4530_75295C.1.pep
MLSAAASAIPRLRWAAPPRNQSARNQWLLLRRRSLSSSPPYVTPGIPAAAAAAGSGALEPPDLPRLANAARISLSPEEAEEFAPKIRQVVDWFGQLQAVDLESVEPSLRAGTAAGNSLREDRPETFTNRDAIIESVPSYDDPYIKVPRVLNKE

SEQ ID NO: 177667 - protein, 164 aa, Oryza sativa
  unsure (1)..(164): unsure at all Xaa locations
  Clone ID: PAT_MRT4530_75296C.1.pep
PRVRVGICGAQLTELQMRLKDRAXQREVHDCPLDACLQVLDRHLIGRERFQPMVRRPDALGLGMHWXLLLQDVSRECRCAAILRMVRSYEESMPMPMEQGWSPSSSEYXYGGEGSSSEQGYXYGEVSSEEGYYREQQQDPGMTRLRLNRAREYAVQVPSMCRVE

SEQ ID NO: 177668 - protein, 124 aa, Oryza sativa
  Clone ID: PAT_MRT4530_75297C.1.pep
RVFSPNCRYKSCTYGQPNFGAIEIDWNAVPPQIKLELRDVEGNSVGGVEFPISELDPSKAHAITKQGHSYQRHCALETELPWLVWHRLALLLFGTNAVLVIAVVLLGITCLSAANIFTKKSKME

SEQ ID NO: 177669 - protein, 83 aa, Oryza sativa
  Clone ID: PAT_MRT4530_75298C.1.pep
PYRARTFCRHRLRGATGNEPGPPLHPGEDLSRLSKKLKGAPLDLHLAKSNWGVRVPSHNILGAFIQVPNIPTYKEKLGLFFWG

SEQ ID NO: 177670 - protein, 111 aa, Oryza sativa
  unsure (1)..(111): unsure at all Xaa locations
  Clone ID: PAT_MRT4530_75299C.1.pep
RLVASAEGGREGAPSSLFERRYFRQDLGEQSGSSSSSSSSSSGSASDRAPALDAAPTVVGGGGXXYLFYDPLVXEEVSXXEPVEELEPVVRXESSGVLCEFRSGLGVVEPS

SEQ ID NO: 177671 - protein, 43 aa, Oryza sativa
  Clone ID: PAT_MRT4530_7529C.1.pep
MVRGFGLWSYGKGDRVGAAMVVERRFPEAVVEAVVDSATVTLS

SEQ ID NO: 177672 - protein, 129 aa, Oryza sativa
  Clone ID: PAT_MRT4530_752C.1.pep
KFGRKLCRTWKQRSRYYLFSQSLDWARNCGIVAKLFIPSQNEHGDLGEGLGTCKGFKPPKGGSDMGGIHSIPPWIGSPWGLEPKEPNKALGRCLVLPSIEEGKLDERDSTESSSVKVILFSNIHIYSYI

SEQ ID NO: 177673 - protein, 215 aa, Oryza sativa
  Clone ID: PAT_MRT4530_75300C.1.pep
MGDRPENSSWVHTSEDKVCLKYLCWFVRAMCWFVRAIYEPMKAARYGFQRHPSSLIPQKKGRQQEKSSHHEGQLPTSNPSLFKELSLEHPLPAASIPALLPLARWVAAVQLVVLSVAALPDPGNKVPLNCFHGEPSRRTDVREQLLLASDHQTPICRRCCPSSRKIVRSLKLTWVVPIWAVLVSRMKLLMPYRTILSPLPSSRRFFTRSSRHFRV

SEQ ID NO: 177674 - protein, 358 aa, Oryza sativa
  Clone ID: PAT_MRT4530_75301C.1.pep
MASATTLVMLVAAVACLCAPAAAGDGNADATRQPPVVSGLSFDFYRKSCPKAESVVRKFVRDAVRKDIGLAAGLLRLHFHDCFVQGCDASVLLDGSATGPGERQAPPNLTLRPSAFKAVNDIRDRLEKACGASVVSCSDILALAARDSVVASGGPEYKVPLGRRDSAEFASQQDVLSGLPPPTAAVPALLDALAKIKLDATDLVALSGGHTVGLAHCSSFEGRLFPRRDPAMNATFAGRLRRTCPAAGTDRRTPNDVRTPNVFDNMYYVNLVNREGLFTSDQDLFADAATKPIVEKFAADEKAFFDQFAVSMVKMGQISVLTGSQGQVRRNCSARNPGTVAAGDLPWSVLEVADSFVF

SEQ ID NO: 177675 - protein, 143 aa, Oryza sativa
  Clone ID: PAT_MRT4530_75302C.1.pep
KNPKKKEKPPKTKKTTPKKKLLGAKGPENTKKKNQKKKPQLKNQGKNPPKKGKKKKKKTKKKGAKDPAKGKGKQRKKNKTPPPKNTKKRGFQMPKKGGKSLEKQNGRALLPKTQPAKKGIFPKQIKLGNPRFFQTTRFKKTAN

SEQ ID NO: 177676 - protein, 52 aa, Oryza sativa
  Clone ID: PAT_MRT4530_75303C.1.pep
MAVEAVVASLTAAVIRRFHRQQRRLSVDDVDPRRGHFIVYGGDNGERHPSVG

SEQ ID NO: 177677 - protein, 73 aa, Oryza sativa
  Clone ID: PAT_MRT4530_75304C.1.pep
MDDPGDDPDGVEASMPSRRTVCGEEDVDAVIGSFSAVLLSNSPESKASAAATGLDAVDDGNSAGRERGHGPAT

SEQ ID NO: 177678 - protein, 163 aa, Oryza sativa
  Clone ID: PAT_MRT4530_75305C.1.pep
MSRTGGGDGGAAVAAGRCGGPSPSPPPRPTSSPASSPSPPPSPPLSSLRVKPLPCRHLPDDDPDSDFAPDNLDLLRNLPVPDRLLVVSVGVAANLLFAFLIVYALARPPPPLSSPASSAADGEGGEKGGRERGREEEEGLEREDDMSTPPRQRHVSKTALQYR

SEQ ID NO: 177679 - protein, 377 aa, Oryza sativa
  Clone ID: PAT_MRT4530_75306C.1.pep
MAARRRLAAVHAAATAAGGGAVQGTAGGGSQQCTRRPRLQAAAPCGVLPAARCDAMPWRGRRRDAVRWRGRRMFRVTQLLRETTKRVIGTKTTSRADLTLSCFSTVSNLQRLAGKVAVITGAASGIGKATAAEFIKNGAKVILADIQDDLARSVASELGPDAAYTRCDVADEAQVAAAVDLAVRLHGRLDVFHSNAGIPGRIPQDDALSVDLAGFDRVMAVNARPALAAIKHAARVMAPRRTGCVICTASGAGVVPMPALAMYSVSKATVIAVVRAMAEPLARHGLRVNAISPGATRTPMMLNEIPRLAVVSPGLSGELRRMVEEGASDAVKVLEPEDIARAAVYLASDEARYVNGHNIVVDAGYSVHKGAENSPAR

SEQ ID NO: 177680 - protein, 502 aa, Oryza sativa
  Clone ID: PAT_MRT4530_75307C.1.pep
MCDSPSSSSCSSLSLALAMGERMRRAAHAMLFPFPCSGHINPTLKLAELLHSRGVHVTFVNTEHNHERLLRRRGGGGALRGREGFRFEAVPDGLRDDERAAPDSTVRLYLSLRRSCGAPLVEVARRVASGGGVPPVTCVVLSGLVSFALDVAEELGVPAFVLWGTSACGFACTLRLRQLRQRGYTPLKDESYLTNGYLDTPIDWIAGVPTVRLGDVSSFVRTLDPTSFALRVEEDEANSCARAQGLILNTFDDLESDVLDALRDEFPRVYTVGPLAADRANGGLSLWEEDAACMAWLDAQPAGSVLYVSFGSLTVMSPEELAELAWGLADTRRTFLWVIRPGLIAGAGAGDHDVVTNALPDGFVAETKGRCFIAEWCAQEEVLRHRAVGGFLTHSGWNSTTESICAGVPMICWPGFADQYINSRYVRDEWGIGLRLDEELRREQVAAHVEKLMGGGGGGGDRGKEMRRNAARWKAAAEAATAKGGSSYGGLDKLVEQLRLGQ

SEQ ID NO: 177681 - protein, 185 aa, Oryza sativa
  Clone ID: PAT_MRT4530_75308C.1.pep
MADTDDELDPVIVAGANRAFTDNGRKLAVGAGVIINHHRLSSRLPPMANLILVIVVGADRLSTADTLKLGAVIGVVINHRRLSSRLPPMANLSLVIVLAPVVSLPMTSSALSSLPVPIAHSSSTLEGRFYPITSDHKLGISTDEAVDRCRRPHTSTPPSPSCMGEREAKTDDNDQRSLMRGFSGV

SEQ ID NO: 177682 - protein, 175 aa, Oryza sativa
  Clone ID: PAT_MRT4530_75309C.1.pep
MWAPHVNLLFPPLSTSLSSPLLSPPLFSVSTHSLPEDQPSRGERSSAAGGGGGGDEAWVDDREEGARVSARPHASSASSRRHHVRLPKLTYSTDPVGCSSSQAMHAASSSHRLSPAAPPPTRLFARSAPSGPMVYTRGNSSLSTSKTSDSRSSNVRVEDEPRRPGAAVRLVLVHA

SEQ ID NO: 177683 - protein, 151 aa, Oryza sativa
  unsure (1)..(151): unsure at all Xaa locations
  Clone ID: PAT_MRT4530_7530C.1.pep
NPEFHLYNCRELTIPLQVELPXDVPRRITRRMARGAPQEASSSSPPVQMYEGSWDPTADAPXASDSQWHVPQELHWGYSCSSSSSGPSRSSRMRRSVSSXRGSGRTHPRMDTLELQAGNMQHTLEDHVVQSREWQQSVDEQFANLNHMMQQ

SEQ ID NO: 177684 - protein, 71 aa, Oryza sativa
  unsure (1)..(71): unsure at all Xaa locations
  Clone ID: PAT_MRT4530_75310C.1.pep
KVLIQSQGGLKTTRPSXISXQRASHYFXXAXXHLKREXXEIIAETLXCXKSVTXGYSGKGRRFDNETLPIA

SEQ ID NO: 177685 - protein, 65 aa, Oryza sativa
  unsure (1)..(65): unsure at all Xaa locations
  Clone ID: PAT_MRT4530_75311C.1.pep
FIHLFNWGPSSHQTQVEGFLPTDLSDMTLSKCCCFQLKFIALKIIGPDKKFQVVRYXTYNKLRKS

SEQ ID NO: 177686 - protein, 152 aa, Oryza sativa
  Clone ID: PAT_MRT4530_75312C.1.pep
MGYDPREHPESKKYQLLDFRIRKELTDKRLKLLLKKKRMILYPHQSLKHKKGVPTPLLGSNPGQQVDHKETIDSYYIMRRGILPAYHQMFYQLCDLEDPELQAIVTNPLWHKKRPNMKTGYFEVEMFRQLRDALTQMIKDTVLEVNAKKLQQ

SEQ ID NO: 177687 - protein, 181 aa, Oryza sativa
  unsure (1)..(181): unsure at all Xaa locations
  Clone ID: PAT_MRT4530_75313C.1.pep
QATPRLSEDKVKQCVDPKLGGAFPLKAVAKXLPLPTVKLVSESSVLKVEERSVVEQGAEGHFGGEASRYPFSRWRLGLAALILKGVXGVEYCITVDARHQVTAGVHLGSCAFAKKNVQPTTDLKKYIEAIKRFLHHSSSFYAVTINSTFIKQDRVYFTKEFSQNYIKPLMEGKKPSTLKYK

SEQ ID NO: 177688 - protein, 378 aa, Oryza sativa
  unsure (1)..(378): unsure at all Xaa locations
  Clone ID: PAT_MRT4530_75314C.1.pep
GLSTDGMYPFREMSSGYSTWPVTMCIYNLTTLMCTXKSLVVDXMPIIIQGPKQPGNDIDVYLKSLVEDLKVLWRKEGVPVWDEDKREQFNLRALLFVTINNXPTLSNLSGQSNXGYKACTHCMDETESTYLKHCRKVVYMSHRXFLVANHHVRKKDKHFEQKPNHRTKPKHRNEKAMFAMVKDLKVVFGKGPSSQLIESEDGHAEMWKKNSIFWELPYXEVLDGRHAIDMMHLTKNLCVNLXGFLGVYGKSKDTLEARNDLKHMEQREGLHSEPTEKGSHYLSPASYTXSKEEKESMFECLESIKVPSGYSSNIKRIISTKDKKFTNLKSHDCHVLMTQLLLVIIRGILPDNVRATITKFCAFMNAIFRSHKVVVYDR

SEQ ID NO: 177689 - protein, 191 aa, Oryza sativa
  unsure (1)..(191): unsure at all Xaa locations
  Clone ID: PAT_MRT4530_75315C.1.pep
NVLVQTFHRGVGGGVGARRRRRWRRRWSRRVAAAVVESAAAVAAVAAAEVESVRGGGGGGGXWSRRAAAAAGGGVGDEDDGXSIRSAGACQDRSRERECEIGGARFAPLTLREATLPVAFARADERGEHDDDDGGGGDDVWGGNGAGGRRSIVEKSKCGAGKPMQWIFIPGNLLSRFVASTGTKDIFSPGW

SEQ ID NO: 177690 - protein, 294 aa, Oryza sativa
  unsure (1)..(294): unsure at all Xaa locations
  Clone ID: PAT_MRT4530_75316C.1.pep
MAQSRPGRTTACGGVRPDDRRRRQRVAAADTRSGGGWGKRKRRRESSPRAATARGGERRGNSASALLGTKAERRPGGIPRAGTGGRRPEGPREDRGEVRRGREGSQRHESLVGARLGVARSGAKRRLESAAAVEGGGARGDGASEAGRGNGADAGVRHDAAKPLVVVARNGGGGSGCGDQMEGRRRAAAGGATVAGEGEAGPSPGEAESGRQPPVAWAASXGCGWRFWRGEVGENGADVGGEVPRTSARARGGGGGRKRRRRXRLGRPWRQLELEEGDDRLCEGEGKRADGRRD

SEQ ID NO: 177691 - protein, 41 aa, Oryza sativa
  Clone ID: PAT_MRT4530_75317C.1.pep
FHNMHSAKTTPWGSAKKGAPDKLNPYIAIIQACDTTTRSWK

SEQ ID NO: 177692 - protein, 1024 aa, Oryza sativa
  Clone ID: PAT_MRT4530_75318C.1.pep
MCKNQKEYSTTRTIHAHLFQWGFMRSYNCWTSHGEVGIAMEEDEVEDENIPDWAQYGGFEENTMGEAKLDVEGNDGVDKLGQILRDLQEDCESEKEVQKLERMLADHRTALYPGCEKGYKKLSTILEFLQWKAKNGVSDQAFGELLKLVKNILPEGNELPESTYEAKKTVCPLSLEVQKIHACPNDCILYRGEYENLEACPVCKALRYKIRRDDPGEVDGQPLKKRIPAKVMWYFPIIPRLKRFFRNKSHARMMWWHAEERKQDGMLRHPADGSQWRNIDRTFKDFGEDARNRKYIMMPIIIQGPKQPGNNIDMYLKPMVEDLKVLWRKEGIPVWDEDKQEQFNLRAFLFVTINDWPALSNLSGQSNKGYNACTHCLDETESTYLKHCRKVVYMGHRRFLAANHPVRKKGKHFEQKADHRTKPKHRNGKAVFEMVKDLKVVFGKGPGSQPIESEDGHAAMWKKNSIFWELPYWEVLDVRHAIDVMHLTKNLCVNLLGFIGVYGKSKDTLEACNDLKHMEQREGLYPEPNEKGSHYLSPASYTLSKEEESMFQCLESIKVPSGYSSNVKRIISTKDKKFTNLKSHDCHVLMTQLLPVIIRGILSDNVRATITKLCAFMNAISQKVIDPESLAALQHDVVQCLVSFELIFPPSFFNIMTHLLCYLVKEIGILGPVYLHNMFPFERYMGVLKKYVRNRSRPEASIAKGYGTEEVIEFCVDFIEDLEPIGVSESIHEGRLRGKGTLGRRAIMTVDNDLFRKAHFTVLQQSSLVAPYIDEHLVIVRSKNSGKSDAWITRHHIDTFPAWLREHLLGNETIDRQLAFLARGPSGSVTTFQGYEINGYTFYTRAQDKKSTNQNSGVRIDAIGHDGPTSTYYGVIDNIWELEYGPLKVPLFRCQWVRLTGGGVTIDDSGMTTVDLNKVGYSDEPFVLANDVTQVFYVKDMDSKPKKGKGPDEPRRYVVLPGKRKIVRVEDKTDENYDLFEGQPPFAVTVDPSIILSKEDTPYSRNDHSEGTIVRRKYVRKTVT

SEQ ID NO: 177693 - protein, 61 aa, Oryza sativa
  Clone ID: PAT_MRT4530_75319C.1.pep
ELGPKQQKRPLPKLTQPTHPKKDRPKKKIHTNHTIRLLVALKTFPLSTMHRSNPPPNMHPK

SEQ ID NO: 177694 - protein, 137 aa, Oryza sativa
  Clone ID: PAT_MRT4530_7531C.1.pep
MGAGRRRRQKMMPPPLSNFDARNGVPTPGQAEQETMELVRMLTACADSVSAGNHEAAIYYLARLCEMASLAGPMPIHRVAAYFIEVLTLRVVRMWPHMFNISPPRELTNDAFSGDDDAMALRILNTITPILLLGKHS

SEQ ID NO: 177695 - protein, 1122 aa, Oryza sativa
  unsure (1)..(1122): unsure at all Xaa locations
  Clone ID: PAT_MRT4530_75320C.1.pep
MMDRQWMYVDWRSKEFIDGVHYFLGVANDNKRNSFISCPCNKCKNQKEYSTARTIHAHLFQWGFMCSDNCWTSHGEVGVAMEEDEVEDDNIPDWAWYGRFEENTMGEEELDVEGNEGADELGQILRDVQEDCESEKEVQKLEHMLADHITALYPGCEQGHKKLGTILEFXQWKTKNGVSDKAYGELLKLVKNILPEGNELPESMYESKKAVCPLDLEVQKIHACPNDCILYRGEECENLEACPVCKALQYKIRRDDPGKVDGXPLKKRIPAKVMWYFPIXIPRLKRYFRNKSHARMMWWHAEERKQDGMLRHPADGSQWRNIDRTFKDFGEDAQNVRFGLSMDGMNPFGEMSSGHSAWQVTMCIYNLPPWLCLKRKXIMMPIIILGPKQPGNAIDVYLRPLVEDLKVLWRKDGVPVXDEDKQKQFNLRALLFVTINDWPALSNLSGXVKQGVQACTHCMDETESTYLKHCRKVVYMGHRRFLAANHPVRKNSKHFEQKANHRTKPKHRNGKAVFEMVKDLKVVFGKGPGSQPIESEDGHVAMWKNSFFWELLYWEVLDVRHAIDVMHLTKNLCVNLLGFXGVYGKSKDTLEARNDLKHMEQREGLHPEPNEKGSHYLSPASYTLSKEEKESMFQCLESIKVPSGYSSNVKRIISTKDKKFTNLKSHDCHVLMTQLLPVIIRGILPDNVRVTIKKLYAFMNTISQKVIDPESLATLQXYVVQCLVSFELIFPPSFFNIMTHLLCHLVKEIGILGPVYLHNMFPFERYMGVLKKYVRNRSRPEASIAKGYGTXNVIEFCVDFIEDLQPIGVPESIHEGRQRGKGTLGRRAIMTVDNDLFHKAHFTVLXQSSLVSPYIEEHLAIVLSENIGKSDAWIARHHIDTLPAWLREHLXGNDTIDRQLAFLAREPSGSVTTFXGYEINGSTFYTRAXDKKSTNQNSGVRIDAIGHDGPTNTYNGVIDNIWELEYGPLKVPLFRCQWVRLTGGGVTIDDSGMTTVDLNKVGYSDEPFVLANDVTQVFYVKDMASKPKKGKGPDEPRRHVVLLGKRKILSILMTLADRTSPPSPSPPPPLPPPPPPRTAPAAARQLHRRHLADANATAATSTSLSFFLCTHRWQTAMTNKSC

SEQ ID NO: 177696 - protein, 2134 aa, Oryza sativa
  unsure (1)..(2134): unsure at all Xaa locations
  Clone ID: PAT_MRT4530_75321C.1.pep
MNRQWIYADRWSKEFIDGVHYFLGVANDNKRNGFISCPCDKYKNQKKYSTTQTIHAHLFQWGFMRSYKCWTSHGEVGVAMEEDEVEDENIPDSAQYGGFEENTMGEAELDVXGNDGADELGRILRDLQEDCESEKEVQKLERMLADHRTALYPGCEKGYKKLSTILEFLQWKAKNGVSDKAFGELLKLVKNILPEGNELPESTYEAKKTVCPLGLEVQKIYACPNDCILYRGEYENLEACPVCKALRYKIRRDDPGEVDGQPLKKRIPAKVMWYFPIIPRLKRFFRNKSHARMMRWHAEERKQDEMLRHPADGSQWRNIDRTFKDFGKDARNVRFGLSTDGMNPYGEMSSGHSTWPVTMCIYNLPPWLCMKRKYIMMPIIIKGPKQPGNDIDVYLRPLVEDLKVLWRKEGVPVWDEDKQEQFNLRALLFVTINEWPALSNLSGQSNKGYNACTHCLDETESTYLKHCRKVVXMGHRRFLAANHPIRKKGKHFEQKADHRTKPKHRNGKAVFEMVKDLKVVFGKGPGSQPIESEDGHAAMWKKNSIFWELPYWEVLDVRHAIDVMHLTKNLCVNLLGFLGVYGKSKDTLEARNDLKHMEQREGLHPEPNEKGSHYLSPASYTLSKEEKESMFQCLESIKVPSGYSSNVKRIISTKDKKFTNLKSHDCHVLMTQLLPVIIRGILPDNVQATITKLCSFMNAISQKVIDPESLAALQHDVVQCLVSFELIFPPSFFNIMTHLLCHLVKEIGILGPVYLHNMFPFERYMGVLKKYVRNRSRPEASITKGYGTEEVIEFCVDFIKDLEPIEVPESIHEGRLRGKGTLGRRAIMTVDNDLFRKAHFTVLQQSSLVAPYIDKHLAIVRSENSGKSDTWITRHHIDTFPAWLREHLLGNETIDRQLAFLARGPSGSVTTFQGYEINGYTFYTRAQDRKSTNQNSGVRIDAIGHDGPTSTYYGVIDNIWELEYRPLKVPLFRCQWVRLTGGGVTIDDSGMTTVDLNKVGYSDEPFVLANDVTQVFYVKDMDSKPKKGKGPDEPRRHVVLXARGKSLESRIRLTKITICLSRAPTPPXPRADSTSTAAAARQVHLHLXAAATATADSTAAAAAARCSLHAQMADRDDEQILLDTIAEGSSQYWVDDEGNEDPNQYLNKEGNDEGNQEANQEGTEEGTDSQPSAGQKRPRRKRGPAKKLEGRHIVTEIAPDGEPVAPAGIGRKFVDHCGWVVRDNVPISIVYWRRTRSRGDEDSFLPDTEKDMLWTTMLETFTIPEVDRPRCKEWTLKKMAELFQRYKSDMYKRXILKGLTTDFNVHNKLRDHWDAFVAYKIGAQGQAQIEKNKANAAKKKYHHRLGSGGYGKAIPKWDXLEADLIARGIKPATANWPARSRNWFYAHGGSLNPGDGSLIFGDEIRDAARXLADAIEASTQGTFRPDREKDELTLALQNLEHPGRTRGKGVLPWKYGFKEDIHTYRSQMRSKRDTEAKVIDLEYRVSTYEARMQEEVTRQVDQCLAEXRGMEIQAPVMVSPSGNRSSYASTGQVGSEGIEAVAAHEATHFPVDDITQRTPCDMHTPFRNLSIKVVSGMAIPTDPSSTYHFWPIPHGYAKVEIELVEXTYEDLELDIPGGDGEKKLGDTAHAIILWRKKYIVFPGQERPPAPRSPPQAQSPPPSPPHQSPPAPSPAPPPPPRAPAAKSAPSGPRATTPPRAPAAKSTPSRSRPYEPAPSRPKKKARSDEPRLPALKKRAYDLTPEELDEAVRAEVREQLKPCSPEKKIPIAPNVQDHFIKMAEPGKPVEVSDYDRTLRKALKAKPSAVKCGKEVPQLGQQPRQEVEPLVVEPAQLEICNFLKDTGLSMEQLLEDGPIETAPVMYTFKLGEPLVTPDKIRELPTQMYRFHQWYMDKSAMGREMFRARVRNSNYYQGEDVIWIRHKEVFDLYHLKALDVSILNAWILMEIQLCRQHNKFNTGFMDPRKVNTLMIQQYEKQTEDNIVHFLVQQHYKRFILLPYNTSFHWVLLLFDLEKSKVHVYDSMDKPEKTFAKIFEVIDRAWIRFRTLVRGIWNEKLTRRFNFPMIYLIDNTTHDDFIRAVQEKIMGFINKHILDPTGEFYYDGSTIHKAGPSSSDATKSRGCPAPSASYQFLRCF

SEQ ID NO: 177697 - protein, 621 aa, Oryza sativa
  unsure (1)..(621): unsure at all Xaa locations
  Clone ID: PAT_MRT4530_75322C.1.pep
SSVFLLLVVVTVYSRSCTWSGPRHDGHGVRLDRPRQATRLVPSPRSLPPPLPLPPSPHPAAXSPPPPPPPRLEQRELPPPFASSTALPHHSAPPLASPRSLPPPPPRLALSSASSRRRSPPPXPTPPLASPRSLPPPLPRXSPPRSMPPPSPTXPCRPPVPAPSSPTAPPPTTTSPAWPSWPCPTARAQARPSSSWPRLWPSSPTPSXRAPAPAPTPTSRLPPPPLPXSPPPPPPPPPPHPTRRRRGRWASGAVGRRETPSPPPPPPPPPPPPPPHPPPRLPPPPPPPRPSPPPRATTARSCSRTPSTSLPAPVSPVPPTTTRSRGSPPRSPTTTPAPTASMRPASPTARTPRPTLPPPAPPPPSSSAATSGPAPLSPARRTPSPPRTAAIPANPPASSSTPAASXPSPPPPPPPRDPAPPRPPHHPRPRRPRLHPLAPPRLRPGLPPPLPRAPPAAPPRLLPHGQGALPGRGPGVRAAAPAAGARRRAPRRPPPPXRPAPPAPAPTRPXPELPQRPRPRRGVPSRWATGQHHQPDAPRPPPTGSPAGLRTPSPAGADSACLVYAPLPRCRQRRPTTSSNSSIANLIVNSYNSAYYTINSWSHLSYTHYVLKSVLQLVIDL

SEQ ID NO: 177698 - protein, 104 aa, Oryza sativa
  Clone ID: PAT_MRT4530_75323C.1.pep
MASPVCLVLLPVIFCSSRGNHQRPWWIALPPSCLKLQYSKEEMQFQIKLILKIPRGHETLHNLVDEALLLKEARSWSHANLPYANVFGSFKIRPCCIDQIKQVS

SEQ ID NO: 177699 - protein, 140 aa, Oryza sativa
  unsure (1)..(140): unsure at all Xaa locations
  Clone ID: PAT_MRT4530_75324C.1.pep
PYKIKVFIWLLFCGRLNTRDILDRRNCAPXDLTCVLCSLQQRETPFHLFFXCPFSRKCWHKLGISWNTSLEFFQMLVLARLRFRRKGFLEICFIACCHIWEQRNRKIFQNMDPSFDXILLHMCRMNDPLRQSVSDWLQTL

SEQ ID NO: 177700 - protein, 474 aa, Oryza sativa
  Clone ID: PAT_MRT4530_75325C.1.pep
MFARTTPRVRISAPVKKANFGSVRNSHSLKQRLQHLIPEKAAEIKNIKDKHGDKLLGTCTVSQAYGGMRGVKAMIYETSLLDADEGIRFRGFTIPEVQQKLPKAPGGAEPLPEGLLWLLLTGEVPTQAQVSELSADLAHRNKVPEWVFKLLKDLPPDMHPMTQFIIAINALQKESLFAQKYQEGMPKSKYWEYALEDSLNLIARLPTVAAAIYRYTYKNGQIIQPDSKLDWSANFSRMLGHNNKQFDDLMRLYLTIHSDHEGGNVSAHATQLVGSALSDPYLAFAAGMCGLAGPLHGLANQEVLRWIVNLKKKFGDRNITNEELKKALWDTLNSGQVVPGFGHAVLRKTDPRYTCQREFALKHLPNDPLFKLVAQLYEVVPGILKEHGKTKNPWPNVDAHSGVLLVHYGMTEENYYTVLFGVSRAIGVLSNLVWTRALGFPLERPKSVTTEWVRNWSHTAPMANDDQIATSKAD

SEQ ID NO: 177701 - protein, 384 aa, Oryza sativa
  Clone ID: PAT_MRT4530_75326C.1.pep
MAARRSRLAAPTSSSAAAASMQHELLEAAASGDLRHLKRLVRALDKVRGRLQEVVEAARTDGGIWALQLAAGNEQLEVCRYLVEGLRVDVNAADDEGRTPLVFAVIGENAAIVKYLLDHGADPDKADDDGLTPLHSAAGIGDCEMIETLLAKGADIDPAVNVSSVECVKLLVEAGADVNSDCISTAALDSAMGNDGSTECLNFLMEAGANYGGPNDFRVYSVCGCSLPHFWQPKFGNILVEDMIHQPWHQDQHVNKKKIEELKTSGNKAVDREDYISASAFYTKAMDLDPNDATLFSNRSLCWLCMGDGKKAFLDALECREMRPDWPKACYRLGAALMTLKDFESACDALFDGFKLDPDNAEIERALREAMESLKISSKGTKAT

SEQ ID NO: 177702 - protein, 335 aa, Oryza sativa
  unsure (1)..(335): unsure at all Xaa locations
  Clone ID: PAT_MRT4530_75327C.1.pep
FEVPRIKKKQARCIGSIQFKHRATPLHPNQSRTSKNMGTLIFIQETLHQVQXPSFTPLNLSIFPLHFLMETFEPFLGGXISAXLSMDIKLNGKNFQEWELSVYMLRMLIGQACQLADDPPDDRTDATKVKAWRTCXDPVMEXIFMSVXWLLIKQQEXSIEEFYDGFIQLSGQXSGCAQCKAREENDQENLLYQFVMQFPSQFESIQVQLIGXRAHPTMARGSCXIYIIAEDTRLCSLDTTFTPIXTHNVRAVPKVIGHTSYDCFYLHLEKLVDYPARLXVISNSNVAASAPVFXSDITVAGLSSTSATSTRSSSISGVPYSLVARPSYHMLSPSP

SEQ ID NO: 177703 - protein, 44 aa, Oryza sativa
  Clone ID: PAT_MRT4530_75328C.1.pep
MADLRVAVPPLLDLTIAGGTNANESNTNTDNENGDEGIAAENED

SEQ ID NO: 177704 - protein, 101 aa, Oryza sativa
  Clone ID: PAT_MRT4530_75329C.1.pep
AAYSLLVLAVPAGSALSRLALTTDVVLGMVLAGAVASAGAISDIAKNGNSHAGWLPVCGQIHAYCNHVMAALIAGFVALAVHFVVVMYSLHIVTDVICPCH

SEQ ID NO: 177705 - protein, 70 aa, Oryza sativa
  unsure (1)..(70): unsure at all Xaa locations
  Clone ID: PAT_MRT4530_7532C.1.pep
DFEADFREYERGMSDDEAEGGGGXEDEDDYDFVVVVSSPAGAMLFLLCHCQCFLFWLVVFLSDFKCFAQN

SEQ ID NO: 177706 - protein, 83 aa, Oryza sativa
  Clone ID: PAT_MRT4530_75330C.1.pep
KQEKQSWGTQVIVNHSSCVAAPSPYLMNCHWVAKKYEWRSQKKKKKKKKEKKKNIKITQIQKDSEQKKIKNNNKYITIMGGPF

SEQ ID NO: 177707 - protein, 114 aa, Oryza sativa
  Clone ID: PAT_MRT4530_75331C.1.pep
PITSLYSAAATAPPACATAAAAETEEEAMARGEERRRAGTGTGTQDKAGGVAVGADPGEGGEAYAACRCSASSGERRRGFDDHYLCRRSSRCGCGLVPAPPPLWSLLGPPPPPR

SEQ ID NO: 177708 - protein, 71 aa, Oryza sativa
  Clone ID: PAT_MRT4530_75332C.1.pep
MALPIAFLAVLAIAVKKATKAHTRTYPLEAVMLPATEQLLQPAPSPSPPPPPPQCDGQRLVGGDAAVEIDS

SEQ ID NO: 177709 - protein, 379 aa, Oryza sativa
  unsure (1)..(379): unsure at all Xaa locations
  Clone ID: PAT_MRT4530_75333C.1.pep
MAPPTVLNSGEPDARRRERPHVVFIPSAGMGHLLPFFRFIGALSSHDVDISVVTVLPTVSAAEADHFARLFHDFPSIRRVDFNLLPLDASEFPGADPFLLRWEALRRSMHLLAPAIAGVAPRATAVVTDVTLVSHVNPIAKDLRLQCHVLFISSVTMMSLCSYFPIYLDNKDAEADVGDIDIPGVRRLKRSWLPQPLLDLDRALHEAXIDNGREVVKTDGVLINTFDALEPVALAALRDGKVIRGFPSVFAVGPYSSLASETKAADAESSALAWLNQQPARSVVYVAFGNRYHVSNDQLREIAAGLEASGCRFLWIVKTTAVDRDEAAGVRDVLGDGFVDRVRGRGMVTKAWVDQEAVLGHPAVGLFLSHSGWNSVTEA

SEQ ID NO: 177710 - protein, 101 aa, Oryza sativa
  Clone ID: PAT_MRT4530_75334C.1.pep
KVWKRRQRLVRPWTPVNSSREYACVKMSEPPSVQLSLICHIGHRCVGIKSDVRSGSEEKKKSHCPHSRLVRRNNIRSDFIVVLDGALGHSSAEICAVEWRQ

SEQ ID NO: 177711 - protein, 1230 aa, Oryza sativa
  Clone ID: PAT_MRT4530_75335C.1.pep
SLASLTFLSSAASPSSSIFPRLAAEGLPASSLSSPLAASLSSAHHPLPAAVAYLRLLLAPASPLLSLFSPLPFLSLLLALRKSASSSAASHDAAAAANPSSGSGSGSGSGKGNHRNRKRKSHQQRQSPAAAPSLLPRALALLADAAGRLPLGEHPDARRSLVDTAAELAAFDVLVAVLGSGYYAEAMPDLVRALAPVALSGSRSAARASAVEFLARKVVPLGVEGGEDGVRKAVGYLPRYLAAKAPEKSEARAMAVEAIVEVVRAMGQLEMEGFAGYVVAMAKGKAKGRLLAVDLILAMLPLLLPSEGDDCGLQEGSWGLKFVRVLVERCSDTVGGVRARALTNAAQALDVLSERGMEVDRLQEVMRIGNIGLGELLRLRCADDKAAVRKAALVLITKSIRLIGRPVDESLLSAMGAACSDPLVSIRKAALAAISEVFRNFPDERVTKEWLQAVPPLVIDSETSIQEECENLFLELVLNRVCQAANLNLNDDSNDMEEVFPKGTLDLLKSICDGEVAPCIKKICASLGKKKKLKPLLASSLQNIITISESLWLRGCKPIEMWTAPAGAWWLLSEVSSFAPKSVNWKFLSHHWKLLDNVGQDKGKVRPKGEPNSALWAVDRVSLLQTISNVSMELPVEPAAELAHSLLTRIENFDMNLSEVNMSVIYKVDAHVKSLKTLCKRKAKTAKEGETLILKWVQQLICKAVNILDEYIKETSEAAKGPKFFTPLSGKLKGRKDASAQKSMSHAVIAVFTIGSLILACPTANVQGVIPSLHTIITSGNSQPRPKNLAGGTVSFKELAPSLYIQSWDTMAKICLVDDKLAKRYIPLFVQELERSDLATLRNNIMIALADFYVRYTAMVDCYMSKITKSLRDPCEVVRRQTFILLSKLLQRDYVKWRGVLFLRFLPSLVDESEKIRHLADFLFGNILKAKAPLLAYNSFIEAIYVLNNCLGNGAQTESQGRGTDERSRSKRMHIYVSLLKQMAPEHLLATSAKLCAEILAAACDGLLNVDDAAGRAVLQDALQILACKEMRIHPNICTDNSEMDEECGDGGSSNATLQAAKGRAVTQVAKKNLIQIAIPIFIELKRLLESKNSPLTGCLMECLRTLLKDYKNEFDEILVADKQLQKELLYDMQKLDVAGKGKAKAAAAAEAGPSGASPAVNGGGKRAADGSARATARSVLKEVNRNTPTPPLNSMSVPKVRSMLGVGSRRPAVLESVRRLEPFGSDDEN

SEQ ID NO: 177712 - protein, 163 aa, Oryza sativa
  Clone ID: PAT_MRT4530_75336C.1.pep
PRVRKTSGLRRDDRMLIEAHRTYGNRWSVIARCLPGRSENAVKNHWNATKRSLKSKRRMKKKSVQVVNSPPGQLSPLEEYIRSQYPSAVETTPPPPAVPAPPSDVIVHGAGSVSAGPTVATQEPTGTNPSEMGIYLGLGNPAGPTTQQLAAMNLNMSLAPDLN

SEQ ID NO: 177713 - protein, 517 aa, Oryza sativa
  unsure (1)..(517): unsure at all Xaa locations
  Clone ID: PAT_MRT4530_75337C.1.pep
SLDHLLSGTYGGNLAHDFGRILFHSPSAVLKPQAPRDISLLLSFLSASPLGKVTVAARGAGHSIHGQAQALDGIVVEMSSLPSEIEFYRRGEGDVSYADVGGGIMWIELLEQSLKLGLAPRSWTDYLYLTIGGTLSNAGISGQTFKHGPQISNVLQLEVVTGRGEIVTCSPTKDAELFNAVLGGLGQFGIITRARILLQEAPQKVKWVRAFYDDFATFTKDQELLVSMPVLVDYVEGFIVLNEQSLHSSSIAFPTNVDFNPDFGTKNNPKIYYCIEFAVHDYQNKNINVEQVVEXSRQMSHIASHLYSVEVSYFDFLNRVRMEEMSLRNSGLWEVHHPWLNMFVPSAGISDFRDLLMDSISPDNFEGLILIYPLLRHKWDTNTSVVLPDSGSTDQVMYAVGILRSANPDDGCSHHCLQELLLRHRRLAGAAASGLGAKQYLAHHPTPAGWRRHFGRRWERFADRKARFDPRCILGPGQGIFPRDTGNIKGRSTRSSNTVTSTPQDDYIFLLPTKADT

SEQ ID NO: 177714 - protein, 335 aa, Oryza sativa
  Clone ID: PAT_MRT4530_75338C.1.pep
MAVTESACLSYEQEAVAVREVAQVYELIKTQQPLLLVHQQPQQLAHGLLNHALRALNVALSVMNQPHASSSAAAAAVPVMSLIKAEAATPANSSSPAADVAADNHVVGKPRRSSSAAKRRRINGEEYKSSSWSQFTPVPHEDGFQWRKYGEKKIQGTHFTRSYFRCTYRDDRGCQATKQIQQKDKNDPPMFQVTYSNEHTCTTTRLINNINNPAALHNLTANPNGHHDSDDDDTIFTKMIKQEEQAAWLPPPPPADLATISNNFDETPGLHVCQEVPPSSSNSSVISHYADEFDHHQMLETTVMEEALGLGADLDDPYFYDPNLLLIYESLMNCY

SEQ ID NO: 177715 - protein, 166 aa, Oryza sativa
  Clone ID: PAT_MRT4530_75339C.1.pep
MANDNAPQCGKCSRMMENYDHTNSNSRDCTCDKCHFLLAGYSCPYASCKYMIHKVCPVPPASVQGGSASQSQDSGPPCGLCGRLTSIYDYTNSTCSKCYCDIDNCGLLLAGYIVYGCLPCRYAVHKVCPKGPLRNEVINGAVRGTVSGVIGCIFSGLLAASGASSN

SEQ ID NO: 177716 - protein, 178 aa, Oryza sativa
  Clone ID: PAT_MRT4530_7533C.1.pep
MVETLAFCEEKGEEREEETDRRIPGGTASGGGGTAGRYTDIAADLIDSDSDESRDRSRKRSRSQKGPKERSSRKKKSRRDGSTRKKEASEGARFALEDGNGGTGYVMSGSRHARITAVRLRKENQVYSAEEKRALAAFNSEQRARRESKVRDDLRCLVDRTLGKLAGSDHDDDPSSAR

SEQ ID NO: 177717 - protein, 49 aa, Oryza sativa
  Clone ID: PAT_MRT4530_75340C.1.pep
MPPPTGRLPALSRMELVGCEYAREVDEETQDSEPESEKARARHDADVRA

SEQ ID NO: 177718 - protein, 601 aa, Oryza sativa
  unsure (1)..(601): unsure at all Xaa locations
  Clone ID: PAT_MRT4530_75341C.1.pep
NCTTRCGDISFEYPFGVEPGCYHPGFNLTCSSNDTRLFMGDGTVQVLDISIPNSTLRVNATAMAFDPADDVQRGVINADRRPHRHSGXLPATLDFVIRSNSSCSTPANSTAGGECRSEHSFCEDYKGGGNTLLGYSCVCSEGYRGNPYVAGGCHDIDECHSPGYCYGDCKNTEGGYLCQCPLGLTGNASIPNGCKGITTXLSSGSIQLGIINIARILIMALSAPFIVQKIKLHKVKRMKEIFFKQNHGLLLQQLMSQNANIGERMILTLRELEKATDNFDKTREVGGGGHGIVYKGILDLHFVAIKKSRIVVQREIDDFINXVAILSQVNHRNVVKLLGCCLETEVPLLVYEFISNGSLDDHLHVDGPISLSWVDRIRIALEVSRALVYLHSAATTPIFHRDIKASNVLLDDNLTAKISDFGASRYILIDQTGVTTVVQGTIGYLDPMYYYTGRLTNKSDVFSFGVLLIELLTRKKPIYRTDRGDSLVPHFASLLEEGKLVEIIDPQVKEEENGEVEEVATLAAMCTKLNGQDRPTMREVEIRLENLRAKTKHAPYNKEPSRYEVSRVAGHCISARGDIEEVLISRHSMEDEMLSLERYPR

SEQ ID NO: 177719 - protein, 316 aa, Oryza sativa
  Clone ID: PAT_MRT4530_75342C.1.pep
MRGLQAAVLFTAVAAAAAPTNCTTRCGDISFEYPFGVEPGCYHPGFNLTCSSNDTRLFMGDGTVQVLDISIPNSTLRVNATAMAFDPADDVQRGVINATTTWRAAAAADDDGGPFVVSRRNTIALMGCNARVDLRGGDRRHSDNLVSSCTAVCPPVGGGDDAAAHDDGDGGDGHTIAIIDAWNGKCSGVGCCQANIMLGYPSYTIQIKQLQEKNLHSFDFQYIAYITDETLNFTEEIAGRIATPAALPATLDFVIRSNSSCSTPANSTAGGECRSEHSFCEDYKGGGNTLLGYSCVCSEGYRGNPYVAGGCHELNC

SEQ ID NO: 177720 - protein, 104 aa, Oryza sativa
  unsure (1)..(104): unsure at all Xaa locations
  Clone ID: PAT_MRT4530_75343C.1.pep
RHQGGGGADGRGPHVSSSRGERGAGKWGPRRWQPAAEAAARRRRXAAATTGAAARPGAARREREGNRGAGVPHREWPARRRMTVNGDGELWEDNGGGRTRSGMP

SEQ ID NO: 177721 - protein, 34 aa, Oryza sativa
  Clone ID: PAT_MRT4530_75344C.1.pep
TRARPVRLLQVREVKSPISRTLAAGEAPTLICPH

SEQ ID NO: 177722 - protein, 65 aa, Oryza sativa
  unsure (1)..(65): unsure at all Xaa locations
  Clone ID: PAT_MRT4530_75345C.1.pep
HQPEXXHLXAGVFLKCSPFIPNTLKKRHLAYCFSELKLTHFPNVFCLLKKHHPTTITYLNFPTAF

SEQ ID NO: 177723 - protein, 100 aa, Oryza sativa
  unsure (1)..(100): unsure at all Xaa locations
  Clone ID: PAT_MRT4530_75346C.1.pep
AVNAQAATVRRDVAAFVSPLRARPPLLQARVRPPPTATAAPPPPAFPPPPGGTPPLHXLPARPPPLPPPTHAARHESGRPTATATSPLSVSPPLPSYPPR

SEQ ID NO: 177724 - protein, 144 aa, Oryza sativa
  Clone ID: PAT_MRT4530_75347C.1.pep
MQGRSSRRRRWWLLGMLVEASFSAGGREGAGGGRGDEIYVKKPVAAAATQDETLVAMLMSFMTRSVVGKWFYRKAPVRRTDDRNNGRRGSGGAAAGGGGVSLSVAEVMPPVKASRAHGCTECGVEFDSASTYGGTTSWAPRLRR

SEQ ID NO: 177725 - protein, 136 aa, Oryza sativa
  unsure (1)..(136): unsure at all Xaa locations
  Clone ID: PAT_MRT4530_75348C.1.pep
WPSSQSFRGGQGPSRMSPAPVSTICVCKNLFFFAWVVFLFFTKVSGLDQLKVYRWGREFSFCCLIFFAALPFFCPNKCVCMASFRCQCITCIFYRGLLAKVGAPKKKXXKKXKKKKTKKXKKKXXKKKKXXKKXGR

SEQ ID NO: 177726 - protein, 113 aa, Oryza sativa
  Clone ID: PAT_MRT4530_75349C.1.pep
DNFHDPPIKWHDIMTFHWACQIQPAEVTAQSAWCCCRRSKSRLAQAGRCSRRRWRSFLAAVDARPIPSRRHHLEPPEDGPGAIRLPPDHDAARSGKEERLRLCGKSASCRIPA

SEQ ID NO: 177727 - protein, 186 aa, Oryza sativa
  Clone ID: PAT_MRT4530_7534C.1.pep
FPPPLCGGGGGEKWKNPPGQRGERGGPPLGGGSPTPFWPKGGGPNSPRGPPRSGGPPFGAGGLPPRPRIWGGPAPPPAGHRPWRLKGGKKEITGPGLFLTPLVALPKKGSPFPLGSRKFKKNFGKRGGFLKSGGQTFFFFGAPPFWFVFPLPVLVFFWVVGPLGVPPPFWGGPVFKPPKPVGPFPP

SEQ ID NO: 177728 - protein, 364 aa, Oryza sativa
  Clone ID: PAT_MRT4530_75350C.1.pep
MLTRLPHHSSPLVFPCRLSAAAAARTLSTATGSNSTTVKMARSALDEVTDAGAFDRSPSTFRSSISRDSSARFPAVPGRYHLYVSYACPWASRCLAYLKLKGLDHAIGFTSVKPIFERTRETDDHLGWVFPATGDEEPGADPDPFNGAKTIRELYEIASPNYIGKPTVPVLWDKQLKTVVNNESSEIIRMLNTEFNEIAKNPDLDLYPAHLQTSVNEINELVYDAINNGVYKCGFAKKQGPYDEAVTRLYEALDKCEEILSRQRYICGNQLTEADVRLFVTLIRFDEVYAVHFKCNKRLLREYPNLFNYTKDIYQIPGISSTVNMEHIRKHYYGSHPSINPYGIIPAGPNIDYNAPHDRERFSA

SEQ ID NO: 177729 - protein, 492 aa, Oryza sativa
  Clone ID: PAT_MRT4530_75351C.1.pep
MSSDSNSISSALSQTTPVLRLRVWVLIAIGIGILMAILFIIALWLSMRRKKKTAVGFDGRSHMEIPIVSKDINVDRVDAQSLHDSGTPIMPVQDKYEQMKGVSHLAESRSVDVDAFSQCSSVYNIEKAGSSYSEDYSSSGPGRKGSSSYGYASASPLVGLPELSHLGWGHWFTLRDLEYATNRFAKSNVLGEGGYGIVYKGRLMNGTEVAVKKILNNVGQAEKEFRVEVEAIGHVRHKNLVRLLGYCVEGIHRMLVYEYVNNGNLEQWLHGAMSGGILTWENRMKILLGTAKALAYLHEAIDPKVVHRDIKSSNILIDDEFNSKVSDFGLAKLLNSDSSYINTRVMGTYGYVAPEYANSGMLNEKSDIYSFGVVLLESVTARDPVDYSKPADETNLVEWLKMMISSKRAEEVVDPNLEIKPPKRALKRAILVGLKCVDPDADKRPKMSHVVQMLEAVQNAYRQDQKRPSSQMGSVDVESQQSAEEISNSADS

SEQ ID NO: 177730 - protein, 134 aa, Oryza sativa
  Clone ID: PAT_MRT4530_75352C.1.pep
MPVVRSKARYFGPAQARHGPTGVVPVLARPDSRAVPRLHPRIKSTGTLANLKARFWTCTGVKQISQASEQRERTAGGMICRPRPQERRRRVDPPPPLSRATVAGSGGATTTTGGDGCPNNGGDGGCSNYDDDGG

SEQ ID NO: 177731 - protein, 91 aa, Oryza sativa
  Clone ID: PAT_MRT4530_75353C.1.pep
ECYITIHCSNTQIFFLPQSLVSRVLRLHGKLMIQHCFSCSFYRGSGFSGQNQCTSCRMRCNAKHQRTRLMPLVQHGECNVPTFSKQKMGIM

SEQ ID NO: 177732 - protein, 41 aa, Oryza sativa
  unsure (1)..(41): unsure at all Xaa locations
  Clone ID: PAT_MRT4530_75354C.1.pep
RLTGVRGDRRSGGIPATXVGGRESSCGGEANGGGGLARRRP

SEQ ID NO: 177733 - protein, 65 aa, Oryza sativa
  Clone ID: PAT_MRT4530_75355C.1.pep
MGKQRLASSLRDSREAGELVRGGAPSSGKDNKEGAQQRCQPVVTPNTHWHLCDGTSVSPRSGLLH

SEQ ID NO: 177734 - protein, 118 aa, Oryza sativa
  Clone ID: PAT_MRT4530_75356C.1.pep
LVFYSLGFLTFIGFFFLSFNTIQRGTFYITCTGNWSTLTQTGPRKHYCRLLTCTSTTNYTAIRISRLRGRRSRWGPRTQGHIKLQVAYRARGKCACRRGGGPTTRARISKATALSGEG

SEQ ID NO: 177735 - protein, 174 aa, Oryza sativa
  Clone ID: PAT_MRT4530_75357C.1.pep
MAAFHPLAILMFVSLLAAGATANYGYTTPSPSPPPPPQQQAARKGTHSLEGVKPLPKAEVSVICHDANNRVMVRCRRAVANDNGYFLVELDETKVSDFYMGDPRKACYVRLRLLPDFECNNPTNINYSSIEGAPLRDGAPLRDEGKRWADHGYYNFMYATGPLALRPAICPPKH

SEQ ID NO: 177736 - protein, 285 aa, Oryza sativa
  Clone ID: PAT_MRT4530_75358C.1.pep
MAAFHPLAIIVFVSLLAAGATANYGYTTPSPSPPPPPPQQQYTPPAHSDKLLVRVEGMVYCQSCAQRNTHSLEGAKPLPKAEVSVICHDAKNRVMVRCRRAVTDDNGYFRAELDETKVSDFYMGDPRKACYSHFPLPPPTTSSSSPSHPLSRLAAPLVLRCPLSAAPPPPPSLHAPSLLGPSSAGALDLVPPVLCSPRRSPLPVAHSHTSTLSSATSRCSSPPGTYRWRPSSGWCAQWHGCCSRRTCSSRLGGAVRSGSLCRCGSGGHAAACGSYASPEKREERK

SEQ ID NO: 177737 - protein, 190 aa, Oryza sativa
  Clone ID: PAT_MRT4530_75359C.1.pep
MAAFLPLAVILFASLLAAGATANYGYTTPSPPPPPPPPQQYTPPAHSDKLLVKVEGMVYCQSCAQRNTHSLEGAKPLPKADVSVICHDAKNRAMVRCRRAVANDNGYFRAELDETKVSDFYMGDPRKACYVRLRASPDFECNNPTNINYSSIEGAPLRDEGKRWADHDYYNVMYATGPLAFRPAICPPKR

SEQ ID NO: 177738 - protein, 134 aa, Oryza sativa
  unsure (1)..(134): unsure at all Xaa locations
  Clone ID: PAT_MRT4530_7535C.1.pep
RKPTAAGEEKETSGFGGKRXDPNRTRFHELPKRISGCFQKRKGRGDPDDHFPSINSAGNGKDRPDLERNGGGAKLGFRAAAARRRRRXPTGGTHLSATAHSRAGGXRLRTGPXWAEEREXGFGPTFGPKPKEDF

SEQ ID NO: 177739 - protein, 61 aa, Oryza sativa
  Clone ID: PAT_MRT4530_75360C.1.pep
MATGSGWVLVFGPICFYEQKRNRWESMVTLLRVVGTGQKTGLMGPRHAAGMERVKWCRGYE

SEQ ID NO: 177740 - protein, 203 aa, Oryza sativa
  Clone ID: PAT_MRT4530_75361C.1.pep
MAALLLLSSAARVGVAAPLALRQQRPVVLPGGQLRTGSGAGAASAWAARPLRPELAAIASSAFTWGTIAVLPFYTLMVVAPNADVTKRAVDSSAPYVALGLLYPYLLYLSWTPDTLRAMFASKYWLPELTGIVRMFASEMTVASAWIHLLAVDLFAARQVYHDGIKNNIETRHSVSLCLLFCPIGIATHVLTKVLAGSIGRSH

SEQ ID NO: 177741 - protein, 390 aa, Oryza sativa
  Clone ID: PAT_MRT4530_75362C.1.pep
NESFKDIVPFVIFRPRLPGAGGGVVATAAASAAGAFLEVPPATPCAVAIVSVAPCLAHVAVVAPPVRPVPAPTEARCAAFLRGVSPSGGGGEGCFCHLLRNSLLGFPVNTARLGALLPTCAIANANASADSIVEAATLFADTYRGHYRGCGASGLGQEGGEEQVLLAAANPQPPPPPSCDKSDKELRFMFSQWMAKYAKHYSCPEEQEKRYQVWKGNTNFIGAFRSQTQLSSGVGAFAPQTITDSVVGMNRFGDLTSTEFVQQFTGFNASGFHSPPPTPISPHSWQPCCVDWRSSGAVTGVKFQGNCASCWAFASAAAIEGLHKIKTGELVSLSEQVMVDCDTGSFGCSGGHSDTALNLVASRGGITREEKYLYTAVLGSCEGGKRRSGH

SEQ ID NO: 177742 - protein, 143 aa, Oryza sativa
  Clone ID: PAT_MRT4530_75363C.1.pep
MAVAASTEALAVAAAATARAPQHHHIPSQPRWVVILYSPLHGMVAAAPPPPPPQFVKHFAPPAPVTPPPHPQPQQQQATGGRGWIRRREQGREPNEGYDDLGADDEEQQQAAAAGGGPSGEVRSLLPSLLPRSNGEIRRGSSI

SEQ ID NO: 177743 - protein, 54 aa, Oryza sativa
  unsure (1)..(54): unsure at all Xaa locations
  Clone ID: PAT_MRT4530_75364C.1.pep
NGKPSPFHIIITIXGAPTFSIALGSSAHQVQPSIIIIPSLAIHILXRYLPVCHX

SEQ ID NO: 177744 - protein, 124 aa, Oryza sativa
  Clone ID: PAT_MRT4530_75366C.1.pep
MPVGHGYTRRVSIGLTYHASPRRWSPLVRSRIAGHRHQPSPLPSSCPSRPSLVCRRPRACYRPCSYATSRRPRSCTAAAPLATACAAALVRRYVASSRHAANHRCTARRAASHLLSRALPPRRE

SEQ ID NO: 177745 - protein, 173 aa, Oryza sativa
  Clone ID: PAT_MRT4530_75367C.1.pep
IQVGSNGQQGIGTDYSMALSSSQAGDGLPLLLVPSGGGNGARRPPRCAVVERMRRMEARDGLPVSFLFKWCHSGESKRDRSVGGDNNKQSGASPQCLFHGACFHLSARRRGARLRPARPLPRRHTTPPPVAGRPFLPRPACRPARGGRGGRRAHAAPSLRAAVDASPSAVNVR

SEQ ID NO: 177746 - protein, 52 aa, Oryza sativa
  Clone ID: PAT_MRT4530_75368C.1.pep
IGFIYTHPKTVQHITGKQLLSINLYRYFCFESRGNKILPNQKPFCRSPIGFI

SEQ ID NO: 177747 - protein, 35 aa, Oryza sativa
  Clone ID: PAT_MRT4530_75369C.1.pep
SQPPQIAAYPELHSWSKSSLCSALSKKAHESILCS

SEQ ID NO: 177748 - protein, 65 aa, Oryza sativa
  Clone ID: PAT_MRT4530_7536C.1.pep
EQSTEPSPASTRDTLDTVLPSALKKFKRWNNNVMTPLARGLCITWQVTCIDLITLQDWIQAYTRG

SEQ ID NO: 177749 - protein, 105 aa, Oryza sativa
  unsure (1)..(105): unsure at all Xaa locations
  Clone ID: PAT_MRT4530_75370C.1.pep
VFAYAITLCHDNDIRVVSGSLGVVSRLRCIIIWGYMLRMRGRPLMVTAQYGYSSVSVYSSKLISXGGYSSVFSPGCMVMTGCRKELGSQGWLLEVPGEHRIEGIS

SEQ ID NO: 177750 - protein, 146 aa, Oryza sativa
  Clone ID: PAT_MRT4530_75371C.1.pep
MERRGGNAKRGGSPLAGGCSTSTACHRFPDLRMLNSRGRPSGAQEMLSWGWPVDRSRTVGSGDEEKLAGRAGPGESRHGQGSYSIDLGNGQAQQARNHDGGECEIDVVVLDRESLKQLAAAVRRKHCSDSYSVPALLGGGRDWRRE

SEQ ID NO: 177751 - protein, 135 aa, Oryza sativa
  unsure (1)..(135): unsure at all Xaa locations
  Clone ID: PAT_MRT4530_75372C.1.pep
MNANFTLCSCYTDYTASLSGRCIGTGIMFAIAITLCHDDDIRVVSGSLGVVSRLLLGIIIWGYMLRMRGGPLMVKAQYRYSSARVYSSKLISWEGYSSVFSPXMVMTDCRKELGSXGWLLEVLGGHRKEEAGLSP

SEQ ID NO: 177752 - protein, 122 aa, Oryza sativa
  unsure (1)..(122): unsure at all Xaa locations
  Clone ID: PAT_MRT4530_75373C.1.pep
CSCYTEYTASLSGRXIGTCVVFAYAITLCHDDDIRVVSGSLGVVSRLRDIIIWGYMLRTRGGPLMVTAQYGYFSARVYSPKLISWGRYSSVFSPGCMVMTGYRKELGSQGWLLVVLGGHRIE

SEQ ID NO: 177753 - protein, 88 aa, Oryza sativa
  Clone ID: PAT_MRT4530_75374C.1.pep
RAATPGTSRASPPRRTPSPSAPRRQRSTGSSSRRTRSAARTTPTPTGGWRRRGKPSPRGSACARPTSAGRRWAPSSGGAPTTGSGAGC

SEQ ID NO: 177754 - protein, 129 aa, Oryza sativa
  unsure (1)..(129): unsure at all Xaa locations
  Clone ID: PAT_MRT4530_75375C.1.pep
MSTYFTLCSCYIVCTASLFRRCFGAGIMFACAITLCHDDDIRVVSGSLGVVXRLRDIIIWGYILRMSGWPLMVTTQYGYSSGPIYNPKLIPWGGYSSVFSPGCMVMTGCRKELGSQGWFLDLLGGHRKE

SEQ ID NO: 177755 - protein, 81 aa, Oryza sativa
  Clone ID: PAT_MRT4530_75376C.1.pep
AHPAFRGLPFFGFHGWVSSCQLEVVVFSLRVRFRGSKPGFIFPMVPTVFFFPFPLAAVSPGVICPGGLGHANPLLFPVQRF

SEQ ID NO: 177756 - protein, 111 aa, Oryza sativa
  Clone ID: PAT_MRT4530_75377C.1.pep
ARWPSDSVERIAEQAGGVSVEATEFTPMPPPPTHRRGEGGAGASQPPPSRAQVAVASHHAHCCLMCTVEEKGRYTSCRGLLHHHCPFTRSGAQHFFSDMFGFFLFMLFFPF

SEQ ID NO: 177757 - protein, 81 aa, Oryza sativa
  Clone ID: PAT_MRT4530_75378C.1.pep
SKKVKTMMEFVELVTVTQQVVTNTMHYITIEVKEGEDNKLYEGKVWEKTLMDFKELHEVKPVYYRAKALRPIGNLWGSSYQ

SEQ ID NO: 177758 - protein, 129 aa, Oryza sativa
  unsure (1)..(129): unsure at all Xaa locations
  Clone ID: PAT_MRT4530_75379C.1.pep
PTAXYTLCPCDTEYTASLSGRCFGAGIMFAYAITLWGDEDIRRASGIVDMVSRLRDTIIWGYILQMRGGPLMVTAQYGYSPTPVYNPKLISWGGYSSIFSSGCMVMTGCRKELSSQRWLLEVPGGHRIE

SEQ ID NO: 177759 - protein, 87 aa, Oryza sativa
  unsure (1)..(87): unsure at all Xaa locations
  Clone ID: PAT_MRT4530_7537C.1.pep
CRKMQLLLCCCAFWCCCCLATANLRKFHKGPNTPASWELSHVGGSQEINSNCIIIYIFIPCHIVPIRDQKIHLGGPXFSLSKKKKKK

SEQ ID NO: 177760 - protein, 101 aa, Oryza sativa
  unsure (1)..(101): unsure at all Xaa locations
  Clone ID: PAT_MRT4530_75380C.1.pep
MQLLCYDDDIRVVSCSXDVVSRLRDINIWCYILRMRGEPLMVTAQYGYSFAPICNSKLIPWGGYSTVFSSGCMVMTGCRKELGSQGWLLEVPGGHRIEGIS

SEQ ID NO: 177761 - protein, 197 aa, Oryza sativa
  unsure (1)..(197): unsure at all Xaa locations
  Clone ID: PAT_MRT4530_75381C.1.pep
VRGVRLITRNIAQPAHDRGHGYSNSFTLARGVPLYPQDKASTSCLPCVAIXGKYPNRGCDNILCTTQLTTVHRSWIIITPLXKQGMDSPATPTNFSPLLSLAPRDEPCYTKALVREVAGVRRLSRAIREHQRGEDDETNSPVVTVTRIDDGKRPATVGDDGSNGGVDGLRLGAVMPRKATAKLGVDGNNGGVRPEAE

SEQ ID NO: 177762 - protein, 163 aa, Oryza sativa
  Clone ID: PAT_MRT4530_75382C.1.pep
MNANFTICSSYANYTASLSGRYFGTCIVFAYAITLCHDADIRVVSGSLGMVSRLRDIIIWGYMLRMRGGPLMVTAQYGYSSVRIYSPKLISWGGYSSLFSLGCMVMKCCPKELGSQGWLLEVPRGHRIEETGGRRRERKRKGKKTDRWAHKKYLSVFSRFNSN

SEQ ID NO: 177763 - protein, 258 aa, Oryza sativa
  Clone ID: PAT_MRT4530_75383C.1.pep
MKRNNRLKWVSDILKPDGSWDENLVSAIFLPVDVEEIVKIKISSRQEEDFVVWFPDRLGRFSDECSCSSDYAIKKGWNLIWSCNVPQKVKIFGWRAATNSLPTMENKKKRNFGIVGLNVRQVWLATLFVAYKLCNGALESELIACRDGLNLALQWTLLPIAVESDCLEIIQLLNSKEKLLSAEGFIVREIRFLMTGTKEVSFAKVHRNQNRVSHFLANKGRCESMMEFWPDDNCNMISHLVCEDSFIRVNPLFPAKIN

SEQ ID NO: 177764 - protein, 505 aa, Oryza sativa
  Clone ID: PAT_MRT4530_75384C.1.pep
MELLPWLLGFVVKYPEIMASAACFLLLFCRFRRRSKRIPTNWPVVGALPAIVANAGRVHDWVTEFLRAAAMSHVVEGPWGSPGDVLITADPANVAHMFTANFGNYPKGEEFAAMFDVLGGGIFNADGESWSFQRRKAHALLSDARFRAAVAASTSRKLGGGLVPLLDGVAASGAAVDLQDVFMRLTFDLTAMFVFGVDPGCLAADFPTVPFAAAMDDAEEVLFYRHVAPVPWLRLQSYLKIGHYKKMAKAREVLDASIAELIALRRERKAADANATGDADLLTAYLACQDEIGMDGAAFDAFLRDTTLNLMVAGRDTTSSALTWFFWLLSNHPGVEARILAELRAHPPSPTGAELKRLVYLHAALSESLRLYPPVPFEHKAAARPDTLPSGAAVGPTRRVIVSLYSMGRMEAVWGKGCEEFRPERWLTPAGRFRHERSCKFAAFNVGPRTCLGRDLAFAQMKAVVAAVVPRFRVAAAAAPPRPKLSIILHMRDGLKVKVHRRQED

SEQ ID NO: 177765 - protein, 116 aa, Oryza sativa
  unsure (1)..(116): unsure at all Xaa locations
  Clone ID: PAT_MRT4530_75385C.1.pep
TNVLHELADKHGXSLPDYRTTSDGTEQGPMCKSTGVCHDGSHHGEPATTNKQAEMNAARAAYEHSEDRRKNALAFTGLRGPHWGQGTXHISAGQDKIAEPALSVAQRINSCKRQCN

SEQ ID NO: 177766 - protein, 147 aa, Oryza sativa
  unsure (1)..(147): unsure at all Xaa locations
  Clone ID: PAT_MRT4530_75386C.1.pep
MSTYFILCSCYTEYTASLSRRCFGAGIMFAYAITLCHDDDIRVVSGSLDVVSRLRDIIIWGYILRMRGGPLMVTSQYGYSSAPVYNPKLIPXGEYSSVFSPSCMVMTGCCKELGSQGWLLKVPGGHPIEAKGKQKDQRITLFVTNKK

SEQ ID NO: 177767 - protein, 129 aa, Oryza sativa
  Clone ID: PAT_MRT4530_75387C.1.pep
MSTYFTLCSCYTEYTASLSGRCIGVGIMFAYAITLCHDDDIRVLSGSLDMVSRLRDIIIWGYMLRMRGGPLMVTTQYGYSSAPVYNPKFIPLEGYSSIFSLGYMVMTGCRKEFSRWGWLLVVPGGHRIE

SEQ ID NO: 177768 - protein, 102 aa, Oryza sativa
  unsure (1)..(102): unsure at all Xaa locations
  Clone ID: PAT_MRT4530_75388C.1.pep
RQYLKKPVVCGMVELSRAVTQRTRDHINKGRTKKIRVLSEDTRSGSFSFIFSLLSSSMMGVWPMXIGDGISGLVDGKGLAVPLLEAVEHGVDELALVMPRNH

SEQ ID NO: 177769 - protein, 129 aa, Oryza sativa
  Clone ID: PAT_MRT4530_75389C.1.pep
INANFTLCSCYTNYTASLSGRCIGTGIMFAYAITLCHDDDIRVVYGSLGVVSRLRDIIIWGYMLRMRGGPLMVTAQYGYFSARVYSPKLISWGGYSSAFSPGCMVITDCRKELGSQGWLLEVPGGHRIE

SEQ ID NO: 177770 - protein, 144 aa, Oryza sativa
  Clone ID: PAT_MRT4530_7538C.1.pep
MNLVFQIDQDDCLSETIQSCMIIDWATETFWTIYLLHASKIRKHPTLCKIFILRRPPPLPDPCRGRPPPPDPDARGPVAVAPQRRARLLPPRLVDMQQKSGEERSESRERRREEVREIEGSKVKIKGKRERRFEHFEMSKGEEV

SEQ ID NO: 177771 - protein, 3261 aa, Oryza sativa
  Clone ID: PAT_MRT4530_75390C.1.pep
MDRSDALACITSVLILLAPPCASDDRLVPGKPLSPGATVVSDGGAFALGFFSPSNSTPEKMYLGIWYNDIPRRTVVWVADRGTPVTNSSSSAPTLSLTNSSNLVLSDADGGVRWTTNITDDAAGGGSTAVLLNTGNLVVRSPNGTTLWQSFEHPSDSFLPGMKMRVMYRTRAGERLVSWKGPDDPSPGSFSFGGDPGTFLQVFLWNGTRPVSRDGPWTGDMVSSQYQANTSDIIYSAIVDNDDERYMTFTVSDGSPHTRYVLTYAGKYQLQSWDNSSSAWAVLGEWPTWDCNRYGYCGPFGYCDNTARAPAVPTCKCLAGFEPASAAEWSSGRFSRGCRRTEAVECGDRFLAVPGMKSPDKFVLVPNRTLDACAAECSSNCSCVAYAYANLSSSGSKGDMTRCLVWSGELVDTEKEGEGLSSDTIYLRLAGLDLDAGGRKKSNAIKIVLPVLGCILIVLCIFFAWLKIKGRKTNQEKHRKLIFDGEGSTVQDFELPFVRFEDIALATNNFSETNKIGQGGFGKVYMAMLGGQEVAIKRLSKDSRQGTKEFRNEVILIAKLQHRNLVRLLGCCVEGDEKLLIYEYLPNKGLDATLFDGSRKMKLDWTTRFNIIKGVARGLLYLHQDSRLTIIHRDLKAGNVLLDAEMKPKIADFGMARIFGDNQQDANTQRVVGTYGYMAPEYAMEGIFSTKSDVYSFGVLLLEIVTGIRRSSTSNIMNFPNLIVYSWNMWKEGKSKDLVDSSIMDSCLLHEVLLCIHVALLCVQESPDDRPLMSSIVFTLENGSSVALLPAPSCPGHFTQRSSEIEQMKDNTQNSMNTFTLTNIEGRILLKKVLMDRSAAALACITSVLLLLLPPPCASDDRLVTGKPLSPGATIVSDGGAFALGFFSPSNSTPEKMYLGIWYNDIPGRTVVWVADRGTPVTNSSSSLPTLSLTNSSNLLLSDADGRVRWTSNITDDAAGSGSTAVLKNDGNLVVRSPNGTTLWQSFEHPTDSFLPGMKLGVTFKTRTCERLVSWKGPDDPSPGSFSFGGDPDTFLQVFIWNGTRPVSRDGPWTGYMVSSQYQANSSDIFYFSIVNNEEKRYITFSVSEGSPYTRYVITYAGKYQFQRWNISSSAWDVAEWPRWDCNYYNYCGPNGYCDNTARAPAVPTCKCLFGFEPANAAEWNSGRFSQGCRRKEAVQCGDRFLAVPGMISPDKFVLFPNRTLDACAAECSSNCSCVAYAYANLSSSISKGDKTRCLVWSGELIDAEMVGERLGSDTIYLRLAGLDAGHRRKSNAVKIVLAVLSSILVVLCISFAWLKIKGRYIQCSFIYLDAYGKKRKREKHRKLFLDGACTSEEIEDGSPIQDLELPYVRFEEIALATHNFSEENKIGQGGFGKVYMAMLGGQEVAVKRLSKDSRQGTEEFRNEVILIAKLQHRNLVRLLGCCVEGDEKLLIYEYLPNKSLDATLFDVSRKLKLDWRTRFNIIKGVARGLLYLHQDSRLTIIHRDLKAGNVLLDAEMKPKIADFGMARIVGDNQQNTNTRRVVGTYGYMAPEYAMEGIFSTKSDVYSFGVLLLEVVTGIRRSSTSNIMGFPNLIVFSWNMWKEEKMKDLADSSIMDSCLLHEVLLCIHVALLCVQENPDDRPLMSSVVFFLDNGSNTALPAPNSPAYFAQRSSEIEQLRDNIQNSMNTFTLTDIEGSLLTSLAQCKLILKRKKVLMDRSAAALACITSVLLLLPPPCASDDRLVTGKPLSPGATLVSDGGAFALSFFSPSTATPEKMYLGIWYNDIPQRTVVWVADRGTPVTNTSSSAPTLSLTNSSNLVLSDADGRVRWSTNITDDAAGSGSTAVLLNTGNLVIRSPNGTILWKSFDHPTDSFLPGMKLGMTFKTRVSDRLVSWRGPGDPSPGSFSFGGDPDTFLQVFVRKGTRPVSRDAPWTGYMMLSRYLQVNSSDIFYFSVVDNDEKRYITFSVSEGSPHTRTLDACAAECSNNCSCVAYAYANLSSSISEGDVTRCLVWSGELIDTEKIGEWPESDTIHLRLASIDAGRRTKINAVLKVVLPVLSSIIIVLCMSFAWLKIKGKKRNREKHRKLIFDGANTSEEIGQGNPVQDLELPFVRFEDIALATHNFSEANKIGQGGFGKVYMAMLGGQEVAVKRLSKDSRQGTEEFRNEVILIAKLQHRNLVRLLSCCVERDEKLLIYEYLPNKSLDATLFDCLHLLLSMDVSRKFKLDWRTRFTIIKGVARGLLYLHQDSRLTIIHRDLKAGNVLLDAEMKPKIADFGMARIFGDNQQNANTRRVVGTYGYMAPEYAIEGIFSTKSDVYSFGVLLLEVVTGIRRSSTSNIMDFPNLIVYSWNMWKEGKMKDLADSSIMDSCLLHEVLLCIHVALLCVQENPDDRPLMSSVVPTLESGSTTALPTPNCPAYFAQRSSEIEQLRDNIQNSMNTFTLTDIEGRVQKGIQILVMDSTACTTIVVFLLLLPRLCSSASDKIELGEQLLPGQTRASDGGAFVLGFFSPSNSTPERQYIGIWYNITDRTVVWVANREAPAIAAGRSIAPRLALTNDSNLVLSDADGRVLWSTNVTAGVAAGRSTSPPVAELLNNGNLVIRSNGAILWQSFDHPTDTLIPEMKIQLNKRTRRGARLVSWKDAGGDPSPGSFSYGMDPETSLQLVMWNGSRPYWRTTVWTGYLTSGQYLAATGTTIYLDVVDNDDEIYVKLRVSDGASPTRYVMTSSGEFQLLGWDKSSSEWITFSSFPTHHCTTYGYCGPNGYCDITTGAAAACKCLDGFEPASGGEWSAGRFSGGCRRKEAPPCGGGDGFLALPRMKVPDKFSTLVGNMTFDECAARCAMNCSCEAYAHADLSSSSARGDIGRCLVWASELIDMVMIGQTTWGRAGETLYLRVPASSTGSRGRGNVVKIAVPILASALVLTCIFFVYFCKSRENRRKRDSQKTLVPGSRNTSSELLEENPTQDLEFPSIRFSDIVAATDNFSKSCLIGRGGFGKVYKVTLENGQEVAIKRLSKDSDQGIEEFKNEAILIAKLQHRNLVRLLGCCTEGSEKLLIYEYLANKGLDAILFDGARKSLLDWPTRFGIIKGVARGLLYLHQDSRLTVIHRDLKASNILLDAEMRPKIADFGMAKIFGENQQKANTKRVVGTYFGVLLLEIVSGIRISSTDIMEFPSLIVYAWSLWKEGKAKNLIDSSIAESSSLDEVQLCIHVGLLCVEDNPNSRPLMSSVVSILENGSTTFLAMPNQPAYFAQTTSEMDKMTDGSSRNTMTMTVLQGR

SEQ ID NO: 177772 - protein, 227 aa, Oryza sativa
  Clone ID: PAT_MRT4530_75391C.1.pep
VDGPGGRKGFALADSLMQLARQVSRLESGQEHLERPYQNLDPMVITRAEPGLGQMAPRFGIGGIKLAFNSCQDRATAVHHTMLPPNPHPPTRARTSKRVEPASYRTPEPYKNPPQTSLLLFPHLPKLLALSLSCSPRCSPPPPLTGALWLCVTASSAIPSRTTAATPIPQIATGSSSSPCYRGRRRIRHFWPAIAVDRCHPKPCRFLHWLCSFKPHLGHHFPAIGSS

SEQ ID NO: 177773 - protein, 1213 aa, Oryza sativa
  Clone ID: PAT_MRT4530_75392C.1.pep
MDRSAAALACITSVLLLLPPPCASDDRLVTGKPLSPGATLVSDGGAFALSFFSPSTATPEKMYLGIWYNDIPQRTVVWVADRGTPVTNTSSSAPTLSLTNSSNLVLSDADGRVRWSTNITDDAAGSGSTAVLLNTGNLVIRSPNGTILWKSFDHPTDSFLPGMKLGMTFKTRVSDRLVSWRGPGDPSPGSFSFGGDPDTFLQVFVRKGTRPVSRDAPWTGYMMLSRYLQVNSSDIFYFSVVDNDEKRYITFSVSEGSPHTRTLDACAAECSNNCSCVAYAYANLSSSISEGDVTRCLVWSGELIDTEKIGEWPESRRTKINAVLKVVLPVLSSIIIVLCMSFAWLKIKGKKRNREKHRKLIFDGANTSEEIGQGNPVQDLELPFVRFEDIALATHNFSEANKIGQGGFGKVYMAMLGGQEVAVKRLSKDSRQGTEEFRNEVILIAKLQHRNLVRLLSCCVERDEKLLIYEYLPNKSLDATLFDCLHLLLSMDVSRKFKLDWRTRFTIIKGVARGLLYLHQDSRLTIIHRDLKAGNVLLDAEMKPKIADFGMARIFGDNQQNANTRRVVGTYGYMAPEYAIEGIFSTKSDVYSFGVLLLEVVTGIRRSSTSNIMDFPNLIVYSWNMWKEGKMKDLADSSIMDSCLLHEVLLCIHVALLCVQENPDDRPLMSSVVPTLESGSTTALPTPNCPAYFAQRSSEIEQLRDNIQNSMNTFTLTDIEGRVQKGIQILVMDSTACTTIVVFLLLLPRLCSSASDKIELGEQLLPGQTRASDGGAFVLGFFSPSNSTPERQYIGIWYNITDRTVVWVANREAPAIAAGRSIAPRLALTNDSNLVLSDADGRVLWSTNVTAGVAAGRSTSPPVAELLNNGNLVIRSNGAILWQSFDHPTDTLIPEMKIQLNKRTRRGARLVSWKDAGGDPSPGSFSYGMDPETSLQLVMWNGSRPYWRTTCLDGFEPASGGEWSAGRFSGGCRRKEAPPCGGGDGFLALPRMKVPDKFSTLVGNMTFDECAARCAMNCSCEAYAHADLSSSSARGDIGRCLVWASELIDMVMIGQTTWGRAGETLYLRVPASSTGSRGRGNVVKIAVPILASALVLTCIFFVYFCKSRENRRKRDSQKTLVPGSRNTSSELLEENPTQDLEFPSIRFSDIVAATDNFSKSCLIGRGGFGKVYKVTLENGQEVAIKRLSKDSDQGIEEFKNEAILIAKLQHRNL

SEQ ID NO: 177774 - protein, 178 aa, Oryza sativa
  Clone ID: PAT_MRT4530_75393C.1.pep
MRPKIADFGMAKIFGENQQKANTKRVVGTYGYIAPEYSTEGSFSVKSDVYSFGVLLLEIVSGIRISSTDIMEFPSLIVYAWSLWKEGKAKNLIDSSIAESSSLDEVQLCIHVGLLCVEDNPNSRPLMSSVVSILENGSTTFLAMPNQPAYFAQTTSEMDKMTDGSSRNTMTMTVLQGR

SEQ ID NO: 177775 - protein, 64 aa, Oryza sativa
  Clone ID: PAT_MRT4530_75394C.1.pep
MAALNFKAVAAVMVMAMVVAAPGASAAITCGQVGSAIAPCISYVTGRGGLTQGCCNGVKGLEQR

SEQ ID NO: 177776 - protein, 372 aa, Oryza sativa
  Clone ID: PAT_MRT4530_75395C.1.pep
MRKENIPHQAPFAIQAAQLLGRAIGAGLFAKTPAGERGMCCKAIKLGNARACKLGVTFKTRTCERLVSWKGPDDPSPGSFSFGGDPDTFLQVFIWNGTRPVSRDGPWTGYMVSSQYQANSSDIFYFSIVNNEEKRYITFSVSEGSPYTRYVITYAGKYQFQRWNISSSAWDVAEWPRWDCNYYNYCGPNGYCDNTARAPAVPTCKCLFGFEPANAAEWNSGRFSQGCRRKEAVQCGDRFLAVPGMISPDKFVLFPNRTLDACAAECSSNCSCVAYAYANLSSSISKGDKTRCLVWSGELIDAEMVGERLGSDTIYLRLAGLDAGKHQFKLSNFTVRKEKYGLQFEVFYCLRFILLVLELRKYYQIQRGANEI

SEQ ID NO: 177777 - protein, 62 aa, Oryza sativa
  unsure (1)..(62): unsure at all Xaa locations
  Clone ID: PAT_MRT4530_75396C.1.pep
QRPSRFLFPXXDVSGXLXXXSRLSGDMKSQMPSEGVAVRDQNVTPFRIGLRSVIYLSSGSCG

SEQ ID NO: 177778 - protein, 1547 aa, Oryza sativa
  Clone ID: PAT_MRT4530_75397C.1.pep
MDRSAAALACITSVLLLLPPPCASDDRLVTGKPLSPGATLVSDGGAFALSFFSPSTATPEKMYLGIWYNDIPQRTVVWVADRGTPVTNTSSSAPTLSLTNSSNLVLSDADGRVRWSTNITDDAAGSGSTAVLLNTGNLVIRSPNGTILWKSFDHPTDSFLPGMKLGMTFKTRVSDRLVSWRGPGDPSPGSFSFGGDPDTFLQVFVRKGTRPVSRDAPWTGYMMLSRYLQVNSSDIFYFSVVDNDEKRYITFSVSEGSPHTRTLDACAAECSNNCSCVAYAYANLSSSISEGDVTRCLVWSGELIDTEKIGEWPESDTIHLRLASIDAGRRTKINAVLKVVLPVLSSIIIVLCMSFAWLKIKGKKRNREKHRKLIFDGANTSEEIGQGNPVQDLELPFVRFEDIALATHNFSEANKIGQGGFGKVYMAMLGGQEVAVKRLSKDSRQGTEEFRNEVILIAKLQHRNLVRLLSCCVERDEKLLIYEYLPNKSLDATLFDCLHLLLSMDVSRKFKLDWRTRFTIIKGVARGLLYLHQDSRLTIIHRDLKAGNVLLDAEMKPKIADFGMARIFGDNQQNANTRRVVGTYGYMAPEYAIEGIFSTKSDVYSFGVLLLEVVTGIRRSSTSNIMDFPNLIVYSWNMWKEGKMKDLADSSIMDSCLLHEVLLCIHVALLCVQENPDDRPLMSSVVPTLESGSTTALPTPNCPAYFAQRSSEIEQLRDNIQNSMNTFTLTDIEGRVQKGIQILVMDSTACTTIVVFLLLLPRLCSSASDKIELGEQLLPGQTRASDGGAFVLGFFSPSNSTPERQYIGIWYNITDRTVVWVANREAPAIAAGRSIAPRLALTNDSNLVLSDADGRVLWSTNVTAGVAAGRSTSPPVAELLNNGNLVIRSNGAILWQSFDHPTDTLIPEMKIQLNKRTRRGARLVSWKDAGGDPSPGSFSYGMDPETSLQLVMWNGSRPYWRTTVWTGYLTSGQYLAATGTTIYLDVVDNDDEIYVKLRVSDGASPTRYVMTSSGEFQLLGWDKSSSEWITFSSFPTHHCTTYGYCGPNGYCDITTGAAAACKCLDGFEPASGGEWSAGRFSGGCRRKEAPPCGGGDGFLALPRMKVPDKFSTLVGNMTFDECAARCAMNCSCEAYAHADLSSSSARGDIGRCLVWASELIDMVMIGQTTWGRAGETLYLRVPASSTGSRGRGNVVKIAVPILASALVLTCIFFVYFCKSRENRRKRDSQKTLVPGSRNTSSELLEENPTQDLEFPSIRFSDIVAATDNFSKSCLIGRGGFGKVYKVTLENGQEVAIKRLSKDSDQGIEEFKNEAILIAKLQHRNLVRLLGCCTEGSEKLLIYEYLANKGLDAILFDGARKSLLDWPTRFGIIKAKGEYQKSCGNILFHRMVPFGDRMTRLPVFRSTAVEPEPAASSVMLVDQRTRPSASDKTRLEELVSDSVGADELVFVTGVPRSATHTTVRWGMSLYHMPRYIFSGVAVEGEKKLKAKAPPSETRVAPGESGLPVTSRSSDAHGGGRRRRTLVMQAKAAADRSIRTFFLFSMSLH

SEQ ID NO: 177779 - protein, 89 aa, Oryza sativa
  Clone ID: PAT_MRT4530_75398C.1.pep
LLHLGRRAPHRPLLGLKTVRNLSGFQTYFRKRNLSVGIFRKRKRIRKYFLGNGIGNDKGSFRRNSKSVGNFPKIFSEFLEIFLELVEIS

SEQ ID NO: 177780 - protein, 151 aa, Oryza sativa
  Clone ID: PAT_MRT4530_75399C.1.pep
MGAAAKPPPFVCFKWPWGPDPKATSPSPSPSPCGDLEMPWLLKSIRTVAQGLLIAGDLPSPSSDGGGGGGGARTRWRRRRRLGPGLAAEADRGEAEQRALAAALASGRDATVLEFYSPRCRLCSSLQGLVRELEDGAGGRAGFVLADAEDD

SEQ ID NO: 177781 - protein, 139 aa, Oryza sativa
  Clone ID: PAT_MRT4530_7539C.1.pep
MAMHKLNCSTNHFLHAVATLVFTVHDPVVMALHVRRAALRSPVLPFRQWPPCRRGSAFTTCIGRAIHGATPPISPVAFGHIRSRLPITFRHRRSDRKRGRRLRDVLVVAIDLIATIDDLLSMRDPHLVFPSPHVFLLQC

SEQ ID NO: 177782 - protein, 40 aa, Oryza sativa
  Clone ID: PAT_MRT4530_753C.1.pep
MASSLTTEDGGGTTKLGFGATAKYSKWAGEVVALWWPRHD

SEQ ID NO: 177783 - protein, 570 aa, Oryza sativa
  Clone ID: PAT_MRT4530_75400C.1.pep
MAYMHPGLVITLNLLLESRKIIASALWHKKAQKHKKLGFLVLAACVFFSYKHVRCGRVLPYTTGPPPPYSALSECLAGQCSRPYSLQVPSGSKALRATANPPTKPSFFHILRSARNVCTYISKHAATFPATLPCHLFHEFRFTQQALLMESLAYPQKQKPPALEPLPRPTAAMDDKGKAKAADAAAAAEAAPEQEEFFSDSESGSESIEIADLKKRMWKDQMLLMKLEGRSGHEGALAAQDHRVVRREEEAAEEEPPEARLRGWWKDDVAFDRAGPTALSGRGGRGSPRSPAAAASFLHGLLDIQDSTLGSLLSALIQHCEPPQRSFPLDRGLPPPWWPTGGEAWWGLQGEAQASQGPPPYRKPHDLKKAWKISLLRASAVIKHLSPRFDQIRKLVWQSKRLQHKMSARDADTWSRVITQEEALSRHALRSLHITPLDDDDDEPNEGPTPRESHADKRKREVGGGGGGGGEEMQLSLPADIDVVPEADRSSIDELMKLYYSCLQGTDTDGGGGEQGKDVAAGAGGDGSVAPETVHVDDDDMLEGLLGVAQVVDMSDFPDSPICHWGSSSD

SEQ ID NO: 177784 - protein, 54 aa, Oryza sativa
  Clone ID: PAT_MRT4530_75401C.1.pep
LRTANGPVGDGEQPDQNQTGAHGVIRAVKKLEARELLELGSSSRRAELELPTSL

SEQ ID NO: 177785 - protein, 129 aa, Oryza sativa
  Clone ID: PAT_MRT4530_75402C.1.pep
PPKMETPFQKLKIKTFIFDPHPQAGGSKKGTFTQLNQQTGPFYKPFFPVISLNKGQQNSRGLFPGANPTIGCLIKPREKLCCVPPNPPKGTKNKSHVGPLFWEALCKNGKMCTLVGQGTLKKLGLLFSK

SEQ ID NO: 177786 - protein, 617 aa, Oryza sativa
  Clone ID: PAT_MRT4530_75403C.1.pep
MAYMHPGLVITLNLLLESRKIIASALWHKKAQKHKKLGFLVLAACVFFSYKHVRCGRVLPYTTGPPPPYSALSECLAGQCSRPYSLQVPSGSKALRATANPPTKPSFFHILRSARNVCTYISKHAATFPATLPCHLFHEFRFTQQALLMESLAYPQKQKPPALEPLPRPTAAMDDKGKAKAADAAAAAEAAPEQEEFFSDSESGSESIEIADLKKRMWKDQMLLMKLEGRSGHEGALAAQHHRVVRGEEQAAEEEPPEARYRRKAMLRAQDGVLRHMLKMMEACNARGFVYGIVDESGVPVSGSSDSLRGWWKDDVAFDRAGPTALSGRGGRGSPRSPAAAASFLHGLLDIQDSTLGSLLSALIQHCEPPQRSFPLDRGLPPPWWPTGGEAWWGLQGEAQASQGPPPYRKPHDLKKAWKISLLRASAVIKHLSPRFDQIRKLVWQSKRLQHKMSARDADTWSRVITQEEALSRHALRSLHITPLDDDDDEPNEGPTPRESHADKRKREVGGGGGGGGEEMQLSLPADIDVVPEADRSSIDELMKLYYSCLQGTDTDGGGGEQGKDVAAGAGGDGSVAPETVHVDDDDMLEGLLGVAQVVDMSDFPDSPICHWGSSSD

SEQ ID NO: 177787 - protein, 59 aa, Oryza sativa
  Clone ID: PAT_MRT4530_75404C.1.pep
RYSIAYRPLIAPISYPKIDKSIDHYGHLTSEFYSLYNELVHIHLNALRISAEASIYCLT

SEQ ID NO: 177788 - protein, 197 aa, Oryza sativa
  Clone ID: PAT_MRT4530_75405C.1.pep
MAMPRSPGAGSLRFLGLLKQPESGPDGAAPPFELDESDVVWPAGGVGDDGYCCPAPPHPEGPPRAPRRAHTVPQSFGLSSLLANGGRGGGSDDGRQDGVAVPVRAAAAPGGGAAAPRRSAPVRVPMWPGKGAAANNVVGGEESDDNEDDEMVPPHVVAARRHARSSSVLEGAGRTLKGRDLRRVRNAVLRQTGFLDL

SEQ ID NO: 177789 - protein, 43 aa, Oryza sativa
  Clone ID: PAT_MRT4530_75406C.1.pep
MSDDQADVVREGLPVNDIFSHSPDVVGCDNSAFVENVLDNGVK

SEQ ID NO: 177790 - protein, 52 aa, Oryza sativa
  Clone ID: PAT_MRT4530_75407C.1.pep
EGTEEDMRLGPNSYSQRPTIGTASQGAGDYKDYKEPPPALFIEPGKLKSWSF

SEQ ID NO: 177791 - protein, 215 aa, Oryza sativa
  unsure (1)..(215): unsure at all Xaa locations
  Clone ID: PAT_MRT4530_75408C.1.pep
MDSPATLVGLSPPLLSLVLRNEPCYTKGKRGLLRHQRRSTVNRVHGXGLRKRTAEIDXSTTDGQDRLVHGRTTGDDDDDVSGDITTGSGSGAQARRRTTARQRERRAPKRCGRRGELTGDQNSGGRSTDGNGDEEEAATTFGLTMAMVFRRSTATAEGRTRTATRRRPRRQPSRAATTTGATAAHGWSCGGDGGTRSHGARALRAMAVEDESGGG

SEQ ID NO: 177792 - protein, 1019 aa, Oryza sativa
  Clone ID: PAT_MRT4530_75409C.1.pep
MASSSSSSGANPLSGQPIPEKLTRNNFLLWKTQILPAIRGACMEGYITGAKQAPAAEVDAKEGDKLVKVSNPAYETWVAEDQQSRSRALNTHLALSTTRKGDLSVAEYIGKMKSLADEMASARKPLDDEEMMSYILAGLDDDYEPVVSNLVGRAEPAPITEIYSQLLSFESRARLRQQASSSSVNSAKHGGKNNGGFNSNFNSNSANSFRGRGGGGRGDRGGRGRGNGGARGFSNKPRLTCQLCGKINHVVADCWHRYDESFVPDFRTAAAASYGVDTNWYMDIGATDHITGELEKLSTHEKYNGKDQIHTASGACMNIKHIGHSTIHTPVRNIYLKNILHVPKAKKNLISAHRLAVDNNAFVEVHSRFFAIKDQVTKNLLLRGPCRNGFYPLPTSSFSSSKQVLGVVKPTYSKWHSRLGHPSLAIVQKIVSNNKLPCLGEINELGARLRSEILLLPSFLSPSGVEYSNDHMLNTPEHSNGVYENVTDQQGQSSDYGEHINTGDTRIFGANTEDPGGTENPDHDANNQSNSEDSHGVFSDAVRFDADEDVSVASQGEQESQSPPATATTSSSSSPVESPVSPVTSLQEDVQQQDMQIIQQQQDVQQTGHQTRPTTRLQRGIRKEKVYTDGTVRYSFLATNGEPNNLSEALANNDWKNAMDIELFALLNNKTWHLVPPSHGKNIIDCKWVYKIKRKSDGSLDRYKARLVAKGFKQRYGIDYEDTFCPVVKAATIRIILSIAVSRGWCLRQLDVQNAFIYGYHEEEVYMRQPPGYEDKSKPNYICKLDKALYGLKQAPRAWYSRLSMKLCDLGFKASKADTSLFFYNKGDVTIFVLIYVDDIIVASSTEGAAIALLADLRQEFALKDLGNFHYFLGIEEKYATDLLKKAGMMDCKPVSTPISTSEKLSAYSGTVLGENDATKYRSIVGALQYLTLTRPDISFSVNKMLIGQDLWMIEVNPVFYARTKHIEVDYHFFRERVARKQLVIKFISSGDQVADGFTKPLSVQLLRNFRHNLNLDKL

SEQ ID NO: 177793 - protein, 61 aa, Oryza sativa
  Clone ID: PAT_MRT4530_7540C.1.pep
MAAAIVVEEHVAVSIIVPWSETMLTCLPPCSKLMNASNLALFGEYGGSELILPLPGYASLG

SEQ ID NO: 177794 - protein, 74 aa, Oryza sativa
  unsure (1)..(74): unsure at all Xaa locations
  Clone ID: PAT_MRT4530_75410C.1.pep
MEVDAASISGQWRLLEADAVASLGDSILKQQKMNEKIEEEENEEQXEEEEEEEEEEEEEEEEEEEEEEEEGAGV

SEQ ID NO: 177795 - protein, 53 aa, Oryza sativa
  Clone ID: PAT_MRT4530_75411C.1.pep
SSGVIHSCTLCLQMMANDGGSGGSTSTGSTTSTFFLTLTSFFVFCICGDGSAA

SEQ ID NO: 177796 - protein, 46 aa, Oryza sativa
  Clone ID: PAT_MRT4530_75412C.1.pep
PTRTPSPPINRQAREETPSSIHGRHRDRHSWAYVLGRRASKVVIYC

SEQ ID NO: 177797 - protein, 86 aa, Oryza sativa
  Clone ID: PAT_MRT4530_75413C.1.pep
MTNISVKEWGLAGERELGVDHAGRRSSLELNMQGGEPCRCHKLLPSAAQDYVRKPHPLLVPLTLKGGDNPSLLAIGSLRTSGQSDL

SEQ ID NO: 177798 - protein, 157 aa, Oryza sativa
  unsure (1)..(157): unsure at all Xaa locations
  Clone ID: PAT_MRT4530_75415C.1.pep
TSTNFTLCSCYTEYTASLSGRCFGAGIVFPYAITLCHNDDIRVVSGSLDVVSRLRDIIIWGYILWMRGGPLMVTAQYGYSSASIYNPKLISXXGYSSIFSPGWMVMMDCRKELGSQGWLPEVPGGHRIEETSVGDAHAPTRRSRDLSPFCSSCKSLG

SEQ ID NO: 177799 - protein, 119 aa, Oryza sativa
  Clone ID: PAT_MRT4530_75417C.1.pep
RECQLTLCSCYTDYTASLSGRCIVTGIKFVYAITPCHDDDIRVVSGSLGVVSRFRDIIIWGYMLQMRGGPLMVTVQYGLISWGGYSSVFCPGCMVMTGYHKELGSQGWLLEVPGGHQIE

SEQ ID NO: 177800 - protein, 50 aa, Oryza sativa
  Clone ID: PAT_MRT4530_75418C.1.pep
ICPQTKDNLWLVCFFQKRPFELVVSRLSRRGSNQCKASPPCNSFSVAFAS

SEQ ID NO: 177801 - protein, 163 aa, Oryza sativa
  Clone ID: PAT_MRT4530_75419C.1.pep
MSTNFTLCSCYTEYTTSLSGRCFGAGIVFAYTITICHDDDIRVVSGSLDVVSKLRDIIILGYILQMRGGPLMVTAQYGYSSALLIGPRLIPWGGYSSVFSPGCMVMTGCRKELGIQGWLLEVQGGHRIEAHGEADLRRLRKVKHVGGKTCDWKKFNAKYMFNN

SEQ ID NO: 177802 - protein, 1037 aa, Oryza sativa
  Clone ID: PAT_MRT4530_7541C.1.pep
MFPSDAHPRRQSAGKGSEGRGRNGGGKCLPPADMDGGGLWKRRSAGGNGGGRSRGHDERSVHSPPERHKERRVERPRSPLRRRPVDLRDTINQRRAARAGLKPTGIETYDGTTNPESWLTVYGLAIRAAGGDSKAMANYLPVALADSARSWRHGLPRGTIGSWTELRDHFIANFQGTFERPGTQFDLYNVIQKSGESLRDYIRRFSEQRNKISNITDDVIIAAFTKGIHHEELVGKFGRKPPKTVKQMFEKANEYAKDENAIAASKQLGPTWKPKKDAPTTGEGGSNNHKDRKRKPEELVATTTHSSRQQQYAKNAQKTSDGGQSTSKKKDDDDDDAPTVVRNVKLRRSLIDGGSALNILFAKTLDDMQIPRTELKPSNAPFHGVIPGLSAMPLGQITLPVTFGTRENFRTENVCFDVADFETAYHAILVHPALAKFMAIPHYTYMMMKIPGPRGVISVRSDIKQAVTCDKESCEMAKTREIAIAREDIRLATTTSREGEVPTTKVSKSGGSEAKTKKIPLDPSDPTKTAVVGAELDYAKPIKQRLRRFAQNRKDAIKEELTKLLAAGFIKEVLHPDWLANPVLVRKKTGQWRMCVDYNDLNKSCPKDPFGLPRIDQVVDSTAGCELLSFLDCYSGYHQIRLKESDCLKTSFITPFGAYCYITMPFGLKNDGATYQCMIQRCFSTQIGRNVEAYVDDVVIKTKQKDDLITDLEKTIASIRAFRMKLNPEKCTFGVPSGKLLGFMVSHRGIQVNPEKVNAILNMKPPSSQKDVQKLTGCMAALSRFVSRLGERGMPFFKLLKKTDNFQWGPEAQKAFEDFKKLLTTPLVLASPHPQEPLLLYVSATSQVVSTVLVVEREEEGHVQKVQRPIYFVSEVLADSKTRYPQVQKLLYGVLITVRKLSHYFQGHSVTVVTSFPLGDILHNREANGRIAKWALGLMSLDIPFKPRTSVKSQALADFVAEWTECQEDTPEEKMEYWTMHFDGRLIVRGDSQLVVNKVMKEWSCLDDNMIAYRQESATGKTEWMTYTDWKRPAKQP

SEQ ID NO: 177803 - protein, 149 aa, Oryza sativa
  unsure (1)..(149): unsure at all Xaa locations
  Clone ID: PAT_MRT4530_75420C.1.pep
MNANFTLCSCYTDYTASLFGRCFGTGIMFAYANTLCHDDDIRVVSGSLGVVSRLRNIIILGYMLRMRGGPLMVIDXYGYSSAHVYSPKLISXGGYSYVFSPGCMVMTGCRKELGSXGWLLEVPGGHWIEGIGKHAAHRKKNDLFPVTYY

SEQ ID NO: 177804 - protein, 128 aa, Oryza sativa
  unsure (1)..(128): unsure at all Xaa locations
  Clone ID: PAT_MRT4530_75421C.1.pep
MNANFTLCSCYTEYAASLSGRCFGAGIMFAYAITLCHDDDIRVVSGSLYVVSRXRDIIIWGYMLRMRGGPLIVTAQYGYSSARVYSPMLILWGGYSIFCPGCMVKTGCRKELGSQGWLLEVPGGHRIE

SEQ ID NO: 177805 - protein, 132 aa, Oryza sativa
  Clone ID: PAT_MRT4530_75422C.1.pep
MSTYFTLCSCYTEYTASLSGRCFGAVIVFADAITLCHDDDIRVVSGSLDVVSRLRDIIIWGYILRMRGGPLMVTAQYGYSSAPIYNPKLFSWGGYSFVFSLGWMVMTGCRKELGSQGWLLEVPGGYRIEGIS

SEQ ID NO: 177806 - protein, 129 aa, Oryza sativa
  unsure (1)..(129): unsure at all Xaa locations
  Clone ID: PAT_MRT4530_75423C.1.pep
INANFIVCLCYTDYTASLSRRCIGTGIMFAIAITLYHDDDIRVVSGSLDLVSRLRDIIICGYMLRMRGGLLMVTAQYXSPKLISWEGYSSVFSPDCMVMTGCRKKLDSXEWLLEVLAGHRKKAKNQKPT

SEQ ID NO: 177807 - protein, 129 aa, Oryza sativa
  Clone ID: PAT_MRT4530_75424C.1.pep
INDNFTLCSCYTEYTASLSRTCFGAGIMFAYAITLCRDDDIRVVSGSLDVVSRLRDIIIWGYMLRMRCGPLMVTAQYGYSSARVYNTTLIPWGGYSYVFSPGCMVMTGCHKKLSSQGWLFEVPGGHWIE

SEQ ID NO: 177808 - protein, 129 aa, Oryza sativa
  Clone ID: PAT_MRT4530_75425C.1.pep
MNTNFILYSCYTDYTVSLSERCIGTGIVFAYAINLCHDDDIRVVSGNLGMVSRLQDIIIWGYMLRIRGGPPMVTAQYGYSSARLYSPKLISWGGYYSVFSLGCIVITGCRKELGSQELLLEVPGGHRIE

SEQ ID NO: 177809 - protein, 138 aa, Oryza sativa
  unsure (1)..(138): unsure at all Xaa locations
  Clone ID: PAT_MRT4530_75426C.1.pep
MNANFTLYSCYTDYTASLSVRCFGTDIMFAYAITLCHNDDIRVVSGSLGVVSRLRDIIIWGYMLRMRGGPLMVTAQYGYSSAHVYSSKLISWGGYSSVFSPGCMVMTGCRKELSSXGWLLEVPGGHRIEVKIKIKSKS

SEQ ID NO: 177810 - protein, 214 aa, Oryza sativa
  Clone ID: PAT_MRT4530_75427C.1.pep
MADSSSPPLPPPSFLGYLNHYSGGFPAPAYGMGGRGELVMTVSGGGSPENAVVWTTVAEPGHWFYVPPSGQYGGAIMINSAAVTGDATGITGTGIGTGVFIPERPRIRRMKHPINWVPLVPDRGGNGRKPELKTANASKGKGIQMSYAAAVKTAGPSHEAVRANQSKKGHKFSRQKKSAATAAVEAPAPEKEEATATTVEDIPELALLPEEWVY

SEQ ID NO: 177811 - protein, 258 aa, Oryza sativa
  unsure (1)..(258): unsure at all Xaa locations
  Clone ID: PAT_MRT4530_75428C.1.pep
RTRAAAAVDARGKEGGSPAAAAATTAAATVAHGGAGAATTAAERRGGTRAVAQWRGKRGGRVRWGGGXMERGGVFVERGEGEGEGLRRNGDATATLGAGRRRRAGGDAMAARGSERQCDGRRCGARDGRRDGWREARRGDGDGTRRXGRRRGDGTATRRVASERRDRRGDVTRAAARGSARWNGRRGSGAGRRRGDGXRRLKARCRQRRDGDGAVAAAARATGRXRGARGMKGDGARGTTIEHLTDSPPRNGSRGGHP

SEQ ID NO: 177812 - protein, 289 aa, Oryza sativa
  Clone ID: PAT_MRT4530_75429C.1.pep
MSHGDTIPLHSSSAQSDMDEIESLIHAAPPSAAAVLPARPPSPPRASIPVSSSPPLLPPPVAGSKPQLPPFSSSSSVASSSSPPLPSSVSVAIAGDGFGPPPNTLTEPVLDTVKRDLARIVSNLKLVVFPNPFREDPGKALRDWDLWGPFFFIVFLGLTLSWSASVKKIIMFTRFLCKSEVFAVAFAVLAAGAIILTLNVLLLGGRINFFQSLSLLGYCLFPLDVGALICMLKDNVLLKIIAVVVTLAWSSWAAYPFMSAAVNPRRKALALYPVFLMYVSVGFLIIAID

SEQ ID NO: 177813 - protein, 78 aa, Oryza sativa
  Clone ID: PAT_MRT4530_7542C.1.pep
LLCFRNDLHLGFHFDLIFTVAPKNLHAVIFIPSSLSGDLLNAQGDFQAIPLPARSSPATMSTSTNPTAASSAEYVSLS

SEQ ID NO: 177814 - protein, 90 aa, Oryza sativa
  unsure (1)..(90): unsure at all Xaa locations
  Clone ID: PAT_MRT4530_75430C.1.pep
DGVAPXCARAEHQVHATPLMCSARVXVIQLLPAKMSAAGPRDTFLAWILALTCRCVAALHLQRDVFPSASSRDLHLAASNDLPRLAIVSG

SEQ ID NO: 177815 - protein, 491 aa, Oryza sativa
  Clone ID: PAT_MRT4530_75431C.1.pep
MTVVTAGKVGNTVNNQICDMFGQKFAAKTYGILEFVRDKSRIRIKSTGTLAYPKASFGPALELSRFQKLGFTDVDEGNLKYKIKVVADDPGTGSSKDGKGKQAPDGSAQPSDKGATDGSLANLGDNSQGVHGVQGDGSQGIQGDGSRGVQGGGFNQDGNVAQVQFNNFQDQIDYAVHHALINQSGILTNTLANKVKSMIDGSMAEYQATGLVYLQGGVFPNYRPLVTDNLPVVQSVPLNAPSAQPMAPASAPAPTTPPSAPGQLINPRLLVREQPQHAGQNFHSYFYSGIHEMKLSDLMSIKQKHDEPMHEYVQRFREMRNKCYSLSLTDAQFADLAFQGMIPPIREKFSSEDFESLSHLTQKVALHEQRNAEARKNSRKVNHVCPYIYGSDDEDDDFEIATDEWVRSKKVVKWQWVKNSGKKERYDFDITKADKIFDLLLREKQIQLSAGHTIPSAEELGKKSYCKWHNSWSHTTNHCKVLSRPDKFIPK

SEQ ID NO: 177816 - protein, 85 aa, Oryza sativa
  Clone ID: PAT_MRT4530_75432C.1.pep
MDMMQRFGYWKPEEIVSRGGRTKEKGPATVDLASDLGGSLERFEGRDELECSVFPEKEEEGEKGREKSLSLRFARRLSEIGAWLV

SEQ ID NO: 177817 - protein, 89 aa, Oryza sativa
  Clone ID: PAT_MRT4530_75433C.1.pep
KTVFSHPTKPEGRKNKMPGYADAYFFPPFFSLGPGPPLPNCPGACAPFLAAFFWRALGFLLRGFFGVSPFFCPFTTGFRAWALWLARFL

SEQ ID NO: 177818 - protein, 117 aa, Oryza sativa
  Clone ID: PAT_MRT4530_75434C.1.pep
MVATSSSPPDRGVNYRIRLPQVWGGHILARLWPLPLLYPMAMAGASLPLPSLVRRLPDLATASSGDPREVASSSPRLYNGLFLSSMWRRQWRLPIPFPSPVQWPPDPTSSVSNSSDL

SEQ ID NO: 177819 - protein, 70 aa, Oryza sativa
  unsure (1)..(70): unsure at all Xaa locations
  Clone ID: PAT_MRT4530_75435C.1.pep
HQAATSLKEGVAKXASDAVAATTSGSNVPKTRRMFSSVLGTCRKATSPAVRFSFVLGRMAQAKAAHSGAD

SEQ ID NO: 177820 - protein, 61 aa, Oryza sativa
  unsure (1)..(61): unsure at all Xaa locations
  Clone ID: PAT_MRT4530_75436C.1.pep
VRWEGSFEVAVRGAPFRAGLXGGTGPWGLAPLTWVGARGVHTAPLACLNNDLYALNYSQAH

SEQ ID NO: 177821 - protein, 77 aa, Oryza sativa
  Clone ID: PAT_MRT4530_75437C.1.pep
LEERNAELDIEHKKLADLPKSVEEQKSRLKSAIKNVAELTKSLKIIPGTDAQDAQAIEEVEQIRQRAISAIQHYLSQ

SEQ ID NO: 177822 - protein, 420 aa, Oryza sativa
  Clone ID: PAT_MRT4530_75438C.1.pep
MANIDMGKILAGLENDDARVPKTKLVCTLGPASRSVPMLEKLLRAGMNVARFNFSHGTHEYHQETLDNLRQAMHNTGVLCAVMLDTKGPEIRTGFLKDGKPIKLTKGQELTVTTDYEIKGDENMITMSYKKLPVDVKPGNVILCADGTISLTVLSCDPKAGTVRCRCENTAMLGERKNCNLPGIVVDLPTLTEKDKEDILGWGVPNDIDMIALSFVRKGSDLVTVRQLLGQHAKRIKLMSKVENQEGVVNFDEILRETDAFMVARESSLDNEAVFKEMIRSAPLPMSPLESLASSAVRTANKAKAALIVVLTRGGTTAKLVAKYRPRVPILSVVVPVLTTDSFDWTISSEGPARHSLIYRGLVPLLAEGSAKATDSESTEVILDAALKSAVQKQLCKPGDAVVALHRIGVASVIKICIVK

SEQ ID NO: 177823 - protein, 387 aa, Oryza sativa
  Clone ID: PAT_MRT4530_75439C.1.pep
MESEKHIICRHPPTYGNLITVLSIDGGGIRGIIPAVVLTFLESELQKLDGEEARIADYFDVIAGTSTGGLVTAMLAAPNKKRRPLFAAKDIKAFYMNHAPKIFPQLRGPFGRMMRIFRSMSGPSYDGKHLHEVVREKLGSTRLHQTLTNVVIPTFDIKWLQPTIFSSYEVKKKNNNTMDALLSDICISTSAAPTYLPAHFFRTEDCHGNIKEFNLIDGGVAANNPALVAIGEVSKQIFKKNPDFFPVKPMDYGRFLVISLGTGSPKIEGKYNAQKAKSWGVLDWLLVGGSTPLVDIFTQASADMVDIHIAAVFKVLHSEQNYLRIQDDTLEGTLASVDVATRDNLEKLANVGEILLNKPVSRANLETGQMMPACDDSEITNGEALKR

SEQ ID NO: 177824 - protein, 1091 aa, Oryza sativa
  Clone ID: PAT_MRT4530_7543C.1.pep
MFPSDAHPRRQSAGKGSEGRGRNGGGKCLPPADMDGGGLWKRRSAGGNGGGRSRGHDERSVHSPPERHKERRVERPRSPLRRRPVDLRDTINQRRAARAGLKPTGIETYDGTTNPESWLTVYGLAIRAAGGDSKAMANYLPVALADSARSWRHGLPRGTIGSWTELRDHFIANFQGTFERPGTQFDLYNVIQKSGESLRDYIRRFSEQRNKISNITDDVIIAAFTKGIHHEELVGKFGRKPPKTVKQMFEKANEYAKDENAIAASKQLGPTWKPKKDAPTTGEGGSNNHKDRKRKPEELVATTTHSSRQQQYAKNAQKTSDGGQSTSKKKDDDDDDAPTVVRNVKLRRSLIDGGSALNILFAKTLDDMQIPRTELKPSNAPFHGVIPGLSAMPLGQITLPVTFGTRENFRTENVCFDVADFETAYHAILVHPALAKFMAIPHYTYMMMKIPGPRGVISVRSDIKQAVTCDKESCEMAKTREIAIAREDIRLATTTSREGEVPTTKVSKSGGSEAKTKKIPLDPSDPTKTAVVGAELDYAKPIKQRLRRFAQNRKDAIKEELTKLLAAGFIKEVLHPDWLANPVLVRKKTGQWRMCVDYNDLNKSCPKDPFGLPRIDQVVDSTAGCELLSFLDCYSGYHQIRLKESDCLKTSFITPFGAYCYITMPFGLKNDGATYQCMIQRCFSTQIGRNVEAYVDDVVIKTKQKDDLITDLEKTIASIRAFRMKLNPEKCTFGVPSGKLLGFMVSHRGIQVNPEKVNAILNMKPPSSQKDVQKLTGCMAALSRFVSRLGERGMPFFKLLKKTDNFQWGPEAQKAFEDFKKLLTTPLVLASPHPQEPLLLYVSATSQVVSTVLVVEREEEGHVQKVQRPIYFVSEVLADSKTRYPQVQKLLYGVLITVRKLSHYFQGHSVTVVTSFPLGDILHNREANGRIAKWALGLMSLDIPFKPRTSVKSQALADFVAEWTECQEDTPEEKMEYWTMHFDGSKRLSSTGAGVVLISPTGERLSYVLWIHFSASQNVAEYEVLLHGLRIAISLGIRRLIVRGDSQLVVNKVMKEWSCLDDNMIAYRQESATGKTEWMTYTDWKRPAKQP

SEQ ID NO: 177825 - protein, 192 aa, Oryza sativa
  unsure (1)..(192): unsure at all Xaa locations
  Clone ID: PAT_MRT4530_75441C.1.pep
CTKCPNIDIDETISPVVKPATVRTVLSLAVSRDWPIHQLDVKNAFLHGTLQETVFCSQLAGFVDAFKPDLVYHLNKSLYGLKQAPHAWYNRFANFLLSFGWYSQFANFLQSTGFKEAKSDTSLFIYRHGPAVVYLFLYVDDIVLTASTXRSPLLLGTLHHFLGVRVSRIPSGLVLSQRQYSIEILERAGMAN

SEQ ID NO: 177826 - protein, 655 aa, Oryza sativa
  Clone ID: PAT_MRT4530_75442C.1.pep
MTMQSTVAAAAGTYSFDTSTATWTKLGDWLLPFRGRAEYAPEHKLWFALSSDGNELCASDLAAAAQCVEGEPRVAQRLTAFYEKLGSAATSIVAGRCDERAMFGRARCSTSAPAAGERRALPVDPLSLPRLLVSAATTPGAAAPAVSTLHAAALKLGVLPSSLPASNALVSAYSLSGLLPCALRAFSLIPHPSTGSYTAILSALSRHGRPREALSLFSAAAVARPDAELLSCVVSCCRRASASLPARAAHAYGVKTAPLLAFYASAGPALVALYAMCGRVSAAKRIFDRMDGEDVVSWNAMIGGFAGAGMNGEAWDCFREMRARGVRGNARTAVAVLGACDLESGRQVHGHMVRNHGDSGSNAILWNALMNMYSRVGCVDNAEHVFFEIERKDVVSWNVMIGAFAKNGHGERALELVDAMLRCGMQPDSVTFTTLLMACCHCGLVDEGLALFERFVENSALIPTMEQCACIVDLLSRAGRFREAAGFIDQMPIRPNAVVWGALLSGSRMHHDVDHAQIAFEKLVQLEPDNPGNFVTMSNIYAKAGMVEDAKRVRMMIDREELVKPSGQSRVQAMLRGKDDIVNAGIAGCCTSLALSFPAGLHIPFCQEIDRRRGVGDGVPAWSPRLTAVEVTTMAPVRSREVEEEQIGRRHGVQI

SEQ ID NO: 177827 - protein, 137 aa, Oryza sativa
  Clone ID: PAT_MRT4530_75443C.1.pep
GGSPFLSGQRKHGSPTSDVRGWVLKTSPPNEGPLIGQQLMAGFPLVAHPGRLVIFFSLPTRQGISELDVPFVCSGGLAFNKADPGGIFSFNPLGNLFLEKKKGQRKGVFIVGCESAPATRFHFYEKVPPGKTVSSSL

SEQ ID NO: 177828 - protein, 194 aa, Oryza sativa
  Clone ID: PAT_MRT4530_75444C.1.pep
MAAKRGSESDGDELGGGGAAEGTSPNDGGASPPPLAAAPAVCFIRSAGDFAGGAFIGSIVGYGQGLFTKKGFKGSFSTAGSSAKSLVVCLLRRLRGKDDIVNAGIAGCCTGLALSFPGTPQALLQSCATFAAFSCIMEGLNKQQAAMAQTLGGSALTVSHQNGGVLPPFTLPPLLDASDALSSCCQPLVLKPKH

SEQ ID NO: 177829 - protein, 497 aa, Oryza sativa
  Clone ID: PAT_MRT4530_75445C.1.pep
MCGRVSAAKRIFDRMDGEDVVSWNAMIGGFAGAGMNGEAWDCFREMRARGVRGNARTAVAVLGACDLESGRQVHGHMVRNHGDSGSNAILWNALMNMYSRVGCVDNAEHVFFEIERKDVVSWNVMIGAFAKNGHGERALELVDAMLRCGMQPDSVTFTTLLMACCHCGLVDEGLALFERFVENSALIPTMEQCACIVDLLSRAGRFREAAGFIDQMPIRPNAVVWGALLSGSRMHHDVDHAQIAFEKLVQLEPDNPGNFVTMSNIYAKAGMVEDAKRVRMMIDREELVKPSGQSRVQAIHHDLSTVLQSAATLMHPLPTVHLVSTIGYGQGLFTKRGFKGLFSTQGPLPRHLAHNINLSDQSFAVLSGVHCLVVCLLRRLRGKDDIVNAGIAGCCTSLALSFPGDRSPARSRRWSAGVVPQVDGGGGDDDGTGPKPRGRGRADREETWCPDLEKTFHSEADGGGGRQRWLGLEMFAPALSPVTKRPASNSSGSPMSG

SEQ ID NO: 177830 - protein, 213 aa, Oryza sativa
  unsure (1)..(213): unsure at all Xaa locations
  Clone ID: PAT_MRT4530_75446C.1.pep
VSYRMSLVNKXXXAGXXXNAQHXXPEKERKFVVSWNVMIGAFAKNGHGERALELVDAMLRCGMQPDSMTFTTLLMACCHCGLVDEGLALFERFVENSALIPTMEQCACIGDLLSRAGRFKEAAGFIDQMPIRPNAVVWGALLSXVGCTMNVDHAQIAFEKLVQLEPNNPGKFVTMSNIYSKAGMVEDAKRVRMMIDREELAKPFGQTWILTDT

SEQ ID NO: 177831 - protein, 114 aa, Oryza sativa
  unsure (1)..(114): unsure at all Xaa locations
  Clone ID: PAT_MRT4530_75447C.1.pep
KVYYVSYPFLSAKKICPLSNIDDLLDQLRGAKIFSKIELRSGYYQXMIKKEDRRKTTFTTRYGLYQFTVMPFGVTNAPAVFMRLMNHTLLDYLDKFVIVFLDDILIHSKSKEEH

SEQ ID NO: 177832 - protein, 194 aa, Oryza sativa
  unsure (1)..(194): unsure at all Xaa locations
  Clone ID: PAT_MRT4530_75448C.1.pep
MAAKRGSESDGDELGGGGAAEGTSPNDGGASPPPLAAAPAVCFIRSAGDFAGGAFIGSIVGYGQGLFTKKGFKGSFSTAGSSAKTFAVLSGVQSLVVCLLRRLRGKDDIVNAGIAGCCTGLALSFPGTPQALLQSCATFAAFSCIMEGLNKQQAAMAQTLGGSAXDRSHQNGXVLPPFTLPPLXLDASDALSSC

SEQ ID NO: 177833 - protein, 43 aa, Oryza sativa
  Clone ID: PAT_MRT4530_75449C.1.pep
PIFFIPLTTHERGGGIFNIAAANPLSRPHFLPDSCGLDDRGCR

SEQ ID NO: 177834 - protein, 168 aa, Oryza sativa
  Clone ID: PAT_MRT4530_7544C.1.pep
SIVNYYIRRHRSSSVGLGVRRRFAPGVLLAAAAAGGNSTAACSISRRRALFGPPHPRPQEQAKARGLGGGGVVVTPELQEDLAAGAAGGVVALPPQATVHAAVAAPAPRRHGRHRRRPAGSDGVELTITNGEGLVFCGGNQTALHVAQILDLPGGLHFRQFIVLDGRF

SEQ ID NO: 177835 - protein, 41 aa, Oryza sativa
  Clone ID: PAT_MRT4530_75450C.1.pep
VSQAMCLLKTGARESAFRSIKTSVECPPHDRIKQVKGSSTG

SEQ ID NO: 177836 - protein, 83 aa, Oryza sativa
  Clone ID: PAT_MRT4530_75451C.1.pep
ACSLQSASKVDQPPHCCQPVSCCTNPPERSLNGLGQLRFVCATQPAACLATLLLALDCCVVRPGQFLDLVPAGCTSFPYSESY

SEQ ID NO: 177837 - protein, 155 aa, Oryza sativa
  Clone ID: PAT_MRT4530_75452C.1.pep
MSTYFTLCSCYTEYTASLSGRCFGAGIMFAYAITLCHDDDIRVVSGSLGVVYRLRDIIIWDYILRMRGGPLMVTAQYGYSSTPVYNPKLIPWGGYSPVFSSGCMVITGCHKELGSQGWLLKVPGGHRIEDISYRSKTVFKQTDQSKSRTCSLVRQ

SEQ ID NO: 177838 - protein, 105 aa, Oryza sativa
  unsure (1)..(105): unsure at all Xaa locations
  Clone ID: PAT_MRT4530_75453C.1.pep
VFTYAITLCHDDDIRVASVSLGVVSRLRDIIIWGYMLRMRGGSLMVTAQYGYSSARVYSPXLISWXGYSSVFSPSCMVMMGCRKELGNKGWLLEVPGGHRIEGIS

SEQ ID NO: 177839 - protein, 284 aa, Oryza sativa
  Clone ID: PAT_MRT4530_75454C.1.pep
MMLIAKKPLLLLLLLLVLLVLEPRSSAEANLVGVNGGETDERRLESLVYDELPFSQLGLGFPTTVVAGGSENDVEEVVQAWYMDDDDNAEEDQRLPHRRQPDDLLPLAKLLDLGLVAMRLDADNHEHDENLKIMREQRGYLHMDIVELTPEKMPNYEVMIKRFFEEHLHTDEEVRYCLDGSGYFDVRDENDKWVRVSVRKGALIVVPAGIYHRFTLDTNNYIKMGPGGLLFGFLQTMRLFSGGPDWTAYNRPHDHLPERKKYLEALHNRTPRFGQLHRIRSKME

SEQ ID NO: 177840 - protein, 827 aa, Oryza sativa
  unsure (1)..(827): unsure at all Xaa locations
  Clone ID: PAT_MRT4530_75455C.1.pep
VRYGVAESVGLMKFLIHSPPLYGSTSTPHSAGKCPLDLSWPNYELMASVCSDENGHSKCCRYINAIIAVSSAMYANTTGILGVPAEISDACIGNISDTLVSKGILPTAASFCGLGIKIQVSYQCIGMTTVLQMLQSPNFSDVTRSCATLLSDDVSCKRCLNSGLSYLRHLVGEQDNVTLNTCRDAAFVAFASQGNISTVDTASCFFSVQGLSALQVLLIRKKSRELEKIEGTNPLDAWSSSAXHDIFSGSSTIFDRFTYRQMKKATRNFGTVLGGGEKGTIFKGKLSDGSVVAIRRIESSPKQGQLEFCKEMELLGRLHHRHLVGLKGFCLTRFERDIKPSNVLLDRNYLAKVLDVKLSYSENNTTISSTLVNVKIPATPGYVDPCYVVNQVVTPKSDVYSYGVLLLELVMADVIHWCTHRDGAARPSMKQVLRILYERLDPLSGGLARAVAGEEGYYYGGWQSGRKGKEGAEMLAGGGGDGGRCLPSSSSTSRSYCSRSVLLECNSPEEAPPQSSPRRMHLHAKTDSEVTSSMAASSPPRAAYYVQSPSHDDGENKTAASSFHSSPAASPPRSLGNHSRESSSSRFSAAKSGSSRRTAAAGGDGGQGWMELVPSAKEGRTTDDDDLDGVQSPGSYAYVYLCALFALFVSLALVVYSASLNQKEVVSSNSIALDNLAAQAATDASLRLTELASVKGTLMMTYWMTEGLFGVQVAAATLAHYFYLLLAASVNLTNLYHSRKSSPPVAVAVVGDKVPLYGGGSGLSSTPVKGAPPAPVPLQLAVRFRSRAFVLGKLVKPKFLTNVQCSVRLDVAKLGKPVSLNKACSLV

SEQ ID NO: 177841 - protein, 106 aa, Oryza sativa
  unsure (1)..(106): unsure at all Xaa locations
  Clone ID: PAT_MRT4530_75456C.1.pep
MFAYAITLCHDDDIRVVSGSLDVVSRLRDIIIWGYILRMRGGPLMVTTQYGYSSAPIYXPKLIFWGGYSSVFSPGWMVMTGCRKELGSQGWLLEVPGGHRIEDSGK

SEQ ID NO: 177842 - protein, 204 aa, Oryza sativa
  unsure (1)..(204): unsure at all Xaa locations
  Clone ID: PAT_MRT4530_75457C.1.pep
MALAGTLNASTVFFLLLLLLCVSVMSPPFTPASASPMGLTADAKVALLLYHAVAAHFSEEALKAINGEVNTLATDGGGGGKVLNLTIEEDDDGAGATVKLSSSSGNVARVTKTIQDADPHAVYLIDAVLMPLDXWSTSLPAAARLPLHRRRSLHLHPHLLRPQIRPLRRTASPTISRPRSSLRRTARAGAAWQRGVCSRWSCRP

SEQ ID NO: 177843 - protein, 148 aa, Oryza sativa
  Clone ID: PAT_MRT4530_75458C.1.pep
MSTYFTLCSCYTDYTASLSGRCFGAGIMFAYAITLCHDDDIRVVSSNLDMVSRLWDIIIWGYMLRIRGGPLMVTAQYGYSSAPVYNPKLIPWGGYSSVFSPGCMVMTGYRKELGNQGWLLEMPRGGVASRNARRASDRGTLFFTGETS

SEQ ID NO: 177844 - protein, 45 aa, Oryza sativa
  Clone ID: PAT_MRT4530_75459C.1.pep
PSSCFVLYNNRSRSPLLAFYIYHRSCSYKLLFGAYNLISHPIVVW

SEQ ID NO: 177845 - protein, 80 aa, Oryza sativa
  Clone ID: PAT_MRT4530_7545C.1.pep
RPAPATSAAFTGGQDLTAPVVHVAMGNRCLMLASRTGRRFRNRSYLNSRLYPLTAGLLVRMSLFHPHTALICARLTARSY

SEQ ID NO: 177846 - protein, 137 aa, Oryza sativa
  unsure (1)..(137): unsure at all Xaa locations
  Clone ID: PAT_MRT4530_75460C.1.pep
MNANFTLYSSYIDYTASLSGRCIGTGVMFAYAITLCHDDDIRVVSGSLGVVFRLLGIIIWGYMLQKRGGSLMVTAQXTGXSSARVYSPKLISXGGYSSVFSPGCMVMTNCRKELGSQGWLLEVPGGHRKESNQSEPS

SEQ ID NO: 177847 - protein, 180 aa, Oryza sativa
  unsure (1)..(180): unsure at all Xaa locations
  Clone ID: PAT_MRT4530_75461C.1.pep
ISTNFTLCSCYTEYTASXSGRCFGAGIVFAYAITLCHDDDIRVVFGSLGVVSRVRDIIIWGYILRIRGEPLMVTAHYEYSSAPIYNPKLISWGGYSSVFSPGWMVMTGCRKELGSQGWFLEVPGGHRIETHGRSVRSRPFVLFRLDLSRSFRRPLLSTRSTMNPSPADAINPFSVSKIIL

SEQ ID NO: 177848 - protein, 403 aa, Oryza sativa
  Clone ID: PAT_MRT4530_75462C.1.pep
MAMHTPPWEELPADVLRIVFSRVACRAYRQVMAGVCGAWRRAVKVKVATGQPPRPRQLPCLLRPNGGDSSVSSLLCSGGHGISVVHAAHLPQQPVDARHARFFGSHDGSWAFLASAQTSGHVLQKFGTDTIIPLPDFMDVQGGESSSIVHLAATLSHQPGHASCLVAAIVKTYPIDVMSLRAVAFWRMDHGTMASELHRTEIEAMEPEDIIFHKGVLLVLTQQENLLAWIPEYTDEGRGVEMHGPEHRACGKPRIYNELAVQSRYLVESQNCLLLIVRYREGHPTSSTQELKIFQLVELEIPDENGIMMTRYNWVELFSLFGEMIFLGRGCSRSYNVSNYPGFTEGVYFLDDGSFYHADLLSHDAADQKYTCSDNGRWVNLQVDRCFPPEQSCSCSPPIWVLP

SEQ ID NO: 177849 - protein, 474 aa, Oryza sativa
  unsure (1)..(474): unsure at all Xaa locations
  Clone ID: PAT_MRT4530_75463C.1.pep
MADKTLREFAALSANNMAIGPQINMGDMDFNLKSNLITMAQASPFYGKPNEDANAHLQQFLEICSTYTIKGEYVATCPHHGMDDWLILQNFYNGLTPMSRDRLDAAARGAFFSKTVRGAIDLIEKMVFNMGWSEERLQTRQRGMHTVKETELLAAKLDLLMKRLDDHDKRLQGTIKALDSHVTCEVCSNTGHSRNDCSETREEAIYMGNNNXRYCPQGDLGXKQPRPYYQGASXLASLVPTNETGRIPGQPDSSVENVKAITTRGGTNGIAKEAPSSDSADKEVQPEKTMLQEYCDTRLLPFPQRSRKPSVDEQFARFVEVIQKIHINVLLLDAMEVPTYARYLKDILNNKRPLLTTEVVKLTEQCSNVILHKLPEKKKDPRCPTITCSIGAQQFDQVLHDLGASVSIIPKDVFDKLNFTVLASTPMRLQLADSSVRYPAGIXEDVPVKIRDFFILVDFMVLDMGTAKETPLIL

SEQ ID NO: 177850 - protein, 129 aa, Oryza sativa
  Clone ID: PAT_MRT4530_75464C.1.pep
MSTYFTLCSCYTEYTASLSGRYFGACIMFAYAIALCHDDDIRVVSGNLGVLSRLQDIIIWGYILRMRGGSLMVTAQYGYSSTPIYNPKLIPWGGYSSVFSPGCMVVTGCRKELGSQGWLLEVLGGHRIE

SEQ ID NO: 177851 - protein, 139 aa, Oryza sativa
  unsure (1)..(139): unsure at all Xaa locations
  Clone ID: PAT_MRT4530_75465C.1.pep
MNANFTLCSCYTDYTASLSGRCIGTGIVFAYAITLCHDDDIRVVSSSLGVVSRLRDIVIXCYMLRMRGGPLMVTAQYGYSSARVYSPKLISXGGYSSVFSPGCMVMTGCRKELGSPGWLLEVPGEHRIEDKLKSPSLSL

SEQ ID NO: 177852 - protein, 111 aa, Oryza sativa
  unsure (1)..(111): unsure at all Xaa locations
  Clone ID: PAT_MRT4530_75466C.1.pep
MNTYFILCSCYIEYTASLSGRCFGAGIMFAYAITLCHDDDIRVVSGSLDVVSRLXDIIIWGYMLRMRGGPLMVTAXYGVFPTHVYSPKFIPXGGYSSVFSPGCMVMTGCRR

SEQ ID NO: 177853 - protein, 173 aa, Oryza sativa
  unsure (1)..(173): unsure at all Xaa locations
  Clone ID: PAT_MRT4530_75467C.1.pep
PRVEPPPLDPHWRTERTQGIDHDPDVGGAPRDANDGAARFERRNEPPTNTTGPGRRRRREPTWARPQSDXGPPAPPPPPEPPTXGEPNGAPXNGHLAPDPXTRTPGRPGRNHRTFVRPTEXPPNGRGGPGGPLGAGRTHPGPGNGXHLGPPAPPPPGRTVWGQRNNGAQAGGP

SEQ ID NO: 177854 - protein, 113 aa, Oryza sativa
  unsure (1)..(113): unsure at all Xaa locations
  Clone ID: PAT_MRT4530_75468C.1.pep
APPPRAPFHRARLCRHPPPAPPPPPPNPPRAPPATAXPPPPPNPAPPACSLLSHHAPPPPRSPXTRPARWLPLSAPPPNAFPLPQLTPPSSPPPPPPPHXPPPLVPASTSSSD

SEQ ID NO: 177855 - protein, 89 aa, Oryza sativa
  unsure (1)..(89): unsure at all Xaa locations
  Clone ID: PAT_MRT4530_75469C.1.pep
NPVRSLETALTSNGPSTFMSTPIWAILDXLERIYRHLSNASGLIXNSSRVNGNHQNKPVLFLKPNMDPVPCNRLGLSWKCLPSSIFLYK

SEQ ID NO: 177856 - protein, 145 aa, Oryza sativa
  Clone ID: PAT_MRT4530_7546C.1.pep
SATPSATPSGYRKPFILSQNPETWFNLPRKPGPGKGKKEPMGGTSAAQVSGPLKKANWPNRGSNRQNQPRGFFFPAKWFPRDLLVCPPAYLPEWKAVESTENGGLQLLAGVSPPAKQVAVVDPGWVSTELIPPNTGFGSEYHAHR

SEQ ID NO: 177857 - protein, 49 aa, Oryza sativa
  Clone ID: PAT_MRT4530_75470C.1.pep
IRKTNAGRYLVPIPVVCIKLSCFQQLVYSRTYAFHSPRLEHGDLFADDE

SEQ ID NO: 177858 - protein, 93 aa, Oryza sativa
  Clone ID: PAT_MRT4530_75471C.1.pep
ASAVASCLSPVGRRACLRHCCHHRQAAAAAELNRSGGLDLSHPTSPPALDLGARRVREARRRRRSEESLRRGVAGAGGARRRRRRRRGLGRAR

SEQ ID NO: 177859 - protein, 42 aa, Oryza sativa
  unsure (1)..(42): unsure at all Xaa locations
  Clone ID: PAT_MRT4530_75472C.1.pep
ILXTLFSHMLVKHCNILFKSQIICKANKMFLCLVKAKKKKKK

SEQ ID NO: 177860 - protein, 168 aa, Oryza sativa
  unsure (1)..(168): unsure at all Xaa locations
  Clone ID: PAT_MRT4530_75473C.1.pep
MEIMCIGIVSPFKDSGVWYSGVDLVLNPFVDPGPQELSTSARCSRKQRRMYRSKHGVCTCNPACIPAAVFNVVMRHRCPSPPLPPSPHGXAQPPPLXGAPQLPPPGSCRRGSSPTPNRWRPRSPPPPFSPDPRRGGHGCYRWPPPPMGCPPPPLDLAEGRARPPPPLS

SEQ ID NO: 177861 - protein, 47 aa, Oryza sativa
  Clone ID: PAT_MRT4530_75474C.1.pep
KVHRIRKRCCTSKHGYENFTIGVKHMNHEILLSGSEKKNRLQRDLIN

SEQ ID NO: 177862 - protein, 263 aa, Oryza sativa
  Clone ID: PAT_MRT4530_75475C.1.pep
MEAEAAAKRARESGDAAAAGAGEQAGISAVIPGWFSEISPMWPGEAHSLKVEKVLFQGKSDYQNVMVFQSSTYGKVLVLDGVIQVTERDECAYQEMITHLPLCSIKDPKKVLVIGGGDGGVLREVSRHSSVEQIDICEIDKMVVDVSKQFFPHLAVGFEDPRVSLHIGDGVAFLKNAPEGTYDAVIVDSSDPIGDLLIIGVIGFMLCSTEGPTVDFQHPIFNIEDNEFSTKSKGPLKFYNSEIHSASFCLPSFAKRVIGSKAN

SEQ ID NO: 177863 - protein, 323 aa, Oryza sativa
  Clone ID: PAT_MRT4530_75476C.1.pep
MEAEAAAKRARESGDAAAAGAGEQAGISAVIPGWFSEISPMWPGEAHSLKVEKVLFQGKSDYQNVMVFQSSTYGKVLVLDGVIQVTERDECAYQEMITHLPLCSIKDPKKVLVIGGGDGGVLREVSRHSSVEQIDICEIDKMVVDVSKQFFPHLAVGFEDPRVSLHIGDGVAFLKNAPEGTYDAVIVDSSDPIGPAQELFEKPFFQSVARALRPGGVVCTQAESIWLHMHIIEDIVANCRQVFKGSVNYAWTTVPTYPSGVIGFMLCSTEGPTVDFQHPIFNIEDNEFSTKSKGPLKFYNSEIHSASFCLPSFAKRVIGSKAN

SEQ ID NO: 177864 - protein, 63 aa, Oryza sativa
  Clone ID: PAT_MRT4530_75477C.1.pep
RDAEEGEQNSPYRESYYKSLAGVLQRRDWENPGVTQLNRLGEHTPFASWRKSEEARTDRPYQK

SEQ ID NO: 177865 - protein, 1377 aa, Oryza sativa
  Clone ID: PAT_MRT4530_75478C.1.pep
MRGARSSTSSQCWTGPRATASSSSSTTSSQASPSLASPSRRASATPASPTSLPSSAFVHSSFVPPLLYAVFGSSNNLWWGWWRQRRSCGTMEGTRRHLEKDLEPWRIIEDVQVKVEAQTKSTSGNDAEKSPQDFADCVSQEQLRTLQENTQKDITEAVAKSVQDTFTKIGFLNHMERLDKRISTLTDRVAALETPSNEEVSGDDDAHPEDTVYDSSGYIDMPVTRQARLRRRLCTNRTSMGGTRHQQGNNNRVPEDPYAKVKFKIPSFSGYYDAEKYLDWEMTVEQASSEFKDFAIMWWAGLSDKGALSTIWEELKVAMRDRFVPPSYHRDLRKKLMRLEQGDKSVQDYYGELQKGVRRCGIVEGVEDAICRFYSGLREEIQNIVDYKEFNSVNQLFQFAMLAEKELQGREQQGKNKAKDGYITTSDVEEEEEEEEVEDEDGEVFGRDDTMAYRTIIVQRIFFVINNRRARVIIDGGSCNNLKITLLPLTPAEIVEADKEQAASLKLDESKNQLVAKSVFPPKKDKLSPSYKVEGIKLMGSVMLATKCDIAEISDDDICYSLICKQALVSLDDIAGSIPPVVTNLLQEYEDVFPAEIPLGLPPMRGIEHQIDLIPGALLPNRAVYRTNLEETKEIQRQVQDLLDHGYIRQSLSPCAVPVILVPKKDGSWQITFMCLMNEVLRPFIGRFVVVYFDDILIYNKSLDEHMDHLRAIFNALRDARLFANLEKCIFCTERVSFLGYVVTPQGIEVDETKIEAIKSWPVPQTITEVRSFLGLAGFYRRFIKDFSTFATPLNELTKKGVVFHWGKTQEKSFDTLKDKLTHAPLLQLPNFGKTFELECDASGVGIGGVLMQDGKPVAYFSEKLHGSVLNHSTYDKELYALEAHGGGLMGHFEAKKTEDVLALHFFWPRMRKDVERTKRGRDSIFVVVDRFSKMAHFISCHKSDDAVHIADLFFHEIVRLHGMPSTIVSDRDAKFLSHFWHMLWNKLGTKLLFSTTCHPQTYGQTEVVNRTLGTMLRAILKKNLKMWEECLPHVEFAYNWATHSTTKVSPFQVVYGFNPRAPIDILPLPTSERVHNDAMARAEFILKMHESTKLNIEKMTEKYRIARSKGRQEVKLEPGDLVWLHLQKDRFPELRKSKLMPRADGPFKIIEKINDNVYKLELPPEFGVSTTFNISDLKPYLGEEDELESRTTSIQEGEDNADITTSDIHNNPPTIIQGPITRARARQLNLEQTGISLLGEVIRVSTRVITRGDVVLRLRDSRACAFKKPDRFMSRLRPNRCVSEPFGRSGTLVHIRAPHDQNGQKGRSTTERRKVQPVKKLTHHRCPRCRAAGFRRGAPNSTAAPQDAPASPPPSPGPRSQPPITVVAVRDVGKST

SEQ ID NO: 177866 - protein, 1158 aa, Oryza sativa
  Clone ID: PAT_MRT4530_75479C.1.pep
MEGTRRHLEKDLEPWRIIEDVQVKVEAQTKSTSGNDAEKSPQDFADCVSQEQLRTLQENTQKDITEAVAKSVQDTFTKIGFLNHMERLDKRISTLTDRVAALETPSNEEVSGDDDAHPEDTVYDSSGYIDMPVTRQARLRRRLCTNRTSMGGTRHQQGNNNRVPEDPYAKVKFKIPSFSGYYDAEKYLDWEMTVEQASSEFKDFAIMWWAGLSDKGALSTIWEELKVAMRDRFVPPSYHRDLRKKLMRLEQGDKSVQDYYGELQKGVRRCGIVEGVEDAICRFYSGLREEIQNIVDYKEFNSVNQLFQFAMLAEKELQGREQQGKNKAKDGYITTSDVEEEEEEEEVEDEDGEVFGRDDTMAYRTIIVQRIFFVINNRRARVIIDGGSCNNLKITLLPLTPAEIVEADKEQAASLKLDESKNQLVAKSVFPPKKDKLSPSYKVEGIKLMGSVMLATKCDIAEISDDDICYSLICKQALVSLDDIAGSIPPVVTNLLQEYEDVFPAEIPLGLPPMRGIEHQIDLIPGALLPNRAVYRTNLEETKEIQRQVQDLLDHGYIRQSLSPCAVPVILVPKKDGSWQITFMCLMNEVLRPFIGRFVVVYFDDILIYNKSLDEHMDHLRAIFNALRDARLFANLEKCIFCTERVSFLGYVVTPQGIEVDETKIEAIKSWPVPQTITEVRSFLGLAGFYRRFIKDFSTFATPLNELTKKGVVFHWGKTQEKSFDTLKDKLTHAPLLQLPNFGKTFELECDASGVGIGGVLMQDGKPVAYFSEKLHGSVLNHSTYDKELYALLTAMHSSWFRPLLLIQEAHGGGLMGHFEAKKTEEVLALHFFWPRMRKDVERTKRGRDSIFVVVDRFSKMAHFISCHKSDDAVHIADLFFHEIVRLHGMPSTIVSDRDAKFLSHFWHMLWNKLGTKLLFSTTCHPQTYGQTEVVNRTLGTMLRAILKKNLKMWEECLPHVEFAYNWATHSTTKVSPFQVVYGFNPRAPIDILPLPTSERVHNDAMARAEFILKMHESTKLNIEKMTEKYRIARSKGRQEVKLEPGDLIWLHLQKDRFPELKKSKLMPRADGPFKIIEKINDNVYKLELASEFGVNTTFNISKLKPYLGEEDELEFRTTSIQEGEDNADITTSDIHNNSFNDHSRTRYKSLCTTFKLK

SEQ ID NO: 177867 - protein, 57 aa, Oryza sativa
  Clone ID: PAT_MRT4530_7547C.1.pep
KLLNGVNLHAWHGATDTDCYGMLFSNINSFLVNQLSQSRDKIYFSLRHLYIQCIRTG

SEQ ID NO: 177868 - protein, 849 aa, Oryza sativa
  unsure (1)..(849): unsure at all Xaa locations
  Clone ID: PAT_MRT4530_75480C.1.pep
MGPTWAGVPNEVTSPKDHDSRWPNRIPAFGGLDLDVFLFIYDVSNGCIHSSYGHITKASGPHRMRRRLSQLFKGSGPSSSHHDGSSTRSSANISMEDAEAPRHDTDITTSDTHNNPPMVIQGLIARARARQLNLEVSSFLCSSLYEFEKRLLPNEYIVIRNNRGDKETLGEGLRAMEDHRGRPSQGGGPNQFDLGAIRSLGPVCTKTGAQVAYVLGLGRSLYEWKTKKITFPMVLVPHPNTFRVNGYRPNKLTSRICPGAVSPYLGLWAITFRKIGNPSAHQVVSEAVVKSVQDAFTKIGFLNHMERLDKQISTLTDRVAALETPSNEEVWAGLSDEGVLPTTWEELKVAMHDRFVPPSYHRDLRKKLMRLEQGDKSVQDYYGELQKGVRRCGIVEGVEDAIFRFYSGLREEIQNIVDYKEFNSMNQLFWFAMLEEKELQGRDHQGKNKASTYTPRTMPSTGLPRAVSFRAPSQPASKRPAAFGASAAPKPSPPQPAESGNGSSQVPAKSASSVASTGRIQCHRCQGFGHVQKDCPIQRAYVATEDGYITTSDVEEEEEEEEVEDEDGEVFGRDDTTDYRTIVVQRVLSMQIFFVINNRRARVIIDGGSCNNLVSSDLVKKLGLTTRTHPHPYHIQWLNDFGRXKDSVDCDVVPMQACSLLQGASLPNRAAYRTNPEETKGIQRQVQDLLDRGILSPFRQRFQYLCCTXNELMKKGVVFHWEKTQEKSFDTLKDKLTHAPLLQLPNFGGKTEPQTKPYPLDMWKYGSALQQRPELNPDSTRGVLMQDGKPVAYFSEKLHGPVLNYSTYDKELYALEAHGGGLMGHFGAKKTVDVLAMHFFWPRMRKDVE

SEQ ID NO: 177869 - protein, 72 aa, Oryza sativa
  Clone ID: PAT_MRT4530_75481C.1.pep
PGIGVPARRSRKTAASTDVARTSLAGRRSPKAAAKPTLPVPGEGRWRDREDRRGHKEVKWRQCRLPEKFRWV

SEQ ID NO: 177870 - protein, 76 aa, Oryza sativa
  Clone ID: PAT_MRT4530_75482C.1.pep
NTFTLTPPHIHSQTILLFIQNHNTLTPLIQRMRERKQIAVSERVSEAAYFSLITGQPTRPGTSAAARGGGRRRARL

SEQ ID NO: 177871 - protein, 68 aa, Oryza sativa
  unsure (1)..(68): unsure at all Xaa locations
  Clone ID: PAT_MRT4530_75483C.1.pep
MPGVGEGDPLRCGGSGDVSALIPEFRQPFRGPXXPWGEFGCPASAREGWICSTRWLGFESLLVGEDRG

SEQ ID NO: 177872 - protein, 517 aa, Oryza sativa
  Clone ID: PAT_MRT4530_75484C.1.pep
MKIEAIKSWPVPQTITQVRSFLGLAGFYHRFVKDFSTFAAPLNELTKKWVVYHWGKTQEKSFDTLKNKLTHAPLLQLPNFGKTFELECDPSGVGIGGVLMQDDRDAKFLRNFWRTLWNKLGTKLLFSTTCHPQIDGQTEVVNRTLGTMLRAILKKKLKMWEECLPYVEFAYNRATHYTTNISPFQVVYGFNPRAPIDILSLPTSERVHNDAKARAEIILKIHETTKYYVEKMTKKYRIAGCKDLEPYLGEEDELESRTSSVQEEEDDVDITLSDPHNNPPTVIQGPITRARARQLNLEEFENRLLPNDYIVIWINGGDRETCGEGLRAIEDHRGRPRISFLGEVNQVSIYHFVPFQCIYKNILDEILCLPPGNGSQVDGRLRCQRLPGGTVTTAVVPLAAAHTTVSNGHCWGGDYVAFFSDERANTSSHLVVKLVPSDSDSHPGLNGQQCMQSPIFPSVEKKMKLLARLSLAYPGMMDLRWRDEQERWEEEETGVIWSNKFDRCFKGDLKNLWHGSN

SEQ ID NO: 177873 - protein, 188 aa, Oryza sativa
  unsure (1)..(188): unsure at all Xaa locations
  Clone ID: PAT_MRT4530_75485C.1.pep
DGHPEDTVYDSSGNVNAQATRKHDYNIILXTNRTGIGGTHHYQQGNNNRVPDEPYAKVKFKIPSFSGYYDAEKYLDWEMIVEQKFNVHLVPEQHRVRQASSEFKDFAIMWWDGLSDGGVLPTTWEELKKDYPSQRAYVATEVGYITTSNVEDDEEEEEEEVEDEDGEVFGRDDTTAYRTIIVQRVLSM

SEQ ID NO: 177874 - protein, 62 aa, Oryza sativa
  Clone ID: PAT_MRT4530_75486C.1.pep
KCQRGTSPYPQTIKFQLTESLKLFSVQRLCKCILRNICCGISRMPHQSRISFISILQSFGTK

SEQ ID NO: 177875 - protein, 761 aa, Oryza sativa
  unsure (1)..(761): unsure at all Xaa locations
  Clone ID: PAT_MRT4530_75487C.1.pep
MGYYDAEKYLDWEITVEQMFNAHLVPEQHRVRQASSEFKDFAIMWWAGLSDEGVIPTTWEGLKVPAKSASSVASTGHIQYHCCHGFGHVHKDFPSKRAYVATEYGYVTTSGVEEEEEEEEVEDEDDEVFGRDDTTAYRTIIVQRIFFVINNRRARVIIDGGSCNNLVSSDLVKKLGLTTRTHPYPYHIQWLNDSGRAKVTQVCRVSFSIGSYADSIDCDVVPMQACSLLLGHPWEHDNDATHHGRSNKYTFVHNGKKITLLPLTPAEIVEADKERAASLKLNESENQQVAKFVFPTKKDKLSPSSKVEGIKLKGGVMLATKCDIAEISDDDICYSLICKQXSLPNHAAYRTNPEETKEIQRQVQDLLDHGILSPFRQRFQHLXAPLNELTKKGVVFHWGKTQEKSFDTLKDKLTHAPLLQLPNFGKTFELECDASGVVIRGVLMQDGKPVAYFSEKLHGPVLNYSTYDKVVYGFNPRAPIDILPLPTSERVHNDAKARAEFILKMHETTKQNIKKMTERYRIAGSKGRQEVKLEPGDLVWLHLRKDRFPELRKSKLMPRADGPFKIVEKINDNAYKLELPPEFGVSPTFNISDLKPYLGEEDELESRTTSIQEGEDDAHITPSDTHSNPPTVIQGPITRARARQLSLEGTRRYLEKDLEPWRIIEDVQVKVDAQTKSTSGAIRSSGPVFTKTGAQVAYVLRLGRSLYGWKAKKITFPMVLVPYPNSFRVNGNRPNKLMSRIYPGAAPPYLGLWAVYRVGTH

SEQ ID NO: 177876 - protein, 85 aa, Oryza sativa
  Clone ID: PAT_MRT4530_75488C.1.pep
MTKHGSSSFGGALSLCKVILMVLALICTLHTASVQGGRAAAAIGGGGKGSVLDPTYTPPTPPGGSYTGGRGCRGPYRCPPGAGSP

SEQ ID NO: 177877 - protein, 160 aa, Oryza sativa
  Clone ID: PAT_MRT4530_75489C.1.pep
TQQSSNGHLRTDNKSSCATIKFRGTMEGTRRHLEKDLEPWRIIGDVQVKVEAQTKSTSGVIRSPGPVCTKTGAQVAYVLGLGRSLYGWKAKKITFPMCCVTVFGPLARFDTGDNQRRHGAAIAGLKSVRVQEAGSICVATPPKSLFIRTFRKIGNPSAHQ

SEQ ID NO: 177878 - protein, 299 aa, Oryza sativa
  Clone ID: PAT_MRT4530_7548C.1.pep
MAPEGDGDGGVVVTARVLRTGETVEVAGDLLVAADGCTSAIRRRFLPELKLRYSGYCAWRGVFDFSGKEGCTTMVDIRRAYPELGNCLYFDLAYKTHAVLYELPKNRLNWLWYINGDEPELMGSSVTMKVNEATVSEMKEEAERVWCPELARLIGETAEPFVNVIYDAEPLPGLSWAGGRVALVGDAAHPTTPHGLRSTNMSILDARVLGCCLARWGGDGNAEPTSTPRRALAEYEAARRPVVAAQVLHARRLGRLKQGLGMGSAGDGEGFDARTATEEEISQLRQSSMPYFSGAPTIE

SEQ ID NO: 177879 - protein, 78 aa, Oryza sativa
  Clone ID: PAT_MRT4530_75490C.1.pep
MYRSFCLPLWIDVVCTLYDLWNGSLLRRPGNVVAARWLTGKAGEEEGRKETGKVDLEYGNKIHFKLFNNLVHFPAGGH

SEQ ID NO: 177880 - protein, 187 aa, Oryza sativa
  unsure (1)..(187): unsure at all Xaa locations
  Clone ID: PAT_MRT4530_75491C.1.pep
WRIIEDVQVKVEAQTNSTXGAIRSPGPVCTKTGAQVAYVLGLGRSFQWFWSHVQILSESMGDNQRRRGVVIAGLKSVRVQEAGSICVATPPKSFFIRTFRKIGNPSAHQVVSEAVAKSVQDAFTKIGFLNHMERLDKQISTLTDRVAALETPSNEEVVSGDDDAHSEDTVYDSSGYIDTPATRQARL

SEQ ID NO: 177881 - protein, 139 aa, Oryza sativa
  Clone ID: PAT_MRT4530_75492C.1.pep
MEGTRRHLEKDLEPWRTIGDVQVKVEAQTKSTSGAIRSLGPVCTKTGAQVVYVFELGRSLYGWKAKKISFPMNLSRCCVTVFGPLARFDTGDNLRRRGAAIAGLKNVRVQEAGSICVATPPKSLFIRTFRKIGNPSAHQ

SEQ ID NO: 177882 - protein, 141 aa, Oryza sativa
  unsure (1)..(141): unsure at all Xaa locations
  Clone ID: PAT_MRT4530_75493C.1.pep
MNASFTLCSCYTDYTASLSGRCIGTGXFAYAITLXYDDDIRVVSGSLGMVSRLRDIIIWGYMLRMRGGPLIVTPQYGYSSARVYSPKLIXEDGXSSVFSPGCMVMIGCRKELDSQGWLLDVPGGHRIEDIAKKYQHRPQAP

SEQ ID NO: 177883 - protein, 400 aa, Oryza sativa
  unsure (1)..(400): unsure at all Xaa locations
  Clone ID: PAT_MRT4530_75494C.1.pep
PRVRIDGGSCNNLVSSDLVKKLGLTTRTHPYPYHIQWLNDSGRAKVTQVCRVSFSIGSYADSIDCDVVPMQACSLLLGHPWEHDNDATHHGRSNKYTFVHNGKKITLLPLTPAEIVEADKERAASLKLNESENQQVAKFVFPTKKDKLSPSSKVEGIKLKGGVMLATKCDIAEISDDDICYSLICKQVLXVSLDDIASSIPSIVTNLLQEYKDVVPAEIPSRLPPMRWIEHQIDLIPGASLPNHAAYRTNPEETKEIQRQVQDLLDXGFYRRFVKDFSTFAAPLNELTKKGVVFHWGKTQEKSFDTLKDKLTHAPLLQLPNFGKTFELECDASGVVIRGVLMQDGKPVAYFSEKLHGPVLNYSTYDKVLYALVRSLETWRHYLWPKEFVIHSDRLNIFAL

SEQ ID NO: 177884 - protein, 124 aa, Oryza sativa
  unsure (1)..(124): unsure at all Xaa locations
  Clone ID: PAT_MRT4530_75495C.1.pep
MNAYFTLCSCYTEYTASLSGRCFGADIMFAYAITLYHDNDIRVVSSSLDVVSRLRDIIIWGYMLRMRGGPLMVTAQYGYSXSARVYNPKLIPWGGYSSLFSPSCMVMMGCRKELGSQXWLLEVP

SEQ ID NO: 177885 - protein, 105 aa, Oryza sativa
  unsure (1)..(105): unsure at all Xaa locations
  Clone ID: PAT_MRT4530_75496C.1.pep
MFAYAITLYHDDDIRVVSVSLGVVSRLRDIIFWGYILWMRCGPLMVTAQYGYSSAPIYNPKLISWGGYSSVFSPGCMVMTGYRKELDSXGXLLEVLGGHRIEGIS

SEQ ID NO: 177886 - protein, 137 aa, Oryza sativa
  unsure (1)..(137): unsure at all Xaa locations
  Clone ID: PAT_MRT4530_75497C.1.pep
MSTYFTLRSCYTEYTASLSGRCFGAGIVFAYAITLCHDDDIRVVPSSLDVVSRLRYIIIWGYILRMRGGPLMVTAQYGYSSAPIYNPKLISXGGFSSVFSPGWMVMMGCRKELGSQGWLFEVPGGHRIEGVSYNFSH

SEQ ID NO: 177887 - protein, 149 aa, Oryza sativa
  unsure (1)..(149): unsure at all Xaa locations
  Clone ID: PAT_MRT4530_75498C.1.pep
MSTNFTLCSCYTEYTASLSRRCFSAGIMFAYAITLCHDDDIRVVSGSLGVVSRLRDIIIWGYYXWIRGGPLMVTAQYGYSSAPIYNPKLISWXGYFSVFSPGXMVMTGCRKELDSQGWLLEVPGENRIEESTLGPSNRGRVSIISLNHT

SEQ ID NO: 177888 - protein, 72 aa, Oryza sativa
  Clone ID: PAT_MRT4530_75499C.1.pep
VNIEDTSYGKQMGNKRFSNYKISISTGKRIDYQKGSRSVILWMKTGHGFEGAKKHDLPKSAPFESTIEGNSM

SEQ ID NO: 177889 - protein, 98 aa, Oryza sativa
  unsure (1)..(98): unsure at all Xaa locations
  Clone ID: PAT_MRT4530_7549C.1.pep
MADENNGGGASPVASRRRRVARRRPPTPSSSPSSPHRRQQPTDVLPSCLPKQKSEREEKGRGGERVMTWPADMWGPRGSRADSAAMXDKYRVKTTEGH

SEQ ID NO: 177890 - protein, 89 aa, Oryza sativa
  Clone ID: PAT_MRT4530_754C.1.pep
MEGMERDACRRNGRLDGVVALWTIQKKQNCGKNNEKAVKRKAPSPDSGSNEGNTSAEEQNKNSTGVKKGGKERKGKKKKKKKKKGNNPP

SEQ ID NO: 177891 - protein, 54 aa, Oryza sativa
  Clone ID: PAT_MRT4530_75500C.1.pep
YIPPISSCHLAEYVLQNVTNTALGEEYILFLVGHGEVIPLTKECVPSVLCCTWF

SEQ ID NO: 177892 - protein, 132 aa, Oryza sativa
  unsure (1)..(132): unsure at all Xaa locations
  Clone ID: PAT_MRT4530_75501C.1.pep
MSTYFTLCSCYIECTASLSGRCFGAGIVFAYAITLCHDDNIRVVSGSLDVVSRLRDIIIWGYILRMRGRPLMVTAQXRYSSAPIYNPKLISWGGYFSVFSPGCMXMTGCCKELGSQGWLLEVSVGHRIEGIS

SEQ ID NO: 177893 - protein, 151 aa, Oryza sativa
  unsure (1)..(151): unsure at all Xaa locations
  Clone ID: PAT_MRT4530_75502C.1.pep
YHARPPLPLILYFLLQERRILPSDSRGFEFNTADNGFLSIPILRCXRCPLFGNNALLILIVVPTWPSINVHHVCSLNRWCKCVEDRDFPPLWLHSNIRHLLLPRWQCRLKEWISLAPSHLYLLPLFRSILCNRWPKSISTCKCQPPLQAEQ

SEQ ID NO: 177894 - protein, 155 aa, Oryza sativa
  unsure (1)..(155): unsure at all Xaa locations
  Clone ID: PAT_MRT4530_75503C.1.pep
MSTYFTLCSCYAEYTASLSGRCFGAGIVFAYAITLCHDDDIRVVSDSLGVMSRLRDIIIWGYILRMRGGPLMVTAQYGYSFAPIYNPKLISWGGYSSVFSPGCMXMTDCHKELGIQGWLLEVSGGHRIEELVMLAMHIYLRIIKFHYIRYTNLLQ

SEQ ID NO: 177895 - protein, 151 aa, Oryza sativa
  unsure (1)..(151): unsure at all Xaa locations
  Clone ID: PAT_MRT4530_75504C.1.pep
MPRPISSYLHSTDHTQTSPVFIAARCPFPKILLTVKFACFLTANKGFIGVSADELFRCCIGLQGLHPNGFYWTILLLXLYYQQSIAFILLFTSSITFHIKHIADSSKPYQYRLDQTDWHARISSIFRPTLELSRSPRPVCVFRINRHPSRP

SEQ ID NO: 177896 - protein, 153 aa, Oryza sativa
  unsure (1)..(153): unsure at all Xaa locations
  Clone ID: PAT_MRT4530_75505C.1.pep
MNANFTLFSSYTDYTTSLSGRYIGRGIVFAYAITICHDNDIRVVSDSLDVVSRLLGIIIXGYMLRMRGGLLMVTAQYGYSSARVYSPKXCPXGGYSSIFSPGCMVMTGFHKKLGSXGWLLEVPGGHRIESISYFPSHRRVALGRLCRACRVPL

SEQ ID NO: 177897 - protein, 138 aa, Oryza sativa
  unsure (1)..(138): unsure at all Xaa locations
  Clone ID: PAT_MRT4530_75506C.1.pep
MNANFTLRSCYTDYTASLSRRCIGTGIMFSYAINLCHDDDIRVVYXSLGVVSRLRDIIIWGYMLRMRGGPLLVIAQYGYSSARVYSPKLISWGGYSSVFSPGCMGMTGCRKELGSQGWLLEVPEGHRIYERGSYRTHL

SEQ ID NO: 177898 - protein, 85 aa, Oryza sativa
  unsure (1)..(85): unsure at all Xaa locations
  Clone ID: PAT_MRT4530_75507C.1.pep
NKQSPMLPKIETWGLFCSAHHMGNCRMGATAGDGAVDARGESWEAGRLYVCNSSVLPTAVGVNAMNTIQSXAYCVANGIADSLSD

SEQ ID NO: 177899 - protein, 142 aa, Oryza sativa
  Clone ID: PAT_MRT4530_75508C.1.pep
MSTYFTLCSCYTEYTASLSLRCFAAGVVFAYAITLCHDDDIRVVSGSLDVVSRLRDYIIWGYILRMRGRPLMVTAQYGYSSAPVYNPKLIPWGGYSSVFSPGCMLMTGCRKELGNQGWLLEVPGGHRIEDKYKHNSVIFSAF

SEQ ID NO: 177900 - protein, 141 aa, Oryza sativa
  Clone ID: PAT_MRT4530_75509C.1.pep
MEEVGRRLPTTSQVERPAAPVNLAQAQPMEVVSRFPMTAQVELPVAPVDLAPTQPMEAGLRRSWQRDGGLAAANGGGEKEPARSPTMFCRRRSGTVRRRPTSRATVIWRHQRSKAWRRDGGMAMENDGGEEDFARARVVRV

SEQ ID NO: 177901 - protein, 55 aa, Oryza sativa
  Clone ID: PAT_MRT4530_7550C.1.pep
KKQIIRKSHRMFKQSSKSEPRLALWEGRPPGILESTINETRAPLPPRKQPPPSQC

SEQ ID NO: 177902 - protein, 82 aa, Oryza sativa
  Clone ID: PAT_MRT4530_75510C.1.pep
CSIPVLLASAHSPPDLRIVGTQAAPAVSAPTTPAPAEAVSALATVLRTATTTVADGAVILVHTFKITSIWGNSNKPNNKEQG

SEQ ID NO: 177903 - protein, 80 aa, Oryza sativa
  unsure (1)..(80): unsure at all Xaa locations
  Clone ID: PAT_MRT4530_75511C.1.pep
ILARGTARITQSPIANCAACCGGRGNSVAPTTIGIEAWGASSSTSTLGLVLPGFTTNGLMSGIVNRXVPMEGVKFQLAAF

SEQ ID NO: 177904 - protein, 47 aa, Oryza sativa
  Clone ID: PAT_MRT4530_75512C.1.pep
INKAVYERVCAHACVCSRLAFFFLNSCINKKYYGVRMYSLNNALYDK

SEQ ID NO: 177905 - protein, 87 aa, Oryza sativa
  Clone ID: PAT_MRT4530_75513C.1.pep
DALLTHGSRSDGFSSCPSPAPPPRGRRRAPPLGGGGGGGHTAAEGEGGCRLPRTTSTWTRQRHLWMLRLRGMRQSGSAWNVRFTLDA

SEQ ID NO: 177906 - protein, 46 aa, Oryza sativa
  Clone ID: PAT_MRT4530_75514C.1.pep
PTRPPTRTAMWSHPIARDEIWSGKYSHFRSDYTIVKLMRQSLILYY

SEQ ID NO: 177907 - protein, 391 aa, Oryza sativa
  Clone ID: PAT_MRT4530_75515C.1.pep
MRPYRGRGGGGQRCDTEAQSCEPAVTPASSSSWSYAVEPSKARDDDGELPEAGRIHLRCCHVVGMMKPELLKRSGGGVEPQDIGESAEGAAGGIQDSEDRAAKPEAHRVKPPKQGRTAGHAGKPLRLLISMGSSSVNVPVTQPPPPLHPAPLRPPHPAPPHPTPPALYPTTTTTTLEPPRAAVLAGRGRERDGASPTHQAEQKKHGAWGLPRGLSATAESTVATARIHHRYPFESGHPFSRSYGASLIEAQREPLFDSVPLIPPPLSAPTITPVFAAATSLLCPSAACQPEFGQRPPLLIGVGVWSNPYVIPHSVRECEARRTVRNDGEGAVEAEGNVLQRLWSPRVVAAATNPSPAPIMVMVATPHRATDEMAKTVSTIVARKAENGIDH

SEQ ID NO: 177908 - protein, 69 aa, Oryza sativa
  Clone ID: PAT_MRT4530_75516C.1.pep
CGFPILLTHLPWGCFQPSHIVSQWPVITLNALNYYARHHWTREESVCVRCRRGCSAGVCKGARWVGRCR

SEQ ID NO: 177909 - protein, 104 aa, Oryza sativa
  unsure (1)..(104): unsure at all Xaa locations
  Clone ID: PAT_MRT4530_75517C.1.pep
RSPPPIRRRSPTPTPQCFGRIRTLATHTGEPPLFTPSSSRCHTRAFAARCPXGLHSTFPVVPHGSSSLTLPNRVGNDIRVRPDSDSDEEWGPLAKLRLASRRWT

SEQ ID NO: 177910 - protein, 64 aa, Oryza sativa
  Clone ID: PAT_MRT4530_75518C.1.pep
VLYRFRGSYKRSNTLLLSGDESAECIIDCMIREKSAYAPRGARTPLIYGKESGLQKIIYIPNGI

SEQ ID NO: 177911 - protein, 524 aa, Oryza sativa
  Clone ID: PAT_MRT4530_75519C.1.pep
MMKSLLPQSQLRRSAAAASAARSSGGGAGSGGADGAGSDGGAGGRAPATSTFWFLLHALCCLVSLFLGFRFSRLLFFLLFSTTALYSSTSSSSSSAVLRATTTTTTTTTTTTTTTNTFTLSFQANPNPPPSNLSNHTALDAAGAAGHTQSHVVVGRHGIRIRPWPHPDPVEVMRAHRIMERVQEEQRRWYGVKEPRHVLVVTPTYSRAFQALHLTGLLHSLRNVPYPLTWIVVEAGGTTNATASLLARSDLTIVHIPFPDRMPHDWADRHATENRMRLHALRVIRERKMDGVIVFADDSNVHSLELFDEVQKVQWMGAVSVGILAHTGTADQPRLSEEDKQNMPLPVQGPACNSSGHLAGWHTFNSLPFAGKTATVVGEAAPVLPRGLEWAGFVLNSRILWKEAEGKPDWVKDLDAVGENGEEIENPLILLNDPSSVEPLGNCGKKILLWWLRVEARADSKFPQGWVIEPPLDIVVPAKRTPWPETTAELSAELVDSKQDQEGRRLSRTDRSSRSRSTTKRKEN

SEQ ID NO: 177912 - protein, 66 aa, Oryza sativa
  Clone ID: PAT_MRT4530_7551C.1.pep
LILKLKNSEPYSTNHSGDPEKLLNNGFEKKTYSSLISTIYFQQWAITNLVHVIGLFPCSRGKSDCI

SEQ ID NO: 177913 - protein, 408 aa, Oryza sativa
  unsure (1)..(408): unsure at all Xaa locations
  Clone ID: PAT_MRT4530_75520C.1.pep
VDIVWVKLGRRCRVDGSNCDSEEKLSYDQLEHIAFKFAEKLKTCSNMLDERDCTIEILNADIDRLKSSIPNDDDCKSCEVLFSEINALRDVNSINCKKLEYEIEKSKKXMESSFGLGFALHACVVDELVLTKNILTKYKVTFSASSLFNVLGAKRIKQNKDVLVSQNCSKCFLNEMKLKDVLGLVEHMENIVKSDEVLVLFVEKMHIWLVFXFRLARKQKKEREIAFAKRRWQKSGFGSRSTVRPTLTKMPGPVRPQGQRWSNRLPGDFARNSNRTFVKRQGKFSENNECRILGNSLDDKDIPDVTXGQPWSMVRTGTMLREEXRSSAVGIPYEKVTRVRILRGXQLWSTVGIRTKLREELRSRRSRIPNNEVGYDIVYGGWTSCGRNLRNRLHEVCMQVSVFAKEIG

SEQ ID NO: 177914 - protein, 83 aa, Oryza sativa
  Clone ID: PAT_MRT4530_75521C.1.pep
MTEKPKTEIEIFGQTECSPLTGRERRAFYGCRRPPLFRSDLRGREGDGGIACIDFRHDLKRSVYKNDYIFAGGRLKIPPVKIN

SEQ ID NO: 177915 - protein, 928 aa, Oryza sativa
  unsure (1)..(928): unsure at all Xaa locations
  Clone ID: PAT_MRT4530_75522C.1.pep
CYNCRYSRACVPTDADITTSDTHNNPPTVIQGPITRARTMEGTRRHLEKDLEPWRIIWDVQVKVEAQTKSTSGAIRSPGPVCTKTGAQHYYLSLDCVPLIYIYLAFLAPHITSAQHRFLIPAIADYAFXVSFALLTQKDITEAVAKSVQDAFTKIGFLNHMERLDKRISTLSDQVAALETPSNEEVVSGDDDAHPEDTVYDSSGYIDALATRQAWLRHRLRTNRTGMGGTRHQQGNNNNHVPDDPYAKVKFKIPSFSGYYDAEKYLDWEMTVEQKFNAHLVPEQHRVRQASSEFKDFAIMWWAGLSDEGVLPTAWEELKVAMRDRFVPPSYHRDLRKKLMRLEQGDKSVQDYYGELQKGLFRFVMLAEKELQGCDHQGKSKASTYTPRTTPSAGLPKAISFRASFQPAGKRPAAFGASAAPKPSPPPRPAESGKGSSQVPAKSASYVASTGRIQCHRCXGFGHVQKDCPSQRAYVATEDGYITTSDVEEEEEEEEVEDEDGEXFGRDDTTDYRTIIVQRVLSTQIFFVINNRRARVIIDGGSCNNFVVKRFRKSKDSVDCDVVPMQACSLLLGRPWXNMIMMLHTMQVAKTVFPPKKDNLSPSSKAKGIKSKGGVMLATKCDIAENSDDDMCYFLICKQALVSLDDIASSIHLVVTNLLQEYEDVFPAEIPPGLPNRAAYRTNLEETKEIQRQVQDLLDHGYVRQRLSPCAVPVILVPKKDGSWRMCVNCRAINNITIXYRHPIPRLDDMLDELCGSIIFTKIDLRSGYHQIRMKLGDEWKTAFKTKFGLYEWLVMPFGLINAPSTFMRLMNEVLRPFIGRFVVVYFDDILIYSKSLNEHMDHLRAVFNALRDARLFATLEKCIFCTERVSFLGYVVTPQGXIEVDESKIEAIRSWPVPETITQVRSFLALCDPSRSAATHGCRSNTS

SEQ ID NO: 177916 - protein, 127 aa, Oryza sativa
  Clone ID: PAT_MRT4530_75523C.1.pep
MDPHTVWSLVVNPAILRSWATDPTIPQSLAMNLDASDRSACPTAVDGASVRLAVANDESAHPIIVVDRNRVPQGWQRWIRPPRSCARAKVGTSLPCSCDGVVDAATALATSRASAFAGTRCGGDEVE

SEQ ID NO: 177917 - protein, 212 aa, Oryza sativa
  Clone ID: PAT_MRT4530_75524C.1.pep
MTEKYRIAGSKGRQEVNLEPGDLVWLHLRKDRFPELRKSKLMPRADGPFKIVKINDNAYKLELPPEFGVSPTFNISDLKPYLGEEDELESRTTSIEEGEDDADITTSDTHNNPPTVIQGPITRALTMEGTSRHLEKDLDPWRTIRDVQVKVEAQTKSTSGAIRSPGPVCTKTCAQVAYVLGLGRSLYGWKAKKISFPMVLVPRSNYFRVNGN

SEQ ID NO: 177918 - protein, 185 aa, Oryza sativa
  unsure (1)..(185): unsure at all Xaa locations
  Clone ID: PAT_MRT4530_75525C.1.pep
PRPRAPSPTPPAPPPPSLPLHSSPPLLPLSSPLFPSLLAGRRRDNMRPARDPSLSLDCGSKRRRATTAAPPPLPPXPLEDPAEGRHGGGGSNGARPSPPSPCRSGGTRPLPSLPLQXPAEGAVDLATRDPSPPSPCKSGGGEACMGARRSSGMRQRSAWRWGDGVGDRRIYLSPSFSLCYPLCYL

SEQ ID NO: 177919 - protein, 1164 aa, Oryza sativa
  unsure (1)..(1164): unsure at all Xaa locations
  Clone ID: PAT_MRT4530_75526C.1.pep
GCRGWLNYAASEQIVLRLGLTTCTHPHPYHIQWLNDSGRAKVTQVCRVSFSIGSYADSVDCDVVPMQACSLLLGRLWEHDNDATHHGRSNKYTFMHNGKKITLLPLTPAEIVEADKERAASLKVDESENQQSPSFKVEGIKLKGGVMLATKCDIGDISNDDMCYFLICKPALVSLDDIASSIPPVVTNLLQEYEDVFPAEIPPGLPPMRGIEHQIDLIPGASLPNRAAYRTNPDETKEIQWQVQDLXDRGYVRQSLSPCPVPVILVPKKDGSWRMCVDCRAINNITIRYCHPIPRLDDMLDELCGYIIFTKIDLRSGYHQIRMKLGDEWKTAFKTKFGLYEWLVMPFGLTNAPSTFMSLMNEVLRPFXGRFVVVXFDDILIYSKSLDEHMDHLRAVFNALRDARLFANLEKCIFCMERVSFLGYVVTPQGIEVDESKIEAIRSWSVPQTITQVRSFLGLAGFYHRFVKDFSTFAAPLNELTKKGVVFHWGKTQEKSFDILKEKLTHAPLLQLPNFGKTFELECDATGVGIGGVLMQDGKPVAYFSEKLHGPILNYSTYDKELYALVRSLETWRHYFWPKEFVIHSDHESLQYLRSQNNLNRKHAKWVEFIESFPYVIKHKKGKDNVIADALSRRYTFLSQLECRIFGLESIKEQYALDPDFNEVMINCKEGRTWNKFVINGGFVYRANRLCIPVGSVRLLLIQEAHGGELMGHFGAKKTEDVLAMYFFWPRMRKDVDRFMARCTTCQKAKSHLNPHGLYMPLPVPSIPWADISMDFVLGLSRTKRGRDSIFVVVDHFSKMAHFIPCHKSDDAVHIADLFFHEIVRLHGMPSIVSDRDAKFLSHFWRTLWNKLGTKLLFSTTCHPQTDGQTEVVNRTLGTMLRAILKKNLKMWEECLPHMEFAYNRATHSTTKVSSFQVVYGFNPRAPIDMLPLPTSERVHNDAKARAEFILKMHESTKFNIEKMTEKYRIAGSKSRQEVKLEPGDLVWLHLRNDRFPELRKSKLMPRADGPFKIVEKINDNAYKLELPPEFGVSPTFNISDLKPYLGEEYELESRTTSIQEGEDDADITTSDTHNNPPMVIQGPITRARARQLNLEGTKRHLEKDLESWRTIGDVQVKVEAQTKSTSGAIRSPGPVCTKTGAQVAYVLRLGRSLYGWKAKKMYA

SEQ ID NO: 177920 - protein, 1641 aa, Oryza sativa
  unsure (1)..(1641): unsure at all Xaa locations
  Clone ID: PAT_MRT4530_75527C.1.pep
MEDADAPQHILNDADLDLVDDRERQAYYKLSDREYAHTREYSPELLKKISIDVGFCAIWKAVGWQRFAVVDEPGSHLFTLQFLCTLKEIEDGISFRFFHKEYTLTWKGLSTLLGFHDFCKIDLQKGIYGFEKNRFWEDISGAPICKKSRTNDIHNPTLRLMHKWITMTLFPRSNEGEKSPQNFADYVSQEQLRTLQENTQKDITEAVAKSVQDAFIKIGFLNHMERLDKRISTLTDRVAALETRCMIPVASGDDDAHPEDTVYDSSGDAPATRQARLRRRLCTNHTGMGGTHHQQGNNNNRVPDDPCAKVKFKIPSFSGYYDAEKYLDWEMTVEQKFNAHLVPEQHRVRQASHEFKDFAIMWWAGLSDEGVLPTTGEELKVAMRDRFVPPSYHRDLRKKLMRLEQGDKSVQDYYGELKKGLFWFAMLAEKELQGRDHQGKSKASTYTPRKTPSVGLPKAVSFRVSSQPASKRPATSGASAAPKPSPPRPAESGKGSSQVPAKSASSIASTGRIQCHRCQGFGHVQKDCPSQRAYVATEDGYITTSDVEEEEGEXEVEDEDGEVFGRDDTMDYRTIIVQRVLSTQLXNLVSSDLVKKLXDYTYTSTPLPYSVVKRFRKSKDSVDCDVVPMQACSLLLGHPWXNMIMMLHTMKIILLPLTPAEIQVAKSVFPPKKDKLSPSSKVEGIKLKSAEIPPGLPPMRGIAHQIDLIPGASLSNRAAYRTNPEETKEIQRQVQDLLDRGKSLDEHMDHLRAVFNALRDARLFANLEKCIFCTERVSFLGYVVTPQGIEVDESKIEAIKSWPVPQTITQVRSFLGLAGFYRCFAKDFSTFAAPLNELTKKGVVFHWGKTQEKSFDTLKDKLTHAPLLQLPNFGKTFELECDASGVGIGGVLMQDGKPVAYFSEKLHGPVLNYSTYDKELYALEAHGGGLMGHFGAKKTEDVLAMHFFWPRMRKDVERTKRGRDSIFVVVDRFSKMAHFIPYHKSDDVVHIADLFFHEIVRLHGMPSTIVSDRDAKFLSHFWRTLWNKLGTKLLFSTICHPQTDGQTEVVNRTLGTMLRAILKKNLKMWEECLPHVEFAYNRATHSTTKMTEKYRIAGSKGRQEVKLEPGDLVWLHLRKDRFPELRKSKLMPRADGPFKIVEKIDNAYKLELPPEFRVSPTFNISDLKPYLGEEDELESRTTSIQDGEDDADITNSDTHNNPATVIQGPITRARARQLNLEATRRHLEKDLELWRIIEDVQVKEEAQTKSTLGAIRSPGPVCTKMGAQMDQQWMYADRRSKEFIECVHYFLRVAEANKRNGFICCPCNKWFMPSYNCWISHGEQGVEMEEDEAEDENIPDWAQYAGFEGNQTGEVDRDAGDNDAADDLGRMLQDAKEDYKKLEVQKIHACPNDCILYRGEEYENLEACPVCKALRYKIRREDPGEVDGQPTKKRIPAKQPFKAANKGYKTCTHCMDETESTYLKHCRKVVYMGHRRFLAANHPVRKKGKHFEHKMDHRTKPKHRSGKTVFAMVKDLKVVFGKRPGSQPIESEDGHATIWKKNSIFWELPYWEFLDVCHAIDVMHLTENLCINLPGFLGVYGKAKDTLEAQCHKDGSTNPENASCHNKFYLLLKIETDAAQPESKNSFSLSGDSSGAKAISK

SEQ ID NO: 177921 - protein, 63 aa, Oryza sativa
  Clone ID: PAT_MRT4530_75528C.1.pep
MDGYRVDKSMPKFDKKSRVDYVLCISGMYTHEKELKAQVKVDRVIMERNPGLFLLLNSLLPSS

SEQ ID NO: 177922 - protein, 55 aa, Oryza sativa
  Clone ID: PAT_MRT4530_75529C.1.pep
MASRLHVLRIVGYGGGAGAMIRSSKPLRGSGQPENTTDDADEETSTAAAAAEPMN

SEQ ID NO: 177923 - protein, 71 aa, Oryza sativa
  Clone ID: PAT_MRT4530_7552C.1.pep
MSLAPCFNMTAPMILAPSSPPSGESLFTNVKWDGANDIGTEDQFEDGADVIDTVMLDHGANDIGAVERIIY

SEQ ID NO: 177924 - protein, 190 aa, Oryza sativa
  unsure (1)..(190): unsure at all Xaa locations
  Clone ID: PAT_MRT4530_75530C.1.pep
KYRIVDSKGRHEVKIXPSDLVWSHLRKDRFPKLRKSKLMPHADGPFKIAEKINDNAYKLELPPGFGVSPTFNISDLKQYLGEEDELESRTTSIQEGLNDADITXHGPITRARARQLNFEVSSFLCSFLYEFDNRLLPNDYIVISNNGDDKETLGEGLRVMEDHRGCPSQGGGPIQVDFECNSEPMQFGLH

SEQ ID NO: 177925 - protein, 114 aa, Oryza sativa
  Clone ID: PAT_MRT4530_75531C.1.pep
WVNFFTGCTFLLSVVLLPFWPFWSWEALMCTRVPDLPKGSDTQRFGRSRDINRSGFLNAHALESRNRSTTSPLVITRVETGQRPKYGDAAAGQILDVNLFGQFPLTRKEFGHGT

SEQ ID NO: 177926 - protein, 120 aa, Oryza sativa
  unsure (1)..(120): unsure at all Xaa locations
  Clone ID: PAT_MRT4530_75532C.1.pep
CWTNTWSINLPPPSAAARPPRPPPVGAPPAAARPPPGPLPRHAARPPAARSISGMMGLLRQIGPPPPPFXPASAASPPPPILPLPPYRQQLDPPTDRQHPPPSPLPKSAAAVSDSCRLCL

SEQ ID NO: 177927 - protein, 1229 aa, Oryza sativa
  unsure (1)..(1229): unsure at all Xaa locations
  Clone ID: PAT_MRT4530_75533C.1.pep
RSQEQLRTLQENTQKDITEAVAKSVXDAFTKIGFLNHMERLDKRISTLTDRVAALETPSNEEVVKLKIPSFSGYYDAEKYLDWEMTVEQKYNAHLVPEQHRVRQASSEFKDFAIMWWAGLSDEGVLPTTWEELKVAMRDRFVPPSYHRDLRKKLMRLEQGDKSVQDYYGELQKGLFRFAMPAEKELQGRDHQGKSKASTYTPRTTPSAGLPKAVSFRASSQPAGKRPAASGASAAPKPFPPPRPAESGKGSTQVPAKSASYVASTGRIQCHRCQGFGHVQKDCPSQRAYVATEDGYITTSDMEEEEEEEEVEDEDGEIFGRDDTTDYRTIIVQRVLSTQIFFVINNRRARVIIDGGSCNXLVVKRFRKSKDSVDCDVVPMQACSLLLGRPWXNMIMMLHTMQVAKSVFPPKKDKLSPSSKVEGIKLKGGVMIATKCEIAEISDDDMCYFLICKQALVSLDDIASSMPPVVTNLLQEYEDVFPAEIPLGLPPMRGIEHQIDLIPGASLPNRAAYRTNPEETKEIQRQVQDLLDRWYVRQSLSPCVVPVILVPKKDGSWRMCVDYRAINNITIRYRHPIPRSDDMLDELCGSIIFTKIDLRSGYHQIRMKLGDEWKTAFKTKFGLYEWLVMPFGLTNAPSTFMRLMNEVLRPFIGRFVVVYFDDILIYSKSFDEHMDHLRAVFNALHDARLFANLENCIFCTERVSFLGYVVTPQGIEVDESKIEAIKSWPVPQTITQLRSFLGLAGFYRRFVKDFSIFAAPLNELTKKGVVFHWGKTQEQSFDTLKDKLTHAPLLQLPNFGKTFELECDASGVGIGGVLMQDGKPVAYFSEKLHGPVLNYSTYDKELYALEAHGGGLIGHFGAKKTKDVLAMHFFWPRMRKDVERTKRGRDSIFVVVDRFSKMAHFIPYHKSDDAVHIADLFFHEIVRLHGMPFTIVSDRDAKFLSHFWRTLWNKLGTKLLFSTTCQPQTDGQTEVVNCTLGTMLRAILKKNLKMWEECLPHVEFAYNRTIHSTTKVSPFQVVYGFNPCASIDILPLPTSERVHNDDKAHAEFILSMHESTKFNIEKMTEKYRIAGSKVEKINDNAYKLELPPEFGVSPTFNISDLKPHLGEEDELESRTTSIQEGEDDADITTSDTHNNPPTVIQGPITRARARQLNLEVSSFLCSSLYEFENRLLPNDYIVLWNNGGDKETLGEGLTAMEDHRGCSSQGGGPNQVDVWCNSEFRTNLH

SEQ ID NO: 177928 - protein, 527 aa, Oryza sativa
  Clone ID: PAT_MRT4530_75534C.1.pep
MDSMQTNMLHLMGLDETMKMVTKNGGVLPGPTHPVSLHAPLACAAAARPPGDGGDRTGALPVGILCDILSRLPARDAALTSALSTRWRRLWRSVPLVLADAHLKHTGPPPPPVSEIDQVDGLGGVLRRAVDGTRDVASAVSRALAAHPGALPQRPRHLLAAKGVQELVLVHQASKLDAGVRLPATLFRCSSLTCLYIGFLRFPDVATIQRAGAFPHLRELGLCSLVMGVRDLALLLDRCPVLENLEIVGHRELVRLRVASHSLRCVELCESVVEEITVEHAARLERLMFWEICGVGGVIDEDGCSINMCTKIKIGHAPNLRFLGFLVPGMHELNIGNTIIKAGTKVSPKNMVRSVRVLGIQVKLFNHNEVKMLPIFLRCFPNVETLYIQCETTIHKPPGMLNPKFLQQTGPIDCLQKHIKKVIIREFRVHRSELDFVKFIAERGQVLEKIVIVLAQSYSSSADRLHSSMRTFMASVKLANEDCKVIVCESPFPSDGTAWCFQGAFNMSKDPFDVSQCSNSGASCRAA

SEQ ID NO: 177929 - protein, 53 aa, Oryza sativa
  Clone ID: PAT_MRT4530_75535C.1.pep
LGLQWFFYHNYLVASKQNFNCQNFCFRNQFPLFLHPVVYQTSVKFYGARSRVF

SEQ ID NO: 177930 - protein, 429 aa, Oryza sativa
  unsure (1)..(429): unsure at all Xaa locations
  Clone ID: PAT_MRT4530_75536C.1.pep
NCKEGRTWNKFVINGAFVYRANRLCIPVGSVRLLLIQEAHGGGLMGHXGAKKMEDVLALHFFXPRMRKDVERFVARCTTCQKAQSRLNPHGLYMPLPVPSIPWAYISMDFILGLPRTKRGRDSIFVVVNRFSKMAHFIPCHKSDDDVHIADLFLHEIVRLHGMPSTIVSDRDAKFLSHFWCTLWNKLGTKLLFSTTCHRQTDGQTEVINRTLGTMLRAILKKKLMIERVHNDAKARAEFILKMHESTKLNIEKMTEKYRIADSKGRQEVKLEPGGLVWLHLRKDRFPELRKSKLMPRADGPFKIVEKMNDNAYKLELPPEFGVSPTFNISDLKPYLGEEDELESRMTSIQEGEDDANITTSDTHINPPTVIQGPITSARVRQLNLEVSSFLCSSLYEFENRLLPNDYIVIRNNGGDKVSQLRKLPFPER

SEQ ID NO: 177931 - protein, 435 aa, Oryza sativa
  Clone ID: PAT_MRT4530_75537C.1.pep
MSLPKDGFPVSLEPIQHHCLIWNLSEFFHHRIADNKTANLQVRFLDDPRTDNPPFSVYVIHLYLVEPNNSDVTMATTDATIAHIMDEQEDIEIKYSKCWNPIRPPTTLLTSNGHRICIRPPFSARIGLICTGKISNPRRDRDAKFLSHFWCTLWNKLGTKLLFSTTCHRQTDGQTEVVYGFNPNAPIDILPLPTSERVHNDAKARAEFILKMHESTKLNIEKMTEKYRIADSKGRQEVKLEPGGLVWLHLRKDRFPELRKSKLMPRADGPFKIVEKMNDNAYKLELPPEFGVSPTFNISDLKPYLGEEDELESRMTSIQEGEDDANITTSDTHINPPTVIQGPITSARVRQLNLETEPQTEPYPLDMWKYGSALQQRPELNPYSGRGATSHNWHAPKPHRKTGFRGFERGREVYVLFHHNPTIPKCPSDMRIPKV

SEQ ID NO: 177932 - protein, 138 aa, Oryza sativa
  Clone ID: PAT_MRT4530_75538C.1.pep
MSTYFTLCSCYTEYTASLSGRCFGVGIIFAYEITLCHDDDIRVVSGSLDVVSRLRDIIIRGYILQRKGGPLMVTAQYGYSSAPVYNPKLIPWGGYSSVFSPGCMVMTGCRKELGSQGWLLEVPGGHRIEDNGISVRLR

SEQ ID NO: 177933 - protein, 625 aa, Oryza sativa
  unsure (1)..(625): unsure at all Xaa locations
  Clone ID: PAT_MRT4530_75539C.1.pep
MSGNEGEKSPQDFADCVSQEQLRTLQQNTQKDITEAVAKSVQDAFTKIGFLNHMERLDKRISTLTDRVAALETPSNEEVVSGDDDAHPEDTVYYDAEKYLDWEMTVEQKFNAHLIPEQHRVRQASSEFKDFAIMWWTGLSDEGVLPTTWEELKVAMRDRFVPPSYYRDLRKKLMRLEQGDKSIQDYYGELQKGVRRCGIVEGVEDAICRFYSGLREEIQNIVDYKEFNSVNQLFRFAMLAEKELQGRDHQGKSKASTYTPRTTPSAGLPKAVSFRTSSQPAGKRPAASGASAAPKPSPPPRPAESGKGSSQVPAKSASSVALTGCIQCHRCQGFGHVQKDCPSQRAYVATEDGYITTSDVEEEEEEEEVEDEDGEVFGRDDTTDYRTIIVQRVLSTQIFFVINNRRALVIIDGGSCNNLWLNDSGRAKVTQVCRVSFSIGSYADSVDCNVVPMQACSLLLGRPWEHDNDASHHXVAKTVFPPKKDNLSPSSKAKGIKSKGGVMLATKCDIAENSDDDMCYFLICKQALVSLDDIASSIHLVVTNLLQEYEDVFPAEIPPGLPNRAAYRTNLEETKEIQRQVQDLLDHGYVRQRLSPCAVPVILVPKKDGSWRMCVNCRAINNITI

SEQ ID NO: 177934 - protein, 160 aa, Oryza sativa
  Clone ID: PAT_MRT4530_7553C.1.pep
NLSKDRSPSGRGGRGKTHFLSHNHQRPHHYGRADMSADLTPSEELRHIYDPDANDLGIPSSLHISIPSPSSEAPREIVHGNGFIQPPAKKLEFGTLGALPLEVTSQELGINRLNTASDSQPSASASPMSLAHNPGISSNQMRNAQPYHLKDNGDFPPLSS

SEQ ID NO: 177935 - protein, 151 aa, Oryza sativa
  Clone ID: PAT_MRT4530_75540C.1.pep
MAATCHRRAREWEACDYPPDSPCKGDRGSGFTRTTQSHTVQGRSGIRFYQNNTKSQSILHTDQNIISLISDTKCAHINLTMLSTQMKEHSIDNYGEKLSCKTRDGLSEDEQSNCSIREGSEGTLCGHPEYYTIQCPTRPPHTVGGVGSKHA

SEQ ID NO: 177936 - protein, 149 aa, Oryza sativa
  unsure (1)..(149): unsure at all Xaa locations
  Clone ID: PAT_MRT4530_75541C.1.pep
MNANFTLCSCYTDYTSSLFGRCFGAGIMFAYAITLCHEDDIRVVSGSLDVVSRLQGIIIWGYMLRMRGGPLMVTTXYGYFSVRGYSPKLISWGGYSSVFSLGCMVMTGCRKELGSQGWLLEVPGGHRIEAKGRTRNNKADEWSSQNKIR

SEQ ID NO: 177937 - protein, 147 aa, Oryza sativa
  Clone ID: PAT_MRT4530_75542C.1.pep
MNAYFILCSCYTKYTASLSGRCFGAGILFAYAITLCHDDDIRVVSGSLDVVSRLRDIIIWGYILWVRGGPLMVTAQYGYSSAPVYNPKLIPWGGYSSVFSLGCMVITGCRKELGSQGWLLEVPGEHRIKEKGIHASFKGRTTIYSFE

SEQ ID NO: 177938 - protein, 129 aa, Oryza sativa
  Clone ID: PAT_MRT4530_75543C.1.pep
MSTYFTLCSCYSEYTASLSGRCFGTGIIFAYAITLCHDDDIIVVSSSLDVMSRLWNIIIWGYILRMRGGPLMVTAQYGYSSTLVYNPKLIPWGGYSSVFSSGCMIMTGCRKKLGSQGWLLEVPGGHQIE

SEQ ID NO: 177939 - protein, 129 aa, Oryza sativa
  unsure (1)..(129): unsure at all Xaa locations
  Clone ID: PAT_MRT4530_75544C.1.pep
MNANFILCSCYTDYTASLSRRCIGTGIMFAYAITLCHDDDIRVVYSSLGVVSRLRDIIIWXYMLRMRDGPLMVIAQYGYSFVRVYSPXLISWGGYSSVFSLGCMVMTGCRKELGSKGWLLEILGGHRKE

SEQ ID NO: 177940 - protein, 129 aa, Oryza sativa
  unsure (1)..(129): unsure at all Xaa locations
  Clone ID: PAT_MRT4530_75545C.1.pep
MSINFTLCSYYIEYTASLSGRCFGAGIVFAYAITLCHDDDIRVVSGSLDVVSILRDIIIXCYILRMKGGPLIVTAQHGYSFAPIYNPKLISXGGYSSVFSPGWMVMTGCRKELGSQGWLLEVPGGHRIE

SEQ ID NO: 177941 - protein, 52 aa, Oryza sativa
  Clone ID: PAT_MRT4530_75546C.1.pep
MVQGSEIKEEEEEEEAIDCSIPEPSEEVLKLWIYQQREGWIRETDRNVSNGN

SEQ ID NO: 177942 - protein, 130 aa, Oryza sativa
  unsure (1)..(130): unsure at all Xaa locations
  Clone ID: PAT_MRT4530_75547C.1.pep
MNAYFTLCSCYSEYTASLSGRCFGAGIMFAYAITLCHDDDIRVVSGSLGMVSRLXDIIIWGYMLRMRGGPLMVIAQYGYSSMRVYNPKLIPWGGYSSVFSPGCMIMTGCRKELGSQGWLLEVPGGHRIEG

SEQ ID NO: 177943 - protein, 105 aa, Oryza sativa
  unsure (1)..(105): unsure at all Xaa locations
  Clone ID: PAT_MRT4530_75548C.1.pep
MFAYAITLCHDDDIRVVSASLDVVSRLRDIIIWGYMLRMKGGSLMVTAQYGYSSVRVYNRKLIPXGGYSSVFSPGCMVMMGCRKELGRQGRLLEVLGGHRIEGIS

SEQ ID NO: 177944 - protein, 129 aa, Oryza sativa
  unsure (1)..(129): unsure at all Xaa locations
  Clone ID: PAT_MRT4530_75549C.1.pep
MNVNFTLCACYTDYTASLSGRCFGMGIVFAYVITLCHDDDIRVVSGSLGVVSRLRDIIIWGYMLRMRGGPLMATAQYGYSSACXYSPKLISWGGYSSVFSPGCMVMMGCRKELGSQGWLLEVPGRYRIE

SEQ ID NO: 177945 - protein, 116 aa, Oryza sativa
  Clone ID: PAT_MRT4530_7554C.1.pep
MATGPAGIQRRWRVPQIVGAVSFGEAQDLVAGRFFDPIEVSWKIKKWLCPAPVAGGTLEVKHSPVELMSQAEMIVLGGSRLVRAEPELDCKLEGPELVMVNMIATQIFGRNREKAK

SEQ ID NO: 177946 - protein, 122 aa, Oryza sativa
  Clone ID: PAT_MRT4530_75550C.1.pep
MVGPGGIGVLLPRSMSDGLVYELWHLVASVVVAMVEGDSKVKTLLCLPGLATVMPLGTVNLLEGVAIGVLVQLYFKGILQVSCHVTRCRCHQDPRQGDPQHVMVPFLFHHQLAALAQEYRSS

SEQ ID NO: 177947 - protein, 69 aa, Oryza sativa
  Clone ID: PAT_MRT4530_75551C.1.pep
ALLSLVWANLSSALAAIQLQSVHQCCCWQQAGYAVICGCLFPAFPSASTLHFCFAASVICFCALLCCSC

SEQ ID NO: 177948 - protein, 68 aa, Oryza sativa
  Clone ID: PAT_MRT4530_75552C.1.pep
DHGLEGITQDVKGGLEGTVESGPGQTADESAVLNIRGNHAFPPTPRIRKKHEIEPEPNKNETNGGEQA

SEQ ID NO: 177949 - protein, 136 aa, Oryza sativa
  Clone ID: PAT_MRT4530_75553C.1.pep
MSTYFTLCSCYTKYTASLSGRCFGVDIMFAYAITLCHNDDIRVVSGSLDVLSRLRDIIIWGYILRMRGGPLMVTAQYGYSSAPVYNPKLIPWGGYSFVFSPDCMVMTGCRKELGSQGWLLEVPGGHRIECRLTRIC

SEQ ID NO: 177950 - protein, 66 aa, Oryza sativa
  Clone ID: PAT_MRT4530_75554C.1.pep
MATVDLEEDAASKTEAGDGWIGGGHQAMRRLATTTSFVDLVVGGGRGRRRRQWCDHDIKWSNTVHL

SEQ ID NO: 177951 - protein, 235 aa, Oryza sativa
  unsure (1)..(235): unsure at all Xaa locations
  Clone ID: PAT_MRT4530_75555C.1.pep
GVSKMQALEELTGLTLFCQPGSFLKELGELTKLRVLVVYWKAYHARDSDEAQAEHKKSCKKIFTSSLNALDRHSLHSLDFVVFMERFLFDPWFLALQNLKRFGVESTPRMINIPSWIRLAAKLEKLELSKAYVTQNDFEMLGDLKALEYLALPCSDTRGSWLTISNHGFRCLKFAFLCNVLFMPDSMPNLKDLXIDIVLDEVGENDSVFEHLPSTLCRVNVDIIGNPPSTPRDVA

SEQ ID NO: 177952 - protein, 469 aa, Oryza sativa
  Clone ID: PAT_MRT4530_75556C.1.pep
MATTTSPLVVVLLAVVAAIAVSLVQPAFALPAGLPDIKSLTNPWSAFKNLSGCHFGDERQGLGKLKDYLWHFGYLSYPSSSSLSPSFNDLFDADMELAIKMYQGNFGLDVTGDLDAATVSQMMAPRCGVADVVNGTSTMGGGGGVRGRGLYSYFPGSPRWPRSRTTLRYAITATSQTSIDRATLSKVFASAFARWSAATTLNFTEAASAADADITIGFYGGDHGDGEAFDGPLGTLAHAFSPTNGRLHLDASEAWVAGGDVTRASSNAAVDLESVAVHEIGHILGLGHSSAADSIMFPTLTSRTKKVNLATDDVAGIQGLYGNNPNFKGVTPPATSSREMDSAGAGELSRPWRRLLDGAAGLLVGAIVWRGSVNPKVTSSSYGTSWADQWDYGSDPPPPSSSSGKRSGGGGGGGGKKGMEKTKAAAASGLRKVKEGTAHGFQWIKDKYQQKKSGGKKHGDQQSSEIAGY

SEQ ID NO: 177953 - protein, 600 aa, Oryza sativa
  Clone ID: PAT_MRT4530_75557C.1.pep
MITTSSPSSQPVRLQQRWTCRSRAASPAPLLPPPATGRRRRRRLVADSQKTAASLRVRAIAAESEQASPLPEPPPLLTEEEEEEEKMLANYVPVYVMLPLGVVTAENELEDAAGLRARLRRLRREAGVDGVMADVWWGIVEGAGPARYEWRAYRELFRVAQEEGLKVQAIMSFHACGGNVGDAVTIPLPRWVRDVGDDDPDVYYTSPGGARNHEYLTIGVDVRPLFHGRTAIQLYADFMKSFRENMGDFLDSGLIVDIEVGLGPAGELRYPSYPESQGWEFPGIGQFQCYDKYLEEDFRAAATEAGHPEWELPGDAAGEYNYTPEDTRFFAADGGTYLTEAGRFFLTWYSSKLLEHGDRVLDEANMAFLGCSLKLAAKVSGIHWWYRHPSHAAELAAGYYNVPGRDGYRPVARMLARHDGAVLNFTCAEMRDSEQPPEAMSSPERLVRQALSAAWREGVEAACENALSRHDRRGYNQMLLNARPNGVGPAGGGGAPPRRVAAVTYLRLSDELLTATNFRAFKAFVRKMHADQDCCPDPARYGRPMRPLERSGPEVAIERLLDATAPEPPYPFDGETDMSVGGGLAELIDWVFDKVEWIFC

SEQ ID NO: 177954 - protein, 172 aa, Oryza sativa
  Clone ID: PAT_MRT4530_75558C.1.pep
MAQGRAIGEDGGADVGTQDSTHGAAAGRRLALWSGREQRRQGTRRQRPHGTQRRRRRTPPPAAASASATGRDGARDEGGGWWRRRLEAELGMRRGYGSEVGFASTTEEARRQWKSVAAEEARRGGGGDGVDFFIDNGPIDHYDDLANRIHDPNGSPMPLPLSRSISDGFPVL

SEQ ID NO: 177955 - protein, 1025 aa, Oryza sativa
  Clone ID: PAT_MRT4530_75559C.1.pep
EIIFPLGATTERALHLVSLEYLNLSQNSLVDSIPTKIINLKELKSLDLSDNNLSGHIPEQIGNLVRLRSLKLNSNQLSGHIPNNLGNLAKLCFLYLQSNKLSWHIPQELGSLLNLKDLQLYDNKLIGSIPNSLGNLTELSVLSLSGNTLTGSIPNNICNLTKFSILSLWRNQLSGYISQELGKMLNLESLYLSENMLTGSIPNSLGNLTKLSFLDLSRNQLSGHIPQELGYLVDLKNLSLYDNVLTGFIPNNIGNFTKLSILSLSGNMLTGSIPNSLGNLPRLSTLSVWRNQLSGCISQELGNLVNLENLYLSENMFTGSIPNSLGNLTKLTALHIRSNQLSGSIPKEISSLMNLNILHIDQNNLSGELPLGLCAGGQLQNFTAQDNNLVGPLPTSLLNCKTLVRVRLERNQLEGDISEMGLHPNLVYIDMSSNKLYGQLSHRWGECAKLTTLRASNNRITGVIPSSMGKLSQLGRLDVSSNEIEGHIPPEIGNVVSLFNLSLANNMLQGTIPKEVGSLQNLEYLDLSSNNLSGQIHGSIENCLKLRLLRLGHNRLDGSIPVKLGMLVSLQELLDLSDNSFSGIIPSQLGALSMLEALNLSHNTLNGSIPSSFQGMISLSSLDVSYNNLEGPVPHINFLEEAPIEWFMHNKKLCGTVKALPPCDLNQKGGQGKKFKSILLGIVGAAGMSIVFIMSLVAWQCKRKKYGEQSENGVGDAKVFSVWNFEGGEACRQIFETTKYFNETHCIGTGGNGSVYRAQLPTGEIFAVKKIHMMEYDELIFKREIDALTRIRHRNIVKLFGYCSAVHGKFLVYEYMDRGSLSRYLENHNIAIELDWMRRISIVKDVANALSYIHHDCFAPIVHRDITSNNILLDQEFRACISDFGIAKVLDVEASNCTKLAGTKGYLAPELAYTTRVTEKCDVYSFGVLVFELFMGHHPGDFLLSFSMAKESTTLKDLLDARIPLPKAETASEIFRVIMAAVQCLDPNPSRRPTMQHVTRMFSTAEGPSNPDHLHVDIIIPAYYQ

SEQ ID NO: 177956 - protein, 90 aa, Oryza sativa
  Clone ID: PAT_MRT4530_7555C.1.pep
AISPPVQQKFLLGKSFSPLVDPLGHFPPPRVPGLLLERAPPKVSPPLGPPEAFKAKVPGVLEFSRNAPPPRANPPLVQLVAFPLRGGVVF

SEQ ID NO: 177957 - protein, 288 aa, Oryza sativa
  Clone ID: PAT_MRT4530_75560C.1.pep
MEILLAKAVQRAARARCQSGRNRARMTRRRHGAWGGSAPACRRHRRRLMRRQRLWAQTRFWSQRMTSEIYESIGKKLSDAVAELASFLLPSNVCPDRPPHLPLQVHRLPQEEKQLGNLLLFEGIRRWREKMKGKRGKGMKKTWQFGPKRIMEGTRRHLEKDLEPWRIIEDVQVKVEAQTKSTSGAIQSPGPVCTKTGAQVAYVLGLGRSLYVWKAKKITFPMNLFRCCITVFGPLACLDTGDNQRRRGAAIAGLKSVRVQEAGSICVATPPKSLFIRTFRKIGNSVHI

SEQ ID NO: 177958 - protein, 119 aa, Oryza sativa
  unsure (1)..(119): unsure at all Xaa locations
  Clone ID: PAT_MRT4530_75561C.1.pep
LPTISEAPSYIXKVGGAGPLXGCPAAATLEAAXGGAGIPAXGXRRGAAGGGGGXARRRRRXRTSSTRRPWRPVGAGALLSSPSPSRRFWIRAEXRXXEEVCVAVADGGVEKERKGRNYV

SEQ ID NO: 177959 - protein, 772 aa, Oryza sativa
  unsure (1)..(772): unsure at all Xaa locations
  Clone ID: PAT_MRT4530_75562C.1.pep
MSSKAGGTMEGTRRHLEKDLXPWRIIEDVQVKVEAQTKSTSGNEGEKSPQDFADCVSQEQLRTLQENTQKDITEAVAKSVQDAFTKIGFLNHMERLDKRISTLTDRVAALETPSNEEVVSGDDDAHPEDTVYDSSGYIDALATRQARLRRRLRTNRTGMGGTRHQQGNDNNHVADDPYAKVRFKIPSFWGNYDVEKYLDWEMTVQQKFNAHLVPEQHRVRQASSEFKDFAIMWWAGLSDEGVLPTTWEELKVAMRDRFVPPSYHRDLRKKLMRLEQGDKSVQDYYGELQKGVRRCGIVEGVKDAICRFYSGLREEIQNIVDYKEFNSVNQLFRLAMLAEKELQGRDHQGKSKASTYTPRTTPSAGLPKAVFFRASSQPASKRPAASGASTAPKPSPPRPGESGKGSSQVPAKSASSVASTGRIQCHRCQGFGNVQKYCPSQWAYVATEDGYITTSDVEEEEREEEVEDEDGEVFGRDDTTDYRTIIVQRVLSTYVQQHDKLQRYNLFQIFFVINNHRARVIIDGGSCKNLLSSDLVKKLGLTTRTHPHPYHIQWLNDSGRAKVTQVCRVLFSIGSYADSVDCDVVPMQACSLLLGCPWEHDNDATHHGRSNKYTFVHNGKKFILLPLTPAEIVEAESENQQVAKSVFPPKKDKLSPSSKVEGIKLKDGVMLATKCDIAEISDVDMCYFLICKQALVSFDDIASSIPPVVTNLLQEYENVFLAEIPPGLPPMRGIEHQIDLIPGASLPNHAAYRTNPEETKEIQRQVQDLLDR

SEQ ID NO: 177960 - protein, 58 aa, Oryza sativa
  Clone ID: PAT_MRT4530_75563C.1.pep
TIICQKGFIFTRIILPGEEALARKCPKGGNNPRRGCWPRSLQAWLLHVDPSPNLSPAT

SEQ ID NO: 177961 - protein, 1026 aa, Oryza sativa
  unsure (1)..(1026): unsure at all Xaa locations
  Clone ID: PAT_MRT4530_75564C.1.pep
MEGTRRHLEKDLEPWRIIEDVQVKVEAQTNSTSGAIRSPGPVCTKTAAQVAYVLELGRNEGEKSPQDFADCVSQEQLRTLQENTQKGITEAVAKSVQDAFTKIGFLNHMERLDKRISTLTDRVAALETPSNEEVSGDDDAHPEDTVYDSSGYIDGPATRQARLRRRLGTNRTGMGGTRHQQGNNNRVPDDPYAKMTVEQKFNAHLVPEQHRVRQVSSEFKDFTIMWWAGLSDEGVLPTTWEELKVAMRDRFVPPSYHRDLRKKLMRLEQGDKSVQDYYGELQKGVRRCGIVEGVEDAICRFYSGLREEIQNIVDCKEFNSVNQLFQFAILAEKELQGREQQGKNKASMYTLCTTPSVGLPKAVSFRALSQPVSKRPAAFGASATPKPSPPRPAESGKSSSQVPAKSASSVASTGRIQCHRCQGFGHVQKDCPSQRAYVVTEDGYITTSDVEEEEEEEEVEDEDGEVFGRDDTMAYRTIIVQRVLSTQIFFIINNRRARVIIDGGSCNNLVSFDLVKKLGLTTRTHPHPYHIQWLNDSGRXKDSVDCDVVPMQACSLLLGRPWEHDNDATHHEXTLLPLTPAEIVEADKERAASLKVDESENQQVAKSVFPPKKDKLSPSSKVEGIKLKGGVMLATKCDIGDISNDDMCYFLICKQALVSLDDIASSIPPVVTNLLQEYEDVFSAEIPPGFPPMRGIEHQIDLIPGASLPNRAAYRTNPDETKEIQWQGIEVDESKIEAIRSWSVPQTITQVRSFLGLAGFYHRFVKDFSTFAAPLNELTKKGVVFHWGKTQEKSFDTLKDKLTHTPLLQLPNFGKTFELECDASGVGIGGVLMQDGKPVAYFSEKLHGPVLNYSTYDKELYALVRSLETWRHYLWPKEFVIHSDHESLKYLRSQNNLNRKHAKWVEFIESFPYVIKHKKGKDNVIADALSRRYTFLSQHDCRIFGLESIKEQYALDPDFNEVMLNCKEGLTWNKFVINGGFVYRANRLYIPVGSVRLLLIQEAHGGGLMGHFRAKKTEDVLAMHFF

SEQ ID NO: 177962 - protein, 1632 aa, Oryza sativa
  unsure (1)..(1632): unsure at all Xaa locations
  Clone ID: PAT_MRT4530_75565C.1.pep
MLILKTRCMIPVAWLRRRLRTNRTGMGGTRHQQGNNNDRVPDDPYAKVKFKIPSFLGYDDAKKYLDWEMTVEQKFNVHLVPEQHRVRRASSEFKDFAIMWWAGLSDEGVLPTTWEELKVAMRDRFVPPSYHRDLRKKLMRLEQGDKSVQDYYGELQKGVRRCGIVEGVEDAICRFYTSLREEIQNIVDYKEFNSVNQLFRFAMLAEKELQGRDHQGKSKASTSTPSAGLPKAVSFRASQPAGKRPAASGASAAPKPSPPPRPAESSKGSSQVPAKSASSVTSTGRIQCHRCQGFGHVQKDCPSQRAYVATEDGYITTSDMEEEEEEEEVEDEDGEVFGRDDTTDYRTIIVQRVLSTQVQQHDRLQRHNLFXIFFVINNCRARVIIDGCSCNNLVSSDLVNKLGLTTCTHPHPYHIQWLNDSGRAKVTQVCRVSFSIGSYADSVDCDVVPMQACSLLLGRPWEHDNDATHHGRSNKYTFMHNGKKITLLPLTPAEIVEADKERAASLKVDESENQQVAKSVFPPKKDKLSPSSKVEGIKLKGGVMLATKCDIGDISNDDMCYFLICKQALVSLDDIASSIPPVVTNLLQEYEDVFPAEIPPGLPPMRGIEHQIDLIPGASLPNRAAYRTNPDETKEIQWQVQDLXDRGYVRQSLSPCPVPVILVPKKDGSWRMCVDCRAINNITIRYCHPIPRLDDMLDELCGYIIFTKIDLRSGYHQIRMKLGDEWKTAFKTKFGLYEWLVMPFGLTNAPSTFMSLMNEVLRPFIGRFVVVYFDDILIYSKSLDEHMDHLRAVFNALRDARLFANLEKCIFCMERVSFLGYVVTPQGIEVDESKIEAIRSWSVPQTITQVRSFLGLAGFYHRFVKDFSTFAAPLNELTKKGVVFHWGKTQEKSFDILKEKLTHAPLLQLPNFGKTFELECDATGVGIGGVLMQDGKPVAYFSEKLHGPILNYSTYDKELYALVRSLETWRHYFWPKEFVIHSDHESLQYLRSQNNLNRRHAKWVEFIESFPYVIKHKKGKDNVIADALSRRYTFLSQLECRIFGLESIKEQYALDPDFNEVMINCKEGRTWNKFVINGGFVYRANRLCIPVGSVRLLLIQEAHGGELMGHFGAKKTEDVLATYFFWPRMRKDVDRFMARCTTCQKAKSHLNPHGLYMPLPVPSIPWADISMDFVLGLSRTKRGRDSIFVVVDHFSKMAHFIPCHKSDDAVHIADLFFHEIVRLHGMPSIVSDRDAKFLSHFWRTLWNKLGTKLLFSTTCHPQTDGQTEVVNRTLGTMLRAILKKNLKMWEECLPHMEFAYNRATHSTTKVSSFQVVYGFNPRAPIDMLPLPTSERVHNDAKARAEFILKMHESTKFNIEKMTEKYRIAGSKSRQEVKLEPGDLVWLHLRNDRFPELRKSKLMPRADGPFKIVEKINDNAYKLELPPEFGVSPTFNISDLKPYLGEEYELESRTTSIQEGEDDADITTSDTHNNPPMVIQGPITRARARQLNLEVSSFLCSSLYEFENRLQPNDYIVLRNNGGDKETLGEGLRAMEDHRGRPSQGGGPNQVDVGCNSESRTRISLLGEVIRVSTRVITRGDVVLRLRGSRACAFKKPDRFVSRLCPNRCLSEPFGRSGTLAHIKWYESSRFTV

SEQ ID NO: 177963 - protein, 555 aa, Oryza sativa
  Clone ID: PAT_MRT4530_75566C.1.pep
MSLATSSSMAGGAAVVPRSATATTASAFVTMKRRATAVRAVHAAEPSKNPPVGVPSAAKTSSPSVAAPEKAPVAAAPAPVAPAPAATKQVAPARWAVDSWRTKKALQLPEYPNAAELEAVLKTIEAFPPIVFAGEARHLEERLADAAMGRAFLLQGGDCAESFKEFNGNNIRDTFRVLLQMSAVLTFGGQMPVIKVGRMAGQFAKPRSEAFEERDGVKLPSYRGDNINGDAFNEKSRIPDPQRMVRAYAQSAATLNLLRAFATGGYAAMQRVTQWNLDFTQHSEQGDRYRELAHRVDEALGFMSAAGLTVDHPLMTSTDFWTSHECLLLPYEQSLTRQDSTTGHFYDCSAHMLWVGERTRQLDGAHVEFLRGVANPLGIKVSDKMNPTELVKLIEILNPSNKPGRITIITRMGAENMRVKLPHLIRAVRHAGQIVTWITDPMHGNTIKARYRTHCDPRLTILAEVRAFFDVHDKQGRSPGGVHLEMTGQNVTECFCTSETGDFDGNGEGYHTHCDPRLNASQSLELSFIIAERLRRKRIRSSKLNNMLPLPPFGV

SEQ ID NO: 177964 - protein, 51 aa, Oryza sativa
  Clone ID: PAT_MRT4530_75567C.1.pep
QHHVKQNHSPTETKPHTKLFAVNFSLTGWKQFYLDHTHSQRSNFIKHFWGA

SEQ ID NO: 177965 - protein, 236 aa, Oryza sativa
  Clone ID: PAT_MRT4530_75568C.1.pep
MATDGHITHFAHPQHLLLKTRYDSTSRHVCDICRAKLSGLVGYRCNACDFDIHQACADYFKKTISFFAHPWHTLTLSSIPDGSTTWSCDLCRENCPRGNFVYRCIQCAFDVHPLCILLPQTIRSPLHQQHDIHMVPSWGRCSACREDLDLWYYQCGFCLFKLHIRCVSGAPSGVEPCTSNAAIRTTSDAQSIAIVRRSCSSGITKFLVKKSFMVAINLATGGLASPVLDVLEAVLD

SEQ ID NO: 177966 - protein, 90 aa, Oryza sativa
  Clone ID: PAT_MRT4530_75569C.1.pep
MAPHATESQWHATVVRPDSGAYAEELGRATAAPMRRGAWPEEPRRPSSRERLPTATGAIGRRRESRKEEENVATKIYRRKATEKFTCCCV

SEQ ID NO: 177967 - protein, 376 aa, Oryza sativa
  Clone ID: PAT_MRT4530_7556C.1.pep
MSTESQDNSSHSDESITSEKLDDMTWEEINDPMEAQLEARLEAQLEARLMAHLAGSSNQLGGYTRRYISRDHEDDHNRLFAKYFSESPLYTDDQFRRRFRMRRHLFLRIVQALGVWSPYFRLRRDAFGKVGLSPLQKCTAAMRMLAYGTPADLMDETFGVAESTTMECMINFVQDLWIWHAFFGAAGSNNDINVLDQSPLFTEMIQGRAPPVQFTINGTQYNMGYYLTDGIYPEWAAFAKSITRPRSAKHKLYAQRQESARKDVERAFGVLQKRWAIIRHPARIWEREELADIMYACIILHNMIVEDERGSYDIPDDNTYEQGQYSPQMTGLDHGPIYGFQEVLEQNKAIHDRQTHRRLKGDLIEHVWQKFSGQQQ

SEQ ID NO: 177968 - protein, 72 aa, Oryza sativa
  Clone ID: PAT_MRT4530_75570C.1.pep
MEKPLFELSAPRGEFYEPPPSSEPIYTTGYEIHPELISMDTALPAATAPAWLAAAPAQPLLLPGQPPPLPPG

SEQ ID NO: 177969 - protein, 129 aa, Oryza sativa
  unsure (1)..(129): unsure at all Xaa locations
  Clone ID: PAT_MRT4530_75571C.1.pep
TNASFTLCXCYTEYTASLYGRCFGAGIMFAYAITLCHDDDIIVVSGSLGVVSRLWDIIMWGYMLRMRGGPLMVTAQYGYSSARVYNPKLISWGGYSSVFSPSCMVMTGCRKELGSQGWLLDVLGGYQIE

SEQ ID NO: 177970 - protein, 129 aa, Oryza sativa
  unsure (1)..(129): unsure at all Xaa locations
  Clone ID: PAT_MRT4530_75572C.1.pep
MSTYFTLYSCYTEYTASLSGRCFTAGIMFAYAITLCHDDDIRVVSGNLGVVSRLRDIIIWGNILRIRGGPLMVTAQYRYSSAPIYNPKLIPWGGYSSVFSPGCMIMTGCRKELDSQGXLLEVPGGHRIE

SEQ ID NO: 177971 - protein, 49 aa, Oryza sativa
  Clone ID: PAT_MRT4530_75573C.1.pep
MERQAVRSGGAVVDGHNLWSRRAVIFKREGCRAELQRTCQRPLDVRAAC

SEQ ID NO: 177972 - protein, 103 aa, Oryza sativa
  Clone ID: PAT_MRT4530_75574C.1.pep
TNFRQEARHAPAVSDPSGALVRRRRRRRRASVGGAAPRRPGRSAASYARRPHTSYYRRPGRAGTGREGIRTEPPLRPARGLGRGFLGADGARGRCSRKCLSGD

SEQ ID NO: 177973 - protein, 127 aa, Oryza sativa
  unsure (1)..(127): unsure at all Xaa locations
  Clone ID: PAT_MRT4530_75575C.1.pep
MNANFTLCSCYTDYTAXSLSRRCFGTGIVFDYAITLCHDDDIRVVSGSLGVVSRLHDIIIWGYMLRMRGGPLMVTAQYGYSSARVYYPKLISWGGYSSVFSPGCMVMTGCRNELDSQGWLLKVPGGH

SEQ ID NO: 177974 - protein, 129 aa, Oryza sativa
  unsure (1)..(129): unsure at all Xaa locations
  Clone ID: PAT_MRT4530_75576C.1.pep
MNANFTLCSCYTDYTGSLSGRSIGTGIMFAYAITLCHDDDIRVVSGSLGMVSRLRDIIIWGYMLRMRGGPLMVTAQYGYSSARVYSPKLVSWXGYSSVFSPGCMVMAGCRKKLDSQGWLLEVLGGHRKE

SEQ ID NO: 177975 - protein, 80 aa, Oryza sativa
  Clone ID: PAT_MRT4530_75577C.1.pep
NSDKDISRVLAKPKIEPNKVKDRKSTPFKVRNSGVWVQVPSRSGMKNESPSTSTGIGGFPGDTEENVEDIPVCLSNLKIR

SEQ ID NO: 177976 - protein, 129 aa, Oryza sativa
  unsure (1)..(129): unsure at all Xaa locations
  Clone ID: PAT_MRT4530_75578C.1.pep
MNANFALCSCYTDYTASLSGRCISTGIAFAYAITLCHDDDIRVVSGSLGVVSRLRDIIIWXYMLRMRSGPLMVTAQHGYSSARVYSPKLISWGGYSFVFSPGCMVMTGCREELGSQGWLLEVPRGHRIE

SEQ ID NO: 177977 - protein, 140 aa, Oryza sativa
  unsure (1)..(140): unsure at all Xaa locations
  Clone ID: PAT_MRT4530_75579C.1.pep
MSTYFTLRSCYTEYTASLSGRCFGAGIVFAYAITLCHDDDIRVVSGSLDVVSRLXDIIIWGYILQMRDGPLMVTPQYGYSSAPIYNPKLISXEGYSSVFSPGWMVMTGCRKKLGSQGWLLEVPGGHRIEARGNRPSGTPC

SEQ ID NO: 177978 - protein, 47 aa, Oryza sativa
  Clone ID: PAT_MRT4530_7557C.1.pep
QGIQFHKGKQTSKENMRCFGQMRQGIKQLSHAWCIDILLPLKNIVDN

SEQ ID NO: 177979 - protein, 49 aa, Oryza sativa
  unsure (1)..(49): unsure at all Xaa locations
  Clone ID: PAT_MRT4530_75580C.1.pep
IHCPSFKTLWPGKTWALPNXFPLKKIPFSPVGLIAKRPAPFPFPKIAPT

SEQ ID NO: 177980 - protein, 69 aa, Oryza sativa
  Clone ID: PAT_MRT4530_75581C.1.pep
MLAANAHAPLVPATVPVFASPRATAQRRLERHARWMRRVAMGGAVRLWLEVVCVLAWVTLGHSGQQHSD

SEQ ID NO: 177981 - protein, 150 aa, Oryza sativa
  unsure (1)..(150): unsure at all Xaa locations
  Clone ID: PAT_MRT4530_75582C.1.pep
MNANFTLCSCYTDCTASLFGRCIGTGIVFAYAITLYHDDDIRVVSGSLGVVSRLRDIIIWGYMLWMRGGPLMVTAXYGYSSVRVYSLKLISCGGYSSVFSPGCIVMTGYRKELDSQEWLLEVPGVHRIEDQSDRPSGRSDRTSDCRLDRH

SEQ ID NO: 177982 - protein, 145 aa, Oryza sativa
  Clone ID: PAT_MRT4530_75583C.1.pep
MSTYFTLCPCYTKYTASLSGRCFGAGIMFAYAITLCHDDDIRVVSSSLDMVSRLRDIIIWGYILRMRGGPLMVTAQYGYSSSPVYNPKLISWEGYSSVFSPGCIVMTGCRKELGSQRWLLEVPGGHRIEGIRKYDLHVCLLFMYC

SEQ ID NO: 177983 - protein, 90 aa, Oryza sativa
  Clone ID: PAT_MRT4530_75584C.1.pep
SDARPGDDDDLSANLRAIRADPAPVAVSSAQADLVETTVSGLVLSYDVRSDRGDMANGAEEGGGGEQLLAEHRRDERGHHVHKQRLRADV

SEQ ID NO: 177984 - protein, 60 aa, Oryza sativa
  Clone ID: PAT_MRT4530_75585C.1.pep
APLDLYGNNFPLGVTFGTALRACLLALMNYLLSPRPPLVGPCNSLFVVYSFIKLKTNYPL

SEQ ID NO: 177985 - protein, 153 aa, Oryza sativa
  Clone ID: PAT_MRT4530_75586C.1.pep
MNANFTLCSCYTDYTASLSGRCIGMSIVFSYAITLCHDDDIRVVSGTLGVVSRLRDIIIWGYMLRMRCGPLMVTAQYGYSSTRVYSSKLISWGGYSSVFILGCMVMTGCRKELGSHGWLLEVPGGHQIEEKGEPPFPYWTSLLGRLGIFLSRC

SEQ ID NO: 177986 - protein, 123 aa, Oryza sativa
  unsure (1)..(123): unsure at all Xaa locations
  Clone ID: PAT_MRT4530_75587C.1.pep
FTLCSCYIEYTASLSGRCFGAGIMFAYAIALCHDNDIRVVYGSLGIVFRLWDIIIWGYILRMRGGPLMVTAQYGYSSAPIYNPMLIPWGGYSSVFSPGCMVMMGCRKELGSXEWLLEVPGGHR

SEQ ID NO: 177987 - protein, 181 aa, Oryza sativa
  unsure (1)..(181): unsure at all Xaa locations
  Clone ID: PAT_MRT4530_75588C.1.pep
MRMPSRCMAAACGRTVRRRRRRLGAAAEAGQHPAASPAPASAFAAAGPYGVARPRRSGSWAAAVPLAASSGAARLGGARRPDKGGAGGWHRSRSGSVSGIGAXPRWQCKGSWRRGXEAQAAEAMPPSPRFSFGQIWRGGRWVVERRGPGSALRDGGSMKSADGGASVRVWRKPCAADVQMS

SEQ ID NO: 177988 - protein, 444 aa, Oryza sativa
  Clone ID: PAT_MRT4530_75589C.1.pep
MAYGGGAAFGRRDDQGVSKTGEGVVTNVSKPAMPECGGSGSEGTGNGGEEVRQKGVQVTEAIAPGDHGPGKGRPGRPAAGGQLAHRTLPRPQKEKWAEGPKSLEHAASGRPATFESCRPRGAEEWARPVQREAEGQPALRFGHMCPERRRHCRRRCRPRSRCVDSDFCCCRRHLVCCRRLDLGSRTPWRAIHEGGGGVGGADKLLVGDGVAELTASVSHSLETSTVVVHAEVTLDERVKFSREVDGALFLVAEEHLLEGETDEACVTIRLNDGLQEVEDDGDKHLDIENRHRLGMKGIDSVRGWQSAPGHGAGGLFVLGLSAANRLAWSAGEEEPRPMGGCVVALAGGSPRVARRAAASTVTVVGKVELDAVATVSLIGVMTRAEITAWTALAVAAEVASMRAVAAARSSGEAESSGRRTCRMAEVAASVMEATAAISHQGDMF

SEQ ID NO: 177989 - protein, 491 aa, Oryza sativa
  Clone ID: PAT_MRT4530_7558C.1.pep
MGPGTWRKAYGALKDSTKVGLANFNSEYKDLDIAIVKATNHVECPPKERYLRKILFATSANRPRSDVGYSICTLARRLSKTKNWIVALKTLIVIHRLLREGDGTFKEDFLNYSYRGTILQIPQFKDDSSPLDERVECFRILKYDVEADRLVKLPQASGKPEGAACTNYLVQYALALVLKESFKIYCSINDGIINLVDMYFDMQKYDAIKALEIYKRAGYQAEKLSAFYEHCKRLELARTFQFPTLRQPPPSFLITMEEYIREAPRVSIASKSLESEEQNSPSDNEDEAPQETEKPVDEEEQEPSEPEEEPQPTAESVEGTEPVPLATTGDLLNFDEEVNPLIANIEESNALALQLWHQAGGFDKLLLDSLYEDEARRQQIASATYNGSVAGNPFDPNDPFAMSNNFAPPSNVQLAMMQQQHQDYQEQQQQYYQIQQQQQMVTLPPQTYHQQQQTQYSALPSHDGLSNPFGDPFGGLVAMANPPKQNNSNLV

SEQ ID NO: 177990 - protein, 189 aa, Oryza sativa
  unsure (1)..(189): unsure at all Xaa locations
  Clone ID: PAT_MRT4530_75590C.1.pep
LIFFAAAEYVIGNGENTMFLTSNWLGKGCIARQWPILLYTYVSRSNLTVAQALVQHTLSNEAIGEFFHIWDEVQRLSLTSEADRIKWKLTGDGSFPAVSSAYELFFMATEICPLGELVRHSRAPSRVRFFMWLALQGKCLTADNLXKQNWPNDELCPLCRREDEDCHHLFVTCPYSNAVWRSLRSSGQD

SEQ ID NO: 177991 - protein, 164 aa, Oryza sativa
  Clone ID: PAT_MRT4530_75591C.1.pep
MEEQPQALFQQCLEMSSQHGNNGEQILHMQMFCGIFSATARAVKAGHGALECAVCLAEFVDDGEKLCLLPGCCHVFHTACIDVWLAAHVTCPVCRADLADRAVAAAGHVLAADQAAPQVGEHGHHARDRIKRAVGFGGIADNVGGASEPVMVAAAPCIVQATLE

SEQ ID NO: 177992 - protein, 156 aa, Oryza sativa
  unsure (1)..(156): unsure at all Xaa locations
  Clone ID: PAT_MRT4530_75592C.1.pep
TVNNGICVRFGEEGRRSTRICFVLLQEIRXCFLETHRIIRCVEXAWSPDKLDMTYPVRLRGVXDLEGALIKRCXYLYIKRAAASKQYTRNQYRVCLLLCSAPSLIVYSILLTGHRESXVTGIFAFDVLHWEKATIRFLGSALRDCLLLVHNSSSST

SEQ ID NO: 177993 - protein, 81 aa, Oryza sativa
  Clone ID: PAT_MRT4530_75593C.1.pep
ARRALAFRRRRRRQRQRGGETVKTVRDGARNEGRRRHRRRRERRPRGHPPPLPHHLDCSVHRPLHPVHPPRHSLLHAVLPT

SEQ ID NO: 177994 - protein, 44 aa, Oryza sativa
  Clone ID: PAT_MRT4530_75594C.1.pep
KKKPLLCPNKNTPPPPGCPINKKNWPDRFSHLKLANLVSPIIYK

SEQ ID NO: 177995 - protein, 452 aa, Oryza sativa
  Clone ID: PAT_MRT4530_75595C.1.pep
MIATRNMAQHAAASPEPEPTLPRLGNLAPPPRQPPPPAPAPAMDGRTETSPSSSCPAYFRWIHEDLRPWRDAGITREALARARVTASFRLLVLGGRAFVHRFRPAFQTRDLFTIWGVLQLLRRYPGRVPDLDLMFDCADWPVVRTHLYRGKHAAFMPPLFSYCGDDRTLDIVFPDWSFWGWPEINIKPWDALRQDLKDGNNRVKWLDRVPYAYWKGNPAVAVTRQELVNCNVSTTKDWNARIYKQDWFRESKAGYKDSNLGSQCTHRYKIYIEGSAWSVSQKYILACDSMTLLVTPRYYDFFSRSLMPIQHYWPVHNDNKCDSIKYAVDWGNSHKQLAQRIGKQASDFIEEDVNMDRVYDYMLHLLTEYAKLLRFRPIKPPEAVEICPDSLACQAEGLEKKFLMESMVKSARDAGPCDLPPPFNPQELAMIKRRKDNSIKQIQTWERISGRA

SEQ ID NO: 177996 - protein, 912 aa, Oryza sativa
  Clone ID: PAT_MRT4530_75596C.1.pep
MPSTSKCNRISRVADEEEEEEIVAVSSDADESESESEVGSGAEEEDDDYVGESSDSAGGSGSGSGDGDGDEEGGRSDIGDGEGEGGGRRVRSACRGVRANDRERKSQNVDALVRGNLVVRRQPLIPRILSVSDAAAIARKPFKPPCQNGYSENNEQLARRLSARKRFVPWGSVQPFAVTNILPQSPAVSSDDSVENEESLPPGIEPLILWQPEGRDKENSNFSAIKVDHLLVRYLRPHQREGVQFMFDCVSGLLNDDGISGCILADDMGLGKTLQSITLLYTLLCQGFDAKPMVKRAVVVTPTSLVSNWESEIIKWLKGRVQLLALCESTRADVLSGIESFLKPLSRLQVLIVSYETFRMHSSKFERPGSCDLLICDEAHRLKNDQTLTNKALAALPCKRRILLSGTPMQNDLEEFFSMVNFTNPGVLGDATYFRRYYEAPIICGREPTASAEEKNLGSERSAELSAKVNLFILRRTNALLSNHLPPKIVEVVCCKLTALQTALYNHFIHSKNVKRLISEGTKQSKVLAYITALKKLCNHPKLIYDTIKSNNSGGSGFDDCLRFFPPELFSGRSGFVTLDLFAQLCRERRYPYIRLDGATSINKRQKLVNQFNDPSRDEFVFLLSSKAGGCGLNLVGGNRLILFDPDWNPANDKQVYQRQMSKEGLQKVIQQEQADGKMQGSSLSTEDLRDLFTFHEQIRSEIHENLKCNRCNKDGCMVLDGSKFDSAATEHEASNSGENSYIDIGGFGAISGCVQKMNSSNQQIGSPSEEDLGSWGHHSDPSTVPDTILQCSSGDEVSFVFTNQIDGKLVPVESMARAATHRTHEVTVNAEKEVGKINSSNVPGTERQSLLGKNLKMMGFNLKNSSMKFPTKSRRMLPNCLQGMNKTSTSSDHQQTKKLHVISDASDDDFV

SEQ ID NO: 177997 - protein, 933 aa, Oryza sativa
  Clone ID: PAT_MRT4530_75597C.1.pep
MAGLGRSSRGASGKRGAASSSSSSSVSSSSAAASACVYYATTAVLVTLCVAGAYFLTSASSASLAGSVVDGDGGGGGGGGGTVTTTYRHTTRSSFAYEVSRPERKAPPAPPRDVERVDDAAAARGRIADEEGAEEEHGDGDDDPRGKPDLDDHGADEEETKSAVAAMDDAQRREEDGSVSSSEANAEEEEAAATTGARRVRVGEDEEEAAREESQELHLQMPLGESRPRAAAAVEEKSLDGGVEEESNAGQRQREEEQIDHGVDGGASLRREAQEEGQIGEGYVMADHGEGEEMLLEQQQQQPEEERGGDAEAARTSESDAGGEVDPEDKPTVSERTEEMVDTLPGEEDRAEVSATGVDEQNAWATQADHSHQEKDRRDEAAGVDDNIADATAGGGGGGEEPEWRLCNVKAGPDYIPCLDNDKAIKKLRPENYRRYEHRERHCPDEGPTCLVPLPAGYRRPIEWPKSRDRVWYSNVPHTKLVEVKGHQNWVKVSGQYLTFPGGGTQFIHGALHYIDFLQQSARGIAWGKRTRVVLDVGCGVASFGGYLFDRDVVAMSFAPKDEHEAQVQMALERGIPAISAVMGSKRLPFPSKVFDLVHCARCRVPWHADGGALLLELNRVLRPGGFFVWSATPVYQKLTEDVQIWKAMTALTKSMCWELVAIKKDRLNGIGAAFYRKPTSNECYETRRRQQPPMCSDDDDADVAWYIRLNACMHRVPVAPSDRGVAWPAEWPRRLRAPPHWLNASRAGVYGKPAPEDFAVDYDHWRRVVDRSYLNGLGIDWSRVRNVMDMRATYGGFAAAMRDHKIWVMNVVNVDAADTLPIIFERGLIGMYHDWCESFSTYPRTYDLLHADRLFSKIKERCAVLPVVVEVDRIVRPGGSIVVRDDSGAVGEVERLLRSLHWDVRLTFSKNGEALLYAEKSDWRPELLADPL

SEQ ID NO: 177998 - protein, 277 aa, Oryza sativa
  Clone ID: PAT_MRT4530_75598C.1.pep
PRVRKSPRPPPPRLRARCSASAASPAPSPAASPATSPRAPRRRRGPRGRCSSCRRWTGPGRRRSRARRSTPTTRRASPTSPSPPASSTPASATTPSPRCSARSPRTSAPRAATASSPSASTTPATTSPPSAAAAASRCASGPSTASTATAPKATSPAASTSARRAAAASSSSAPCSISPRCPTMSSSPSPSPRTTPPGLRSPASSPTRRSPASSAQSRPRPSASPRHRASPSSSSPSASSCPSLSPSTTAARGRSSPAAPSARRTAAASSSSAPRSS

SEQ ID NO: 177999 - protein, 73 aa, Oryza sativa
  unsure (1)..(73): unsure at all Xaa locations
  Clone ID: PAT_MRT4530_75599C.1.pep
SIPRPIVFFTXVCLFLLCDGSLAQRLLGQSTSQWQSSLSWKSRGCRFDRXXAFEPIRSVRSQAGXTTEFFRVL

SEQ ID NO: 178000 - protein, 65 aa, Oryza sativa
  Clone ID: PAT_MRT4530_7559C.1.pep
IIGGNILSPYSPLISSEAFCSRLATKRWIQHPKQPLVILRHSLIDMSSEVLQTKILLFYECYPTW

SEQ ID NO: 178001 - protein, 146 aa, Oryza sativa
  Clone ID: PAT_MRT4530_755C.1.pep
MTSARRPARVDELAGARDIGGGVGGHQRVEGNEANPLVLTTTPKDARRRPATKKKAAAARVDDVEGAPVVGGENEGAAELLHTTAHLMAVAATKGDGGDGGATRPKMAGGGGGLRARGGDATGHERARERGQTEEEITRKLYMSSD

SEQ ID NO: 178002 - protein, 87 aa, Oryza sativa
  Clone ID: PAT_MRT4530_75600C.1.pep
DKCGNWDRADASQCVKKGTSSGVRIPEAKKSHFEEAAPGEDNRTCKGGSRCSCTHCTRGQRGNYLTEHSPTASHLPELGHNTNHRYE

SEQ ID NO: 178003 - protein, 61 aa, Oryza sativa
  unsure (1)..(61): unsure at all Xaa locations
  Clone ID: PAT_MRT4530_75601C.1.pep
EHHPSYHSRHVTRHTGPLXHTTTHTDTLHTRHTPTHDTTHGTTTYLRGTHTGTTCGXLHHM

SEQ ID NO: 178004 - protein, 903 aa, Oryza sativa
  unsure (1)..(903): unsure at all Xaa locations
  Clone ID: PAT_MRT4530_75602C.1.pep
MGIINNTHIRDGNGPETRQSGGCVVDSAGLDGGNLHFYCYTLEFDGGLIVVGGRLPVKEAALRQMVGWVGHWVLTVFRIWDSEFSKFNILDLHELINKSIPLSFMEASSWLCYQARGFGSSRVWLWLLLALVLLNCSLVLSASPYLVGMGSFDITGPAADVNMMGYANTEQIASGIHFRLKSRAFIVAEPNGKRVVFVNIDACMASQIVTIKVLERLKARNIEEPRCPHVHWYGDLYNENNNNVAISGIHTHAGPGGYLQYVVYIVTSLGFVRQSFDVIVDGIEQSIVEAHNNLRPGKIFVNKGDLLDAGVNRSPSAYLNNPAEERSKYEYNVDKEMTLIKFVDDELGPVGSFNWFATHGTSMSRTNSLISGDNKGAAARFMEDWAEQMGLPKQSAHANSDDLRSLHKTSVLPRRVSTIIPEPNEITDDLIQLASSYEAXGGRRLAGSSITRRIRSTQQNKPKFVSAFCQSNCGDVSPNVLGTFCIDTNLSCDFNHSTCNGKNELCYGRGPGYPDEFESTRVIGNRQFLKARDLFDSASEEIQGKIDYRHTYLDFSKLEVKVSTSAGGQQTVKTCPAAMGFAFAAGTTDGPGAFDFRQGDVKGNPFWKLVRNLLKTPGKDQVECHSPKPILLDTGEMKEPYDWAPAILPVQMIRIGQLVILCVPGEFTTMAGRRLRDAVKTVLTSGNSEFDKNIHVVLAGLTNSYSQYITTFEEYQIQRYEGASTLYGPHTLSAYIQEFQKLAMAMIANKEVPTNFQPPDMLDKQIGLLPGVVFDSTPLGVKFGDVNSDVPGNSTFNKGSTVNATFYSACPRNDLLTDGTFALVEKLDGNNNWVPVYDDDDWSLRFKWSRPARLSSRSFATLEWTVPEDAAAGVYRLRHFGASKPMFGSVRHFTGTSRAFAVR

SEQ ID NO: 178005 - protein, 152 aa, Oryza sativa
  Clone ID: PAT_MRT4530_75603C.1.pep
TAHRFLFLTATMAWKNSKLSASTVAVALVALTVVVGGPNDFVGAVNKGILQITLARMYVALNTVRGEVITDRLRGDPPSWCACRDALPAPGEPLGRDSMGTLLTPAVPPPAGRGPPPWRATRMNGRGPPPPSGGGRTGPAPPAGSPTPTGAA

SEQ ID NO: 178006 - protein, 129 aa, Oryza sativa
  Clone ID: PAT_MRT4530_75604C.1.pep
MSTYFIICSCYAEYTASLSGRWFGAGIMFAYAIALYHDDDIIVVSGNLGVVSRLRDIIIWGYILRMRGGPLMVTTQYGYSFAPIYNPKLIPWGGYSSVFSPDCMVMTGCRKELGNQGWLLKIPGGHHIE

SEQ ID NO: 178007 - protein, 134 aa, Oryza sativa
  Clone ID: PAT_MRT4530_75605C.1.pep
MNASLVLCSCYTDYTASLSGRCIGTGIMFAYAITLCHDDDIRVVSGSLGMVSRLRDIIIWGYMLPMRGGPLMVIAQYGYSSVCVYSPKLISWGGYSSVFNPGCMIMTGCRKELDSQGWLLEVPGGHRVEEVYKL

SEQ ID NO: 178008 - protein, 133 aa, Oryza sativa
  unsure (1)..(133): unsure at all Xaa locations
  Clone ID: PAT_MRT4530_75606C.1.pep
MNANFTLCSCYTKYTASLSGRCFAAGIMFAYAITLCHDDDIRVVSGSLDVVCRLRDIIIRGYMLRMRGGLLMVTAQYGYFXARVYNPKLIPWGEYSSVFSPGCMVMTSCRKELSSQVWLLEVLGGHRIEVFST

SEQ ID NO: 178009 - protein, 589 aa, Oryza sativa
  Clone ID: PAT_MRT4530_75607C.1.pep
MAALGRASSSAPVLAAAAAAAVLLSLCLAALSEEQEQLENLRFVRHAQDAPLVSSYNYIVIGGGTAGCPLAATLSEHSRVLLLERGGLPYANMSSEQHFTDALADTSPASPAQRFISEDGVVNARARVLGGGSCLNAGFYTRASNEYVRAAGLGRAAWLNSSYRWVERSLVFRPDVPPWQAALRDALLEVGVTPDNGFTFDHVTGTKIGGTIFDNSGQRHTAADFLRHARPRGLTVLLYATVSRILFKSQDGVPYPVAYGVVFSDPLGVQHRVYLRDGDKNEVIVSAGTLGSPQLLMLSGVGPQAHLEAHGIEVIVDQPMVGQGVADNPMNSVFIPSPVPVELSLVQVVGITRSGSFIEGVSGSEFGMPVSDGALRWARSFGMLSPQTGQLGTLPPKQRTPEALQRAAEAMMRLDRRAFRGGFILEKILGPVSSGHVELRTTDPRANPSVTFNYFREAEDLERCVHGIETIERVIQSRAFSNFTYANASVESIFTDSANFPVNLLPRHVNDSRSPEQYCMDTVMTIWHYHGGCHVGAVVDDDYRVFGVQGLRVIDSSTFKYSPGTNPQATVMMLGRYMGVKIQSERWKK

SEQ ID NO: 178010 - protein, 129 aa, Oryza sativa
  Clone ID: PAT_MRT4530_75608C.1.pep
MNVNFTLCSCYTDYTASLSGRCIGTGIVFAYAITLCHDDDIRVVSGSLGVVSRLRDIIIWGYVLRMRGGPLMVTAQYGYSSARVYSPKLISWGGYSSVFSPGCMVITGCRKELGSQGWLLEVPGGHQIE

SEQ ID NO: 178011 - protein, 113 aa, Oryza sativa
  unsure (1)..(113): unsure at all Xaa locations
  Clone ID: PAT_MRT4530_75609C.1.pep
MNAYFKLCSCYTEYAASLSRRCFGAGIMFVYAITLCHDDDIKVVSGSLDVVSRLRDIIIWGYMLRMRGGPLMVIAQYGYSSVFSPGCMVMTGCCKELDSXGWLLEVLGGHRIE

SEQ ID NO: 178012 - protein, 531 aa, Oryza sativa
  Clone ID: PAT_MRT4530_7560C.1.pep
MGPGTWRKAYGALKDSTKVGLANFNSEYKDLDIAIVKATNHVECPPKERYLRKILFATSANRPRSDVGYSICTLARRLSKTKNWIVALKTLIVIHRLLREGDGTFKEDFLNYSYRGTILQIPQFKDDSSPLDERVECFRILKYDVEADRLVKLPQASGKPEGAACTNYLVQYALALVLKESFKIYCSINDGIINLVDMYFDMQKYDAIKALEIYKRAGYQAEKLSAFYEHCKRLELARTFQFPTLRQPPPSFLITMEEYIREAPRVSIASKSLESEEQNSPSDNEDEAPQETEKPVDEEEQEPSEPEEEPQPTAESVEGTEPVPLATTGDLLNFDEEVNPLIANIEESNALALAIVAPGNENKASASQDLFALDKSGWELALVTAPSTHTSRPVDNQLAGGFDKLLLDSLYEDEARRQQIASATYNGSVAGNPFDPNDPFAMSNNFAPPSNVQLAMMQQQHQDYQEQQQQYYQIQQQQQMVTLPPQTYHQQQQTQYSALPSHDGLSNPFGDPFGGLVAMANPPKQNNSNLV

SEQ ID NO: 178013 - protein, 421 aa, Oryza sativa
  Clone ID: PAT_MRT4530_75610C.1.pep
LWQAVAARVRKAVADVGVDEHPKQLVVIIDAGRFLLKADRPPLRHRHLRRSNHAPRLLLVATPLEEGRRAREKGSSSPLLQRPPSRPPSGALATAPREGVGEADDNSRGRGVSDAVCGGGQGGGRRRVGADPIVRGEERREEEDGEERIVWAPHDRGSHIFFRKAAVEMFEKACHCFDDHNVYSECKEELRLGVEGAFHVGKESVDEYCGGPCLMETKMALQCVEEVAHDGFRFYSGASLPAVKAALDTGCSYTPDRGTFEIRERKQCGDEYYHYSHHEQTTEQQYGGYYGSEEGEYPTTTSTLPASDYCYGAGASSLGLRYSLLQMLMLFSASMGTGEMPKGGLLHHGRDNLRPEPRTVVEHTTVPFLPNRPSTKSHNRIEPMTTLPRNFEPARVVPLMEGISARGETLREAEARKDSPP

SEQ ID NO: 178014 - protein, 106 aa, Oryza sativa
  unsure (1)..(106): unsure at all Xaa locations
  Clone ID: PAT_MRT4530_75611C.1.pep
MFAYAITLCHDDDIRVVSGSLGVVSRLRYIIIWVYMLRMRGGPLMVTAQYGYSSAHVDSPKLISWGGYSSVFXSPGCVVMTGCHKELSNQGWLLEVLGGHRIEGIS

SEQ ID NO: 178015 - protein, 163 aa, Oryza sativa
  Clone ID: PAT_MRT4530_75612C.1.pep
ATSSPSLFALLSLPPPLSLSLTSLRRLADRRGGSRRGEAGEEEEVSGRRRAMRRRWWRQCWTRDRRSFSSACEAQDERPTVVTARRGTRCRGCTTAWWKTAARPAARPSAGAASLARGGVAVQRTAFSDGGGRHQHGHASLGWRLRHGLPGSDRVQWQRSAAP

SEQ ID NO: 178016 - protein, 128 aa, Oryza sativa
  Clone ID: PAT_MRT4530_75613C.1.pep
MSIYFTLCSCYTKYTASLSGRYFGVGIMFAYAITLCHDDDIRVVSGSLGAVSRLRDIIICYILQMRGGPLMVTAQYGYSSAPVYNPKLISWGGYSSVFSPGCMVMTGCRKELGSQGWLLEVPGGHRIE

SEQ ID NO: 178017 - protein, 144 aa, Oryza sativa
  unsure (1)..(144): unsure at all Xaa locations
  Clone ID: PAT_MRT4530_75614C.1.pep
TNANFTLCSCYTDYTAILSGRCFGAGIMFAYAITLCRDDDIRVVYGSLDVVSRLQDIIIWGYMLRMRGGPLMVTAQYGYSSARVYNPKLISWGGYSSVFXSPGCMVMTGYHKELGSQGWLLEVPGGHRIEDSNMSKTHVLVRFE

SEQ ID NO: 178018 - protein, 120 aa, Oryza sativa
  unsure (1)..(120): unsure at all Xaa locations
  Clone ID: PAT_MRT4530_75615C.1.pep
MNANFTLIQXYIDYTVSLSRRCVGTGIVFAYAITLYHDDDIRVVSGSLGMVSRLLGIIIWXLMVTAQYGYSSARVYNPKLISWGGYSSVFSPSCIVIMGCHKELGSQGWLLEVLGGHRKE

SEQ ID NO: 178019 - protein, 681 aa, Oryza sativa
  Clone ID: PAT_MRT4530_75616C.1.pep
MASRSRLVARRSKPELVAPSRPTPHETKLLSDLDDFRNHYEYTPLVAFFRSSGSGNDVPSPPTMTIRTAIGEALVYYYPLAGRLRELPCGKLVVDCTEEGVVFVAAEADLRLADLGEPLLLPFPCSGELLVCDNARSDSLHVAVVDKPLIFMQVTEFKCGGFAIAMQGNHCVADGFGASQFMNAIADLARGEPRPLVLPVWERHLVMARAPPSVAAAYPAFKPLIDGASSNDVMLSTPLDTMVTRHFLFGRREMAALRRLLPARLGRRCTDFQLLAATLWRCRTAALPYAPHRRVHAYLPLSMHGRRWLHIPEGYYGNALAYSIADASAGDLCGGTLGQTVEQVCEARLQVTGEYVRSTVDLMASLRGRGMVFDGVYVVSDLRRLFAELDFGCGEWVVSGMAQPMLATFLVRCRNADGEDAVAASMLLPPSVMERFAEELAGLMMSKEEYEDERVHHGVASLHVRDPRCAAGDAQPRAQQAKVPVQYGCACVEHSTLDQLVGSCLIPSPTPWLTLFRPDHVVAMIPQIPKAQQIENPRVFSWDHWWGKESRYPHYRWNAEMDIEARPELHSKRTVEAQVPLSREALSNQKPCKELDLQGSFVFPEKFPVRAGRQGATLSKGSLATSAPSCQPNSALCACAADFRCLFAFSARGAQQLRCRRGCCFLLAAGCPPVLDEDDGH

SEQ ID NO: 178020 - protein, 142 aa, Oryza sativa
  unsure (1)..(142): unsure at all Xaa locations
  Clone ID: PAT_MRT4530_75617C.1.pep
ISTYFTLCSCYTEYTASLSGRCIGAGIMFAYAITLCHDDDIRVVSGSLDVVSSLRDIIIWGYILRMRGGPLMVTAQYGYSSVPVYNPKLIPWGGYFFVFSPVCMVMTGCRKELGSQGXLPEVPGGHRIEEYVSRPSSRPKPI

SEQ ID NO: 178021 - protein, 34 aa, Oryza sativa
  Clone ID: PAT_MRT4530_75618C.1.pep
MFLIPLILYVCEPLESDGNVSLDRRVATGIRPDC

SEQ ID NO: 178022 - protein, 158 aa, Oryza sativa
  unsure (1)..(158): unsure at all Xaa locations
  Clone ID: PAT_MRT4530_75619C.1.pep
RNSARGFDILSLSGSSARRGWRHEGSRTGGLSVALAGSDGRIXGGCVAGMLMAATPVQVVVGSFIAEGKKGKEEHLKREPTSAPTPNHAAGFGAATAASPPSDGSSSDHSDDPGSPMGPNGSTFNNSGHPMHSSYAPVSWSLSGNQGRYDPDLKMMTD

SEQ ID NO: 178023 - protein, 207 aa, Oryza sativa
  unsure (1)..(207): unsure at all Xaa locations
  Clone ID: PAT_MRT4530_7561C.1.pep
VRARPKPPPNAILLLPEVNCANSCRAVGLKIDGGIPSHNSNHSPPSQPFSPSPPPRVVPGLAPTHRQPNSHAVKPILRRILDPNRSPASSFTSPHQAEHRRPRAALFFAAEEFFRPQSFISAYLAANPSTIQINPSAAARRRRRTLAPSPLWLQPLSPSIARFGEXPEVEEEKRERLTALGLEDSSDSIDNINQSQDIEQGKLPYTF

SEQ ID NO: 178024 - protein, 69 aa, Oryza sativa
  Clone ID: PAT_MRT4530_75620C.1.pep
MEVHGAVSALGREQGGRSRPRATWRRWTSEASEDVALASDPPSPVGEETVREDRSHVVVIAAEEAVAAA

SEQ ID NO: 178025 - protein, 105 aa, Oryza sativa
  Clone ID: PAT_MRT4530_75621C.1.pep
SAPGWVGIHSPLWVPVLWGLRANASQPAVKLPGTLCCQGLRHSKCQMQVARVRLALSIAWCSGSGHMRSGRPAVSQVMIISKQQQAAQGSRQPADRSARDAQSSS

SEQ ID NO: 178026 - protein, 610 aa, Oryza sativa
  Clone ID: PAT_MRT4530_75622C.1.pep
MCHRLPPPPWPTCEEGKRRGRRKKASRRRRKKEEEGEAMPREGTRMAGLWEREVGCLPPKLFANSVMASQDFVRSLGVQKRLRKHRGCVNTISFNEDGSLLLSGSDDRAAVLWNWQEGTPTFAFHTGHSDNVFHALFMPFSGDRSIITCAADGQVRHSQIQEGGRVITNELVDTEVAVHKLAIEPGNPHTFFSCGDNGSVFLFDLREKYVAELFKCAEVDHFGGDTIELYAIAIDPRKPSCFAVAGSDEYVRIYDSRKIDGHRNKHTMKGVNFLGPNCDYVTTGSDCGRVFIWRKKDGELMRVMKGDKQIVNCVEQHPYGIVIANCGIDKDIKIWAPGGSENPDEVETDSCCSDISESYDSVYFDDYIFSSDFDSSEEDDEDDDDDDDDDDDDEEDGLSVSINEDMSYEEKDAASDHDSDRRTHGCKFRVVLGVSPSPPGRAWSRHHDDDDEEVAKAHEPTSLASYGLSISPLSKDAAMGLVVSAATGRGWTTGSGMEGPPKAAGGGDRPEVSTLPWSLFTKSPRRRMRVAFTCNVCGQRTTRAINPHAYTDGTVFVQCCGCNIFHKLVDNLNLFHEMKCYVGPDFRYEGDAPFNYLDRGEDGDNIFPIL

SEQ ID NO: 178027 - protein, 1072 aa, Oryza sativa
  Clone ID: PAT_MRT4530_75623C.1.pep
MAVVAGAMTALIAKLTTLLMDQYKLQNSARGDIIFIKAELESIQAALEKLFEVQVTDRQVKIWERDVREQSYDMEDIIDNFMVHVETHLLAKPHELKGFMKGSLSLLRRAMVRYRVATDIKRIRRLVNETSARRDRYKVGTIVAAAKTETAIDPRLIGIYGEATKLIGISGPKEELTKLLMDSKGNSKNKLKVISIVGVGGLGKTTLANVIYQQLRGQFECHAFVSVSLKPDLKKVLSSILRQFSEQGYAWTETWCAQEIINKIRDEIKEKRYLIVIDDIWEKSAWECIECALIENDRGSRIITTSRVLDAATPCSSEVDHTVYKLQPLSSDNSKKLFYKRIFYCEDGCPLELKDISEKTLRKCEGVPLAIITIGSLLAMRPQNLYQWDRVHNLIGSGLEKSHHVENMRHILSISYYDLPAHLRACFLYLSIYPEDYNIQKDQLIRRWISEGFILGEDMDTLHEGGKYFNELINRSMIQPAYIDSHGRVHACRVHDMVLDLITSLSNETNFVTSLGGQQPTYHPNRARRLCLQNSIYDHTIRQEKMKWPRVRSLIVFPHATNLLPSLSRFRILRVLDLEGCQDLKNHQIEGISDLFHLRSLVLKDTNIGSLPKKIGNLSCLHTLDIRHTIITELPSTVVHLRRLVRLLIDASVKLPDGIGKMECLQEISLVGISKSPNFLKELGSLTELRILQISESTGAWHDSYENTLIDSLCNLHKICDLYIHGCKLSTEFISNIRCSPRYLRYLSCGQLSILPRWINSSLLSLSTIDLILNVLRQDDLRSLGALQSLCCLRLNVFKIEPERLVVGTEHAKFHWLAEFSFTTNAMGLIFSQYSMPRLENLELAFNVRETKYFDIGLEHLSSLKDVTARIDCRDSSIFEVQNADAAIRRIAYMNSNQPKVHVIRHYEHMLMDEVKIQKETEEEKEILENRIGPWGGNGGVTCDIKVAPKRLESITICSGIIIDALAFSYLDKDGERHTTSLWGGLGGSVQLIDLDEREFLMEVIGTVGPFNVLSEAITSLTLVTNVRSYGPFGQPQGTPFRTPRKKNSCIVGFFGRSGTYLDAVGVYFHPM

SEQ ID NO: 178028 - protein, 95 aa, Oryza sativa
  Clone ID: PAT_MRT4530_75624C.1.pep
MSSRRAVRPSRGTAKAAAQAAAAAAAVKRAATLRANAKTVRVVAAQDVLHVKALSDYATVHEMSPTSTGVGVDTFALAVLENASVTHGLFRYGFR

SEQ ID NO: 178029 - protein, 76 aa, Oryza sativa
  Clone ID: PAT_MRT4530_75625C.1.pep
MRDGAKKSKLSWSKSLVLKWFNIRGKSYDFHGDDAAAAFGRRGGGGEDEWRSSSFSRRESCTVKKSRTGDSILVPI

SEQ ID NO: 178030 - protein, 66 aa, Oryza sativa
  Clone ID: PAT_MRT4530_75626C.1.pep
MSSRRAVRPSRGTAKAAAQAAAAAAAVKRAATLRANAKTVRVVAAQDVLHVKALSDYATVHEMSPT

SEQ ID NO: 178031 - protein, 514 aa, Oryza sativa
  Clone ID: PAT_MRT4530_75627C.1.pep
MASISAASPVAGKAAAFAHKNGPAPAAVAPSQQQLQRRVSGRRARSGRVRAVATPARAPRAPSSTGSVKSAMTMTEKILARASERASLEPGENVWVDVDVLMTHDVCGPGTIGIFKREFGEDAKVWDREKVVIIPDHYIFTSDERANRNVDILRDFCMEQNIKYFYDIKDLSNFKANPDYKGVCHVALAQEGHCRPGEVLLGTDSHTCNAGAFGQFATGIGNTDAGFVMGTGKALLKVPPTIRFVLDGEMPPYLLAKDLILQIIGEISVSGATYKSMEFVGSTVESLNMEERMTLCNMVIEAGGKNGVVPADQTTFNYLEGKTSVEYEPVYSDAQARFVSDYRFDVSKLEPVIAKPHSPDNRALARECKDVKIDRVYIGSCTGGKTEDFFAAAKVFLASGKKVKVPTFLVPATQKVWMDIYSIPVPGAGGKTCSQIFEEAGCDTPASPSCGACLGGPRDTYARMNEPMVCVSTTNRNFPGRMGHKEGQIYLASPFTAAASALTGYVTDPRDFLM

SEQ ID NO: 178032 - protein, 182 aa, Oryza sativa
  Clone ID: PAT_MRT4530_75628C.1.pep
MEVDMEAEGASGELGHKRADLEKPTEEERASNGGGDAAKTPSEDHHDSARRRAMAMENDDDDDEYYDEPLPNPLDAYRQSWARSYGTNGATFEDETDLPPMPNTDIPVLPPSAQPMETMQVFTVKVTQITGGLRWPLGVYGVVAVRDSMDHKRNVLFRRGRNECQTLTSLQACANCSYPIIL

SEQ ID NO: 178033 - protein, 468 aa, Oryza sativa
  Clone ID: PAT_MRT4530_75629C.1.pep
MEGEEQQRVKTTSQWVSHVEHLLDAGGNPSEEEARRWRRQSVYRVPAYIKHRTSYGAPQLVSLGPFHHGVPELRPAEEHKERALLHLLRRGGGGGDGRRLRLGSLVASMEEVVVELQDAYQGLGATKWRDDRDGFLKMMVLDGCFLLEVMRAAAEAAQGDGDGEGVGGGYAANDPVFSRHGELYVFPYVRRDMLMIENQLPLLVLQRIVAFVHGGAAPEASDDAINNMVLSFVSMIPDPPAMRGGGGLALHPLDVCHRSLLHGSPPRPCHTGRREEFVPSATELDQAGVRFRPSRTRSLHDISFRHGALRIPRLAVDDTTEHKLFSLMAFEQLHGAGANEVTAYVFFMDNVIKSGDDARLLGASGVVSNGLGSDEAVAEMFNRLASEAELDRRSALHGVHGEVNAYREKRWNQWRASLVRNHAGNPWAIVSLVVAFVLLVLTVLQTVYTVLPYYQEQAAAGEAALREL

SEQ ID NO: 178034 - protein, 156 aa, Oryza sativa
  unsure (1)..(156): unsure at all Xaa locations
  Clone ID: PAT_MRT4530_7562C.1.pep
SRKRTAEIDPSKTDGRDRTVHDRLTANGHDDVSGDVTTGGGSGXRKLAGERWRDDENGGHQDVERDAANSPVTKEAAEDQRTATASRSKRRRRSGRRRRRCSGSLQQRRRSRRGRRRDGDHDDDLPERRRRLERRRRTAGAAATTAARGHTALGLW

SEQ ID NO: 178035 - protein, 82 aa, Oryza sativa
  Clone ID: PAT_MRT4530_75630C.1.pep
MTNYYREFIPVIASANERTLSRNADPRSHERRKDLLLRTWKPGIMCSKCNEMIVNRKRNPVPTYKSRQFFFLDITSHNRLAN

SEQ ID NO: 178036 - protein, 71 aa, Oryza sativa
  Clone ID: PAT_MRT4530_75631C.1.pep
MAGSGSRWLEKGRSIKAARRQGRPGEELRTEDRAKDIGVDHVSGEELRASRDNPDNCDNHLQLHHQRRDDR

SEQ ID NO: 178037 - protein, 96 aa, Oryza sativa
  unsure (1)..(96): unsure at all Xaa locations
  Clone ID: PAT_MRT4530_75632C.1.pep
RRRRRRYPCRRRSPLAVAGMEGEEEENVGPFRRTSARTXRMATRMVSVLASSDNRAQAELARLEALESDNACPEVVYLNDDDEYGSVNEEDHVLYA

SEQ ID NO: 178038 - protein, 781 aa, Oryza sativa
  unsure (1)..(781): unsure at all Xaa locations
  Clone ID: PAT_MRT4530_75633C.1.pep
MAPRNPNPSYVTGPDLGRIDDDATAYLGVSLVDEDELMKLVTSGVLAEKQAFALGKAVVPKPGDNRTVVFAVFFEAGLRFPCNVLLPEILRFFQACRPAGFESSAGLFGAIFYATINSKTVVTPPGTKKTAFEIMNFNVRPERSDLCPINGTMSKWDRHWISKWFYQSIPFEAGSESAKALRWRRRAIAPNRKPKVTVDGAMEARFALLRKICSRLSCRDLVEEFCMLRIFPLSQTWQVEVSPDEEVDGLPKLVMPEGANMLTLAQADTEARKMIGDVSVTEYSQLLTRQAADRANRVYDGNLPPRAKPYKANGDEGTSMKRTRRQVKLAPRXRRAPATTNFDADDEDTVDDHDGEEEGEEDETEVADEPADNRTETRGYTPTPSLDHVKTGXESNSSPLRRKDLEGAKALVSFVAGKSLXFSTAPGAAVGVGGVGGSVALGTSASADRVVKVAARLFGSPVRKPVASPLAVQKWKKTVAETSASEYSLAAPHFAPGDFETRADLIPFVKGVSNLVSLAGSPSLFFELNEFDEGCSAIKSLAVRILAAHCSTERTVRARLDGFKGRFRAKDDELGRKSLEMESLANTLKEAKAENKRLQAELEKGSEAKAEIERLKAEPKMEALCQEVSKAEETASTEAQRFTQDMSKATESAKTVCRTLRLALTDMGARVRGVPGEDASAFTFSEWTQQAGGFSPKGVCSASFWGLAEQECEKFVTVKNLPKIKYSCREMIINAKSGHTPGEPWTTTIMSMWNVRRTWPAFGEITEGLIARKRSPSATMA

SEQ ID NO: 178039 - protein, 121 aa, Oryza sativa
  Clone ID: PAT_MRT4530_75634C.1.pep
HAGPARQRHKRGGRTVDSVHRGLAAPWTQTTGVVHGWRTERQGAGSPASPTRRRHTRGRPPAMAARRGAGQGRQKGKGRKEASPCAGRRGAMSAAASSSGRLRDGAPAAAPRGGNGGRRPG

SEQ ID NO: 178040 - protein, 72 aa, Oryza sativa
  Clone ID: PAT_MRT4530_75635C.1.pep
PVKCVAFGEPGYFLHNRVLLAYFLPATTYSLFPLVYLLALRAPCKLLWILCFCNFARPGTNTSSIHNSGRRA

SEQ ID NO: 178041 - protein, 92 aa, Oryza sativa
  Clone ID: PAT_MRT4530_75636C.1.pep
RKGLTLNLDRKGGYPNSTSMAKKICLYKNINHLSLSIIKTSKRNIRLNCHLMLHILTVTKMTGPGTREMITKGDCPECCKFRIAVHKKPCSM

SEQ ID NO: 178042 - protein, 121 aa, Oryza sativa; identical to SEQ ID NO: 178039
  Clone ID: PAT_MRT4530_75637C.1.pep

SEQ ID NO: 178043 - protein, 334 aa, Oryza sativa
  Clone ID: PAT_MRT4530_75638C.1.pep
MASGEAEPLQYTTTVLRVSIHCEGCKKKVKKVLQNIEGVYKVTIDAAQHKVTVTSSVGADVLVRRLHKSGKHATVWPSPPVAAAAKQKPDEVAAAPPPAAAPAPAGERGKGAEKKAKEAAKEAGTESSEKKPEKEKKAEAKKPAKDDAAKKEGEVPEKEKGSPEPNKESAAAAADEEEGGEESGGKKGKKKKNKQKDGGGEADAAAPEKPAAKAPPAAPAPSMPAPAPTLSSPERPHGGFPYYSPQPVMSYNVAHPSASVSSYYAPTPVMSMQPTPMPPPPQMSYGYSPYPPMMMPPPPPPEYLYGPPGMRSSPPQESYSNMFNEENPSSCSVM

SEQ ID NO: 178044 - protein, 81 aa, Oryza sativa
  Clone ID: PAT_MRT4530_75639C.1.pep
GVAALVYEVAKHTMSRNLHAMGLYLLATVGLTNVWLLLYILHFWRFGETKPIAVKVRSCEKTTGHVSVQISIVTVLRKRGA

SEQ ID NO: 178045 - protein, 230 aa, Oryza sativa
  Clone ID: PAT_MRT4530_7563C.1.pep
MAEAELLLERSRAITLNGRDKRGRALVRIVGKYFPGKLGSARAITLNGRHKRCRAIVRIVGKFFPARALGGRAEAALRGYVRRRVLPEIGEREFVVVYVHSLVDRGDNFPGVAAIRAAYEALPAAAKERLRAVYFVHPGFQARLFFATLGRFLFSSGLYEKLRYMSRLEYLWEHVSKGEMEVPECARRHDEELERRPLMDYGIEATDRRCMFDAASMDTSASLHSLRCIS

SEQ ID NO: 178046 - protein, 66 aa, Oryza sativa
  Clone ID: PAT_MRT4530_75640C.1.pep
VWANPWVYWLGPFVGAALAALISDIIFIGQGPHDQLPPPDYWSYHFIWSAPSLKNGIGPPSRSIYS

SEQ ID NO: 178047 - protein, 72 aa, Oryza sativa
  Clone ID: PAT_MRT4530_75641C.1.pep
LFLLVQTTVLRVSIHCEGCKMKVMKVLQNIEGVYKVTIDAAQHMVTVTSSVGAHVLVKRLHKSRKHATVWPS

SEQ ID NO: 178048 - protein, 141 aa, Oryza sativa
  Clone ID: PAT_MRT4530_75642C.1.pep
MSTNFTLCSCYTNCTASLSGRCFGAGIVFAYAITLCHDDDIRVVSGKLDVVSRLWDIIIWGYILRMRGGPLMVTAQYGYSSAPIYNPKLISWGGYSSVFSPGWMVMTGCRKELGNQGWLLEVLGGHRIEGKPPCPDHGACW

SEQ ID NO: 178049 - protein, 127 aa, Oryza sativa
  unsure (1)..(127): unsure at all Xaa locations
  Clone ID: PAT_MRT4530_75643C.1.pep
MNANLCSCYTDYTASLSRRCIGTGIMFAITITLCHDDDIRVXVSGSLGVVSRLLGIIIWGYMLRMSGGALMVTAQHGYSSARVYGPKLISWEGYSSVFSPGCMVMMGCRKELGNQGLLEVLGGHRKE

SEQ ID NO: 178050 - protein, 90 aa, Oryza sativa
  Clone ID: PAT_MRT4530_75644C.1.pep
KPNTIRSKGKIKKPYTIRNRISSWVSRSATSHIPSSPGPTRVPHNLRNQAYSPLTGGPRAVMDPPVSDTGGGPYLLRARARPGHNTAFCC

SEQ ID NO: 178051 - protein, 130 aa, Oryza sativa
  unsure (1)..(130): unsure at all Xaa locations
  Clone ID: PAT_MRT4530_75645C.1.pep
MSTYLTLYSCYTEYMTISLSRRCFGAGIMLAYAITLCHDDNIRVVSDSLGVVSRLRDIIIWGXILRMRGGPLMVTAQYGYSSVPVYHPKLIPWGVYSSVFSPGCMVMTGCRKELGSQGWLLEVPGGHRIE

SEQ ID NO: 178052 - protein, 132 aa, Oryza sativa
  unsure (1)..(132): unsure at all Xaa locations
  Clone ID: PAT_MRT4530_75646C.1.pep
TSTNFALCSCYTEYTTSLSGRCFGARIVFAYAITLYHDXDIRVVSGSLDVVSRLRDIIIWGYILRMRGGPLIVTGQYGYSSAPIYNPKLIFWGGYSSVFSPGWMVMTGCRKELGSQGWLLEIPGGHRKEGIS

SEQ ID NO: 178053 - protein, 80 aa, Oryza sativa
  Clone ID: PAT_MRT4530_75647C.1.pep
MAKLTGVRCERGSSGGGADGVALGLANPMAAMARLSAAASGDRSYGGGGGEEGDCARAKEGTGELGEMGKKREGGAVVLK

SEQ ID NO: 178054 - protein, 105 aa, Oryza sativa
  Clone ID: PAT_MRT4530_75648C.1.pep
MFAYAITLCHDDDIRVVSGSLGMVSRLRDIIIWSYMMWMIGGPLMVIAQYGYSSARVYSPKLISWGGYSSVFSPGCMVMTGCRKELSSQWWLLEVLGGHRKEGIS

SEQ ID NO: 178055 - protein, 77 aa, Oryza sativa
  Clone ID: PAT_MRT4530_75649C.1.pep
ATAGAFRNASPFKFTAFQAGPRICLGKDSAYLQMKMALAILFRFYTFDLVEDHPVKYRMMTILSMAHGLKVRVSTSV

SEQ ID NO: 178056 - protein, 102 aa, Oryza sativa
  Clone ID: PAT_MRT4530_7564C.1.pep
GHHMPRTKLTCYTLQAHPRTSCCHCINSAVGQTGGLQPDMPGDGDGSHDPGPPVGQPAEQVGGPCWRRPSRGAQQHPPRRHLWQHPGRPSRQPCPPKLHPTG

SEQ ID NO: 178057 - protein, 132 aa, Oryza sativa
  unsure (1)..(132): unsure at all Xaa locations
  Clone ID: PAT_MRT4530_75650C.1.pep
CSWYTEYTASLSGRCFGAGIMFAYAITLCHDDDTRVVSGSLGVVSRLRNIIIWGYILRMRGGPLMVTAQYGYSSGPVYNSMLIPWGGYSFVFNPGYMVITGCRKELSSQGXWLLEVPGGHRIEAKPIFPKHN

SEQ ID NO: 178058 - protein, 58 aa, Oryza sativa
  Clone ID: PAT_MRT4530_75651C.1.pep
MVRCAAPASARRQHAVAVAADASTAKHVGAGCSGQLQPWSSYRARSAVLAVPRRGAMP

SEQ ID NO: 178059 - protein, 129 aa, Oryza sativa
  unsure (1)..(129): unsure at all Xaa locations
  Clone ID: PAT_MRT4530_75652C.1.pep
MNTNFTLYSCYTDYTASLSRRCIGTGIMFTYAITLCHDDDIRVVSGSLGVVSRLRDIIIWGYMLWMRGGPLMVIAXYGYYSARVYNHKLISWGGYSSVFSPGCMVMTGCCKELGNQGWLLEVPGGHRIE

SEQ ID NO: 178060 - protein, 124 aa, Oryza sativa
  unsure (1)..(124): unsure at all Xaa locations
  Clone ID: PAT_MRT4530_75653C.1.pep
MSTNFTLCSCYTEYMASLSGRCFGAGIVFAYAITLYHDDDIRVVSGSLDVVSRLRDIIIXGYKLRMRGGPLMVIAQYGYSSAPIYNPKLISWGGYSSIFSPDWMVMMSCRKELGSQGWLLEVLG

SEQ ID NO: 178061 - protein, 210 aa, Oryza sativa
  unsure (1)..(210): unsure at all Xaa locations
  Clone ID: PAT_MRT4530_75654C.1.pep
MSTYFILCSGYTEYTASLSMRCFGAGIVFAYAITLCHDDDIRVVSGSLDVVSRLRDIIIWGYILRMRGGSLMVTAQYGYSFAPIYNPKLISWGGYSSVFSPGWMVMTGYRKELCSQGWLLEVPGGHRIKDNLCHPSHGLDRFVGVQPSTCSSSTELGPLASSLPSGRDVDSAAIEHVTPNRCGXLQLGAGFNLSDVEGEQEGEERLQSVL

SEQ ID NO: 178062 - protein, 66 aa, Oryza sativa
  Clone ID: PAT_MRT4530_75655C.1.pep
MSMFHFIVQVHPSLMTFQLICPHNLHQVALRKLLYQKSSASQVIISSIQQRNVIRLVQAFPINYDV

SEQ ID NO: 178063 - protein, 128 aa, Oryza sativa
  Clone ID: PAT_MRT4530_75656C.1.pep
VPTLHEYFCYTEYMASLSGRCFRAGIMFAYAITLCHDDDIRVVFGSLDVVSRLRDIIIWGYILRMRGGPLMVIAQYGYSSLPIYNPRLIPWGGYSSVFSPSCMVMTGCRKELGNQGWLLEVPGGHQKE

SEQ ID NO: 178064 - protein, 42 aa, Oryza sativa
  Clone ID: PAT_MRT4530_75657C.1.pep
PSIHTYTNLNPLHLHPSSFFFNTILKTTFVFFYIQNQLYSIK

SEQ ID NO: 178065 - protein, 128 aa, Oryza sativa
  Clone ID: PAT_MRT4530_75658C.1.pep
VWPRQSIVKPRLPQHVEQKQAYCHKELLQGHHSLHILAARYELLSMGSYGWIQTQQGSEVLSAFSCTMFSAIQQCIAEFRHRYFGIWTGFSNGMNKNTLAKSLQFTWTAMALHSQWTEDFMIFNSKPS

SEQ ID NO: 178066 - protein, 478 aa, Oryza sativa
  Clone ID: PAT_MRT4530_75659C.1.pep
MEQVSCFAAAAAAVLVVLSLARMLLAPRREWDGLNLPPSPSRLPFIGSFHLLRRSPLVHRALADVVRQLGAPPLMYMEIGEVPAIVVSCADAAREIMKTHDINFASRPWPPTVQKLRAQGKGIFFEPYGALWRQLRKICIVKLLSVRRVSSFHGVREEEAGRLVAAVAATPPGQAVNLTERIKVAIADTTMRPMIGERFERREDFLEVLPEIVKLASGAFRQRQQQKEAMAAPPPDIAKEEEDDLMDELIRIHKEGSLEVPLTAGNLKAVILELFCAGSETSSNAIQWAMSELVRNPKVMEKAQNEVRSILKGKPTVTEADMVDLTYVKMIVKETHRLHPVLPLLTPRVCQQTCQIMGYDVPQGSVIFIKSWAIMRDPKHWDDAETFKPERFEDSEIDLKGTNYEFTPYGAGRRICPGLALAQVSIEFILTMLLYHFNWELPNGAAPEELDMTEDMGLTIRRKNDLYLLPTLRVPLTA

SEQ ID NO: 178067 - protein, 95 aa, Oryza sativa
  Clone ID: PAT_MRT4530_7565C.1.pep
GARVGDGGRRRRWDHSLYRGGYDARPDNVKRALDTALDYMFLEIDCLAALVVHRWGYEEGLSVARIQSSGCWIPTSCCAATELKGCRELPCARNG

SEQ ID NO: 178068 - protein, 514 aa, Oryza sativa
  Clone ID: PAT_MRT4530_75660C.1.pep
MEQVSCFAAAAAVVVVVLLLARMLLAPRGEWDGLNLPPSPPRLPFIGSFHLLRRSPLVHRALADVARQLGSPPLMYMRIGELPAIVVSSADAAREVMKTHDIKFASRPWPPTIRKLRAQGKGIFFEPYGALWRQLRKICIVKLLSVRRVSSFHGVREEEAGRLVAAVAATPPGQAVNLTERIEVVIADTTMRPMIGERFERREDFLELLPEIVKIASGFSLDDLFPSSWLACAIGGSQRRGEASHRTSYELVDSAFRQRQQQREAMAASPPDIAKEEEDDLMDELIRIHKEGSLEVPLTAGNLKAVILDLFGAGSETSSDALQWAMSELMRNPRVMEKAQNEVQSILKGKPSVTEADVANLKYLKMIVKETHRLHPVLPLLIPRECQQTCQIMGYDVPQGSVIFINSWAIMRDPKHWDDAETFKPERFEDGEIDLKGTNYEFTPFGAGRRICPGLALAQASIEFMLATLLYHFDWELPNRAAPEELDMTEEMGITIRRKKDLYLLPTLRVPLTA

SEQ ID NO: 178069 - protein, 74 aa, Oryza sativa
  Clone ID: PAT_MRT4530_75661C.1.pep
DSKLWHPDCSNRGLRPPPQLPRPPLRLPRPPGLGESVPPLGALPAQPALRLPRLRDHRACPGHGPRRPEMAKAR

SEQ ID NO: 178070 - protein, 99 aa, Oryza sativa
  unsure (1)..(99): unsure at all Xaa locations
  Clone ID: PAT_MRT4530_75662C.1.pep
TRSNPPPSSPPRSRGSPSQSIPDSFPNAXTPPPPPPMADGASANPGDPPSPASARSGQRKHVPDWLNSPIWSAPPPPARHRAPSPPXXPXPAPPPXTQP

SEQ ID NO: 178071 - protein, 62 aa, Oryza sativa
  Clone ID: PAT_MRT4530_75663C.1.pep
LHLHLIKADHSSRASTPAAGDISSTSTQPPPGFEAEPDEPEEEIEDPFAGLPPDFDFFGFSH

SEQ ID NO: 178072 - protein, 262 aa, Oryza sativa
  unsure (1)..(262): unsure at all Xaa locations
  Clone ID: PAT_MRT4530_75664C.1.pep
SRQRRRRHRICPREAAGAIGEAGSATSTSRWIRWTFVPKDCDASGINHLSRSVLLRFNPPPPHRFHVFDFVWEEIRWASIQYKKGLVYAPHIMRMIEIVTLLRYHHEVPHPQLHLRLIKVDHLSRASTSAAGDISSTSTQPPPTRERHSPVARRESSPLFHILRSLXFGLCSAEAKKNRKARNEVKKMARRVKHMQAQLNECLHVDVPPSPPGFEAEPDEPEEEIEDPFTGLPPDFDFFGFGRGYGYPPPPPPEDPPQASFV

SEQ ID NO: 178073 - protein, 185 aa, Oryza sativa
  unsure (1)..(185): unsure at all Xaa locations
  Clone ID: PAT_MRT4530_75665C.1.pep
MVMLAASTTSPSLCFLGSIHPPIASMSLTLFGRNSVGLRFSIRRGWSMPLTSRASTSSARDISSTSTQPPPTREPXSPVARRESSPLFHILRSLFGLCSTEAKKNHKAWNEVKKMARRVKHMQAQLNERRHVDVPPSQPGFEAEPEEIEDPFIGLPLDFDFFGFGHDYGYPPPPAPEDPHQVPFA

SEQ ID NO: 178074 - protein, 447 aa, Oryza sativa
  Clone ID: PAT_MRT4530_75666C.1.pep
MESPNQNQQQESSSGSSVMCQLEDKLPYAFYIGDEELSVQLGAYMQQKNANVEVTLRIVYQPQAIFRIRPVNRCSATIAGHTEAVLAVSFSPDGRCLASGSGDTTVRFWDLSTQTPLFTCKGHKNWVLCIAWSPDGNHLVSGSKSGELILWDPKTGKQLGTPLTGHRKWITAVSWEPVHLQSPCRRFVSTSKDGDARIWDMTTRKCVIALTGHTNSVTCVKWGGDGLIYTGSEDCSIKVWETSQGKLVKTLQGHGHWVNSLALSTEYVLRTGAYDHTGKTYSTAEEMKEAALARYKKMRGNAPERLVSGSDDFTMFLWEPTISKQPKARMTGHQKLVNHVYFSPDGQWLASASFDKSVKLWNGITGKFVAAFRGHVADVYQISWSADSRLLLSGSKDSTLKVWDIRTRKLKQDLPGHADEVYAVDWSPDGEKVASGGKDRVLKLWMN

SEQ ID NO: 178075 - protein, 95 aa, Oryza sativa
  Clone ID: PAT_MRT4530_75667C.1.pep
MSLSPAWRLPDLRYKRDPLGGPAGSNLTANATTTAYETLASTYPNTLYIRSTGITTWARPRELAADKRCAVNNVTLNMRWHADLASHLRWHDIQR

SEQ ID NO: 178076 - protein, 56 aa, Oryza sativa
  Clone ID: PAT_MRT4530_75668C.1.pep
ELLVFLNDITRNIIPSNGAEILLIYYGYRVHPQAHGYTIVAFHPRVFQEYHIYLIP

SEQ ID NO: 178077 - protein, 123 aa, Oryza sativa
  Clone ID: PAT_MRT4530_75669C.1.pep
MALVAKGEPNGGACKDGEVMDLPWSEMFRSASLRLPKQEEPTTTKKPQGKGKASAAEEDIGGLSLEPDARLALYIAMAHAGLATALLVVYGLYRLLADFLRPLQWALLCSIPLRETHRALFVF

SEQ ID NO: 178078 - protein, 40 aa, Oryza sativa
  Clone ID: PAT_MRT4530_7566C.1.pep
MLLTTSSSSNEITGQDSSVSGYWAESPDSPSGDMPSLGRM

SEQ ID NO: 178079 - protein, 539 aa, Oryza sativa
  unsure (1)..(539): unsure at all Xaa locations
  Clone ID: PAT_MRT4530_75670C.1.pep
CRDLVPGGLSHLQYADDTILFIKVGDDNVRVLKFLMFCFEEMSGMKINYQKSEAYVLGVDKEEEIRIANMFNCKVGTMPFTYLGLPMHCEKVGMKEFRLIIQKVEKRLQTWKSXLSYGGREIKINSCLSSAPMYAMGFYYLPGDFHKKMDSLRGNFYWQGLGEKKKYHMMKWEGLIRPKDFGGLGFMDTKIMNLCLLSKWVVRLERGDSDVCLEVLRKKYLDQGGFFQSSPQGGSQFXKGLHECKKVLERLVMKEVHNGESTYFWIDVWCCQCSLKTLFPNLFAINYHQTATVKDLFEDGGWRLDFRRNLDADGEAELAQLTQLIQGVVLEEGNDLMIWPHNSKKGFTTKSMYRELTFFWGGGVXDLGMMAVWKSKIPLKIKHFIYMTDRGRLPCASQLIKRQWKGGNEFCKLCGKTKTTNHVLFSCPLAAFTWCVVRDALGLAQIPINFRNCLGLMKGQKVLKVWVMLIAGVCWVIWLTRNERVFSNILVKSPLQVAYKSLSFVQRWCILLKEDDQVTMKRWCELRMEKLNQLKPCSL

SEQ ID NO: 178080 - protein, 123 aa, Oryza sativa
  unsure (1)..(123): unsure at all Xaa locations
  Clone ID: PAT_MRT4530_75671C.1.pep
MNANFTLCLNYTDYTASLSGRCIGTGIMFAIAITLCHDDDIRVVSGSLVLVSRLLGIIIWGYMLRMRGGSLMVTAQYGYSFTHIYSPKLISXGGYSSVFSPGCMVMTGCRKELDSQGWLLEVP

SEQ ID NO: 178081 - protein, 513 aa, Oryza sativa
  Clone ID: PAT_MRT4530_75672C.1.pep
MTTRRTRKERKQMGGGGKCKRGKRGKIAAKRRRGQVRCCSSSSSSGGARRRARERESEESLGEMGECRGGGGGGDGLIKLFGKTIPVQPDAKFLILGSASLGEFSDVQQHSGSSSSSTESDVQETAAVAVADPSPRSEVVDGESPPQPGGEAASHQQQQKEMKLKKPDKILPCPRCSSMDTKFCYFNNYNVNQPRHFCKHCQRYWTAGGAMRNVPVGAGRRKNKNATAAAHFLHRVRACAAAAAMPAAPHDATNATVLSFGGGGGGHDAPPVTLDLADKMTRLGKEGLVAHARNADAAAACSEVSSNRDDEQIGNTVAKPANGLQQHPPPPHHHHHSAMNGGGIWPYYTSGIAIPIYPAAPAYWGCMIPPPGAWSLPWPATVQSQAISSSSPPTSATPSVSSFTLGKHPREGGDHEARDHHGNGKVWVPKTIRIDNADEVARSSIRSLFAFRGGDKADDNNDDDGTGVHKLATTVFEPKRDSKTAKHPAITSLPLLHTNPVALTRSATFQEGS

SEQ ID NO: 178082 - protein, 122 aa, Oryza sativa
  unsure (1)..(122): unsure at all Xaa locations
  Clone ID: PAT_MRT4530_75673C.1.pep
SRVRVLRFCDACGGEAVRLFCRADPVILCAGSDARPHGPGSXHARVWLCEVCEHAPVGVTCWADAAASCVGLRRDIHSANPVARRHERLPGAPFFGALAYTPKQGSGAHGGDAVAVDDDGSN

SEQ ID NO: 178083 - protein, 129 aa, Oryza sativa
  Clone ID: PAT_MRT4530_75674C.1.pep
MSSNFTLCSCYTECTASLSGRCFGAGIVFTYAITLCHDDDIRVVSGSLDVVFRLRDIIIWRYILRMRGGPLMVTAQYGYSSTPIYNPKLISWGEYSSVFSPGWMVMTGCRKKLGSQGWLLEVPGGHHIE

SEQ ID NO: 178084 - protein, 129 aa, Oryza sativa
  unsure (1)..(129): unsure at all Xaa locations
  Clone ID: PAT_MRT4530_75675C.1.pep
MNVYFTLCSCYTXYMASLSRKYFGAGIMFAYAITLCHDNDIRVVSGSLGVVSRLRDIIIXGYILRMRGGPLMLTTQYGYSFAPVYNPKLILWGGYSSIFSPGCMVMTDCRKELGSQGWLLEVPGGHRIE

SEQ ID NO: 178085 - protein, 426 aa, Oryza sativa
  Clone ID: PAT_MRT4530_75676C.1.pep
MASTVSFSPANVQMLQGRSCHGHAAFGGCSAVPRTGPRMRSVAVRVSSEQEAAPAVRAPSGRTIEECEADAVAGRFPAPPPLVRPKAPEGTPQIRPLDLTKRPRRNRRSPALRAAFQETTISPANLVLPLFIHEGEDDAPIGAMPGCYRLGWRHGLLDEVYKSRDVGVNSFVLFPKVPDALKSQSGDEAYNDNGLVPRTIRLLKDKFPDIVVYTDVALDPYSSDGHDGIVREDGVIMNDETVYQLCKQAVSQARAGADVVSPSDMMDGRVGAIRAALDAEGFHDVSIMSYTAKYASSFYGPFREALDSNPRFGDKKTYQMNPANYREALLETAADEAEGADILLVKPGLPYLDVIRLLRDNSALPIAAYQVSGEYSMIKAGGALNMIDEEKVMMESLMCLRRAGADIILTYFARQAANVLCGMRSN

SEQ ID NO: 178086 - protein, 105 aa, Oryza sativa
  unsure (1)..(105): unsure at all Xaa locations
  Clone ID: PAT_MRT4530_75677C.1.pep
MFAYVIILCHDDDIRVVFGSLGVVSRLLGSIIWGYMLRKRGGPLMVTARYGYSSARVYSPXLIPWGGYSFVFSPGCMVMMGCRKKLGSRGWLLEVPGGHRNKGIS

SEQ ID NO: 178087 - protein, 70 aa, Oryza sativa
  unsure (1)..(70): unsure at all Xaa locations
  Clone ID: PAT_MRT4530_75678C.1.pep
MVLLYSLPDSWKLAENFTTAVVLGGXLAKMHVIFFRAAYKSNFFTFVVIFLISMAHRMLLLLTSRLSLLW

SEQ ID NO: 178088 - protein, 129 aa, Oryza sativa
  unsure (1)..(129): unsure at all Xaa locations
  Clone ID: PAT_MRT4530_75679C.1.pep
MNAYFTXCSCYTEYTPSLSGRCFGVGIMFAYEITLCYDDDIRVVSGSLDVVSILRDIIIWDYILRMRGGPLMVTAQYGYSSAPIYNPKLIPWGGYSFIFSPGCMVMTGYRKELGSXGXLLEVPGGHQIE

SEQ ID NO: 178089 - protein, 155 aa, Oryza sativa
  Clone ID: PAT_MRT4530_7567C.1.pep
PSVLSPISPPRRARMPVFLSASTEPRIPAPSPVVRAGGETSLGFRRAAPWGSAATSFDDGCRSDAGAADPVSLRLGRARGGDGRGPRSPRSAPRSRRGATRPRPRRGPLLAADSRVCAPLNPSRVFLFCASLDCDALRDHGMSKLQTRARKGSIG

SEQ ID NO: 178090 - protein, 129 aa, Oryza sativa
  Clone ID: PAT_MRT4530_75680C.1.pep
MSTYFTLCSCYTKYTSSLSGRCFGAGIMFAYTITLCHDDDIKVVSDSLDVVSRLQGIIIWGYILRMRGGPLMVTAQYGYSSAPVYNPKLISWGGYSSVFSPGCMVMTGYRKELSSQGWLLEVPGEHRIE

SEQ ID NO: 178091 - protein, 105 aa, Oryza sativa
  unsure (1)..(105): unsure at all Xaa locations
  Clone ID: PAT_MRT4530_75681C.1.pep
VFAYAITLCHDDDIRVVSGSLDVVSRLRNIIIWGYILQMRGGPMMETAQYGYSTAPIYNPKLISXGGYSSVFSPGWMVMTGCPKELGSQEWLLEVPEGHRIEGIS

SEQ ID NO: 178092 - protein, 1085 aa, Oryza sativa
  Clone ID: PAT_MRT4530_75682C.1.pep
GYAQVRFLQGFSQDAKIMYEEASQVATDAVGSIRTVASYCAEKKVMTKYNQKCQASRYQGIRTGIVGGLGFGFSNMMLFMTSALCYYVGAKFVSQGNSTFGDVFKAFFSLVVAMLGVSSTAAMASDSSKAKDSASSIFAILDRKSQIDSSSNEGLTLELVKGDIEFTHISFRYPSRPDVQIFSDFTLSIPSGKTVALVGQSGSGKSTAIALLERFYDPDSGVILLDGVEIKKLEISWLRDQMGLVSQEPVLFNDTIRANIAYGKNEEVTEEEIVAAAKAANAHEFISSMPEGYSTSVGERGTQLSGGQKQRIAIARAIVKDPRILLLDEATSALDAESERIVQDALDHVMVGRTTVVVAHRLSTIQGADIIAVLKDGAIVEKGRHEALMGIASGAYASLVELRHNTPNLDGYKTKNANSDAGLEISCSSAYSSPTNYNFIYVTLLQSIKNSVNMIPTSIAQEESTTANGGAKTTETRNAADAVRSVPAAARTAAAGGGSGGRLAFRRGAFEPLEAKGRKEDFVVVARGAAASAGARAAAARGQRSAAREARGRLEARGRLEARGRRDGARAAAAAARGLTAGGGGGGGASGGARAERRRQRTPMPAAAAAARLRRRGHRRKKFVYRPKPPPEPHPFLLHLKSLPSPVAAAAALLSAPRRLHDHPFAACVLYRLARARLFPLVPPLLAALHSRGAPLRPTVFAAVIDHLGAASRPDAAVGVFRTVPAFCSHSAATFHSLLNALVSNGRTDAARDMLPLAPKLGVRLNAVSYNIILKGACLRDGFMGARGVLDEMLSRGVRPTVVTFNTLVGSACREGELGAAERLIDEMARRGVAPNAATYALLMRGLCDADRHADAEKLMFDMEYRGCQADVVNYGVLMSSRARHGDADGVRELLSAMRKRKLKPDDASYNILIRCLCDAGRADEAHRALLEMQLRGTVPGAATYRVLVDGCCRARDFDLGLRVFNAMMASGHCPQARTFRHLARGLGEDGKAEEAFFVLEQMARREMSLDADGWQAVVTKFKDSESKRAYNSNLRHFSTDFWLSAFQQIKRLQPKRSNSRFTRQLHLDPTELHHMHLADDSAVL

SEQ ID NO: 178093 - protein, 164 aa, Oryza sativa
  Clone ID: PAT_MRT4530_75683C.1.pep
MSTYFILCSCYTEYTASLSGRCFGAGIMFAYAITLCHDVVSRLVSGSLDVVSRLRDIIIWGYILWMRGGPLMVTAQYGYSSVPVYNPKLISWGGYSSVFSSGCMVMTGCRKELGSQGWLLEVPGGHRIEEPGVGVSQSPEKGLLGGERSLLSTGRESGVGVSRS

SEQ ID NO: 178094 - protein, 80 aa, Oryza sativa
  Clone ID: PAT_MRT4530_75684C.1.pep
MATADRPLFLNLLFRTGYFHLSGSGIEIFLIMPKVGAFCSSWRRGEYLIRESNGTWVGPEKEASSMVQRRAKGMENGCST

SEQ ID NO: 178095 - protein, 315 aa, Oryza sativa
  Clone ID: PAT_MRT4530_75685C.1.pep
MALVAFLSSSVSFVLYLEYSSLYIYGIEILSEYMNAYFILYSCYIKYTASLSGRCFGAGIMFVYAITLCHDDDIRVVSGSLDVVSRLQDIIIWGYMLRMRGGPLMAIAQYGYSSACVYNPMLIHWGGYSSLFSPGCMVIMGCRKELDSQGWLLRVPGEHRIEGSCMTGFNLPGNFKENLEAFIRSIRSRVIAPQKTLPTEKPVVPTPSSFKTMADKTLREFAAPSAENVAIWPQINMGDVDFDLKSSLVTLAQASPFCGKPNEDANAHLQQFLEICSTCTMKGVGPDAVRLRLFPFSLLGRVKQWFYANHAAVNT

SEQ ID NO: 178096 - protein, 133 aa, Oryza sativa
  Clone ID: PAT_MRT4530_75686C.1.pep
MSTNFTLCSCYTEYTASLSGRCFGAGIVFAYAINLCHDDDIRVVSGSLGVVSRLWDIIIWGYILRMRGGPLMVTAQYGYSSAPIYNPKLISWGGYSSVFSPGWMVMTGCRKELGSQGWLLEVPGGHQIEEKFR

SEQ ID NO: 178097 - protein, 430 aa, Oryza sativa
  Clone ID: PAT_MRT4530_75687C.1.pep
MDEWEELARTVPATLMQVGSGMEAVRKIQVAHRKIQGRAGLMRNIRFGMPAAIAMSLFDDPAPVGVCPTVTLEEARCEISRGAARHAMADHVFVRYVELLGIQHEPPCTSRDTHHREAIRFTAMALEKVREAASLAEAAKDAVDIAETLLPQPELKTEWALAAQDLAERADYEATQALEFVKRARDVVALEFFDTWKILRRGRARSAEMKEWRELALKVPGTIMLIGDAELETLELIQAAVSKFQKHVELLQEVRHGTATATAVDNFTDPDPEGALPTELLENARRGMSKSAVRHAKAHHIFARYAAFLGIQGDEEYRSWDNKHQEAAGSMVAALKKVIDAVSDAEAAKDAVAMVGILPYQCPLWELWALRAQNQTSLSSFNATLAILDVRQAREAFFVEVLRAWLILRRYGSLQLLDDSASLWSSSTPA

SEQ ID NO: 178098 - protein, 460 aa, Oryza sativa
  Clone ID: PAT_MRT4530_75688C.1.pep
MEAKLAENLARSGPTANANPVSKDWSLTSILEDLVDLPWGKFKELSKILEKLAEEVEEIRGRIQKVKEKTTVLGNFVNLAHPMQVFPDEMSKVDKSKLMCDACEYGKHTRTTYISRGLRSILPFVLVHSDVWTSPIASISSDTEGEEFETGGEETNLPIAIRKGVRSNAGKPPQRYGFEAQGVNDDKNNIANYVSYASLSSTYKAFVTSLNSVEIPNDWREAKQDPRWHQAMLEELEALEKNKTWDLVPFPKGKKVVNCKWVYTVKQNPDGNVERYKARLVAKGYSQTYGIDYDETFAPVAKISTVRTLISCAANFDWPLHQLDVKNAFLHGDLQEEVYMEIPPGFATSQTEGKVLRLKKSLYGLKQSPRAWFDRFRRAMCGMGYKQCNGDHTVFYRHNRGLKTILVVYVDDMIITGDDCLKISRLKENLSKEFEVKDLGQLKYFLGIEIARSPRGIVLS

SEQ ID NO: 178099 - protein, 434 aa, Oryza sativa
  unsure (1)..(434): unsure at all Xaa locations
  Clone ID: PAT_MRT4530_75689C.1.pep
MGEIQGIEQILEKLAEEVEEIRGRIQKVKEKTTVLGNFVNLAHPMQVFPDEMSKVDKSKLMCDACEYGKHTRTTYISRGLRSILPFVLVHSDVWTSPIASNGVAERKNRHILEVTRSLMYTMNVPKFLWSEAVMTATYLINRMPSRILGMKTPYEMVFGKNEFIVPPKVFGCTCFVRDHRPSVGKLDPRAVKCIFIGYSSGQKGYKCWSPSERRTFVSMDVTFRESVPFYGERTDLSSLFVDLDNPIIDEDGQEGENGSSGDKPSDQCDTIQISSDTEGEEFETGGEETNLPIAIRKGVRSNAGLCDITNXSGIPNDWKEKNQDPRWHQAMLEKLEALEKTKTWDLVPFPKGKKVVTCKWVYTVKQNPDGNVERYKARLVAKGYSQTYGIDYDETFAPVAKMSTLDVKNAFLHGDLQEEVYMEIPPGFATSQTE

SEQ ID NO: 178100 - protein, 55 aa, Oryza sativa
  Clone ID: PAT_MRT4530_7568C.1.pep
MGIGIKRQISKDRQARFVDRSQPIFGPFLRPCVSPTFQVPAVGFLNPGIGLALQQ

SEQ ID NO: 178101 - protein, 855 aa, Oryza sativa
  unsure (1)..(855): unsure at all Xaa locations
  Clone ID: PAT_MRT4530_75690C.1.pep
MGEIQGIEQILEKLAEEVEEIRGRIQKVKEKTTVLGNFVNLAHPMQVFPDEMSKVDKSKLMCDACEYGKHTRTTYISRGLRSILPFVLVHSDVWTSPIASNGVAERKNRHILEVTRSLMYTMNVPKFLWSEAVMTATYLINRMPSRILGMKTPYEMVFGKNEFXFLQKCLGVLVLSEIIDHPLENWILEPSSVFLXVTLLGKRDINVGVHLSGELLLVWMLLLESLXPFYGERTDLSSLFVNLDNPIIDEDGQEGENGSSGTEEDTQSRSMKFVVGSIPYPVSEPIHEKNWRRPREEENLQVYTRRKTRSLEAQTMGQHESPMDGMEQQQSSIVAEVGDKPSDQCDTIQISSDTEGEEFETGGEETNLPIAIRKGVRSNAGKPPQRYGFEAQGVNDDENNIANYVSYASLSSTYKAFVTSLNSVEIPNDWREAKQDPRWHQAMLEELEALEKNKTWDLVPFPKGKKVVNCKWVYTVKQNPDGNVERYKARLVAKGYSQTYGIDYDETFAPVAKMSTVRTLISCAANFDWPLHQLDVKNAFLHGDLQKEVYMEIPPGFATSQTEGKVLRLKKSLYGLKQSPRAWFDRFRRAMCGMGYKQCNGDHTVFYRHNRGLKTILVVYVDDMIITGDDCLEISRLKQNLSKEFEVKDLGQLKYFLGIEIARSPRGIVLSQRKYVLDLLSDTGKGIWFKKNGHLDVEGYCDADWGSCLDDRRSTSGYCVFIGGNLVSWRSKKQSVVSRSTAEAEYRSMSMSLSELLWLKNLLAELKLSTSTSMKLWCDNKSAINIANNPVQHDRTKHVEIDRFFIKERMDEGTLNLGFVNSGEQVADSLTKALGARECTSSCSKMGMIDIYRPS

SEQ ID NO: 178102 - protein, 80 aa, Oryza sativa
  unsure (1)..(80): unsure at all Xaa locations
  Clone ID: PAT_MRT4530_75691C.1.pep
MKIIFRFALLAIVACNASARFDPLSHRYRXYQLQSHLLLQQTALSPCTEFVREQDSIVXIPFWKPGTIQLINNQVMHQQC

SEQ ID NO: 178103 - protein, 1114 aa, Oryza sativa
  unsure (1)..(1114): unsure at all Xaa locations
  Clone ID: PAT_MRT4530_75692C.1.pep
MLPAEFGARQANVDEVEDASARLMLSLEQAIFEKPDGTENRHLKPLYINGYVNGKPMSKMMVDGGATVNLMPYATFRKLGRNSDDLIKTNMVLKEFVDNPSETRGVLNAELTVSRKGSYSLLLGRDWIHANCCIPSTMHQCLIQWQGDKIEIVPADSQLKIESPNYYFEGVTEGLNVYTKDTVDDLDCKNLSPEFRTKLIEXLKEYKDCFAWEYYEMPGLSRSIVEHRLPIKPGVRPYQXAAXRCKADLLEAVRAEVTRLYDAGFIRPCRYAEWVSNIVPVINKNGKVRVCIDFWDLNKATPKDEYPMPVADQLVDAASGHKILSFMDSDAGYNQIFMAEEDVHKITFRCPGAIGLFKWVVMTFGLKSAGATYRRAMNYIFHDLIAXLVEVYIDDVVXKSKDIENHIADLRKVFERXYGLKMNPTKCAFGVSAGXFLRFLVHEMGIEVTQRSINAIKMLQELIGKINFVRRFISNLSRRLRHYLLSNECIVICKADVVKYMLSASILKERVGKWIFALTEFDLRYESPKAIKGQAIADHRDDAIGSVEIVPWTLFFDGSMSTHGCGIGLVIISPWGASFGFAYTIKPYATNNQVVYEAVLKGLQLLKEVEADAIKIMGDSLLVIYQLAGEYECKNDTLMVYNEKCRQLMDGFRLVTLKHVSREQNVEANDLAQGASGYKLMMKDITIEVATIAADDWRFDVFQYLQNPSQSASRKLRYKALKYTLLDDELYYRTIDGVLLKCLCADQAKVAIGEVHEGICGTHQSAHKMKWLLRRAGYFWLTMLENYFRYYKGCQDCQKFGAIQRAPASAMNPIIKPWPFRGWGINMIGMINPPSSKGHKFILVATDYFTKWVEAFPLKKVDSGDAIQLVQEHIIYRFGIPQTITTDQGSIFVSDEFVQFADSMCIKLLNSSPCYAQANGQAEASNKSLFKLIKRKISDYPRQWHTKLAEALWSYRMACHGSIQVPHYKLVYGHEAVLPWXVRFGLRRMDLQDKLTADEYYNLMADEKEDLVQSRLRALAKVTKDKERIARHYNKKVVPKSFSKXELVWKLILPIRTRDNKFGKWSPNWEEPFQIHKVVSKGVYMLQGFDGEVYGRALNSKYLKKYYPSVWVNA

SEQ ID NO: 178104 - protein, 889 aa, Oryza sativa
  unsure (1)..(889): unsure at all Xaa locations
  Clone ID: PAT_MRT4530_75693C.1.pep
MEAKLAENLARSGPTANANPVSKDWSLTREIAIGGKKMSGYLISRWGQCAPRTGIEQILEKLAEEVEEIRGRIQKVKEKTTVLGNFVNLAHPMQVFPDEMSKVDKSKLMCDACEYGKHTRTTYISRGLRSILPFVLVHSDVWTSPIASNGVAERKNRHILEVTRSLMYTMNVPKFLWSEAVITATYLINRMPSRILGMKTPYEMVFGKNEFXFLQKCLGVLVLSEIIDHPLENWILEPSSVFLXVTLLGKRDINVGVHLSGELLLVWMLLLESLXPFYGERTDLSSLFVDLDNPIIDEDGQEGENGSSGEEFETGGEETNLPIAIRKGVRSNAGKPPQRYGFEAQGVNDDKNNIANYVSYASLSSTYKAFVTSLNSVEIPNDWREAKQDPRWHQAMLEELEALEKNKTWDLVPFPKGKKVVNCKWVYTVKQNPDGNVERYKARLVAKGYSQTYGIDYDETFAPVAKISTVRTLISCAANFDWPLHQLDVKNAFLHGDLQEEVYMEIPPGFATSQTEGKVLRLKKSLYGLKQSPRAWFDRFRRAMCGMGYKQCNGDHTVFYRHNRGLKTILVVYVDDMIITGDDCLKISRLKENLSKEFEVKDLGQLKYFLGIEIARSPRGIVLSQRKYVLDLLSDTGMLGCRPASTPIEQNHKLCAESGDPVNKERYQRLVGRLIYLCHTRPDITYAVSVVSRYMHDPRSGHMDVVYRILRYLKASPGKGIWFKKNGHLDVEGYCDADWGSCLDDRRSTSGYCVFIGGNLVSWRSKKQSVVSRSTAEAEYRSMSMSLSELLWLKNLLAELKLSTSTSMKLWCDNKSAINIANNPVQHDRTKHVEIDRFFIKERMDEGTLNLGFVNSGEQVADSLTKALGARECTSSCSKMGMIDIYRPS

SEQ ID NO: 178105 - protein, 259 aa, Oryza sativa
  unsure (1)..(259): unsure at all Xaa locations
  Clone ID: PAT_MRT4530_75694C.1.pep
GEYECKNGTLMVYNERCRELMDGFRLVTLKHLVQEYIIYRFGIPQTITTDQGSIFVSNEFVQFADSMGIKMLNSASYYAQANGQAEASNKSLIKLIKRKISDYPRQWHTRLAEALWSYRMACHGXFEAVLPWEXDLQNELSANEYYNLMADEKEDLVQSRLRALAKATKDKERVAQHYNKKVVPKSFSEGELVWKLILPIGTRFSWRDKWSPNWEGPFQIHKVVSKGACMLQGFDGEVYGRALNDKYLKKYYPSVWVIA

SEQ ID NO: 178106 - protein, 822 aa, Oryza sativa
  Clone ID: PAT_MRT4530_75695C.1.pep
MGEIQGIEQILEKLAEEVEEIRGRIQKVKEKTTVLGNFVNLAHPMQVFPDEMSKVDKSKLMCDACEYGKHTRTTYISRGLQSILPFVLVHSDVWTSPIASVTLLGKRDINVGVHLSGELLLVWMLLLESVQFYGERTDLSSLFVDLDNPIIDEDGQEGENGSSGTEEDTQSRSMKFVVGSIPYPVSEPIHEQNWRRPREEENLQVYTRRKTRSLEAQTMGQHESPMDGMEQQQSSIVAEVGDKPSDQCDTIQISSDTEGEEFETGGEETNLPIAIRKGVRSNAGKPPQRYGFEAQGVNDDENNIANYVSYASLLSTYKAFVTSLNSVEIPNDWREAKQDPRWHQAMLEELEALEKNKTWDLVPFPKGKKVVNCKWVYTVKQNPDENVERYKARLVAKGYSQTYGIDYDETFAPVAKMSTLDVKNAFLHGDLQEEVYMEIPPGFATSQTEGKVLRLKKSLYGLKQSPRAWFDRFRRAMCGMGYKQCNGDHTVFYRHNRGLKTILVVYVDDMIITGDDCLEISRLKQNLSKEFEVKDLGQLKYFLGIEIARSPRGIVLSQRKYVLDLLSDTGMLGCRPASTLIEQNHKLCAESGDPVNKERYQRLVGRLIYLCHTRPDITYAVSVVSRYMHDPRSGHMDVVYRILRYLKASPGKGIWFKKNGHLDMEGYCDADWGSCLDDRRSTSGYCVFIGGNLVSWRSKKESVVSRSTAEAEYRSMSMSLSELLWLKNLLAELKLSTSTSMKLWCDNKSAINIANNPVQHDRTKHVEIDRFFIKERMDEGTLNLGFVNSGEQVVDSLTKALGARECTSSCSKMGMIDIYRPS

SEQ ID NO: 178107 - protein, 147 aa, Oryza sativa
  Clone ID: PAT_MRT4530_75696C.1.pep
SIPNRFPGGGSHLSVTGLGGCGPHGERSGGAARAINRRRQRRRRRRDGARGARRGGGEVVAARPLALRHRQRREPVLRGGGEAGAEPRAGGGRGAQGPRRRRRRRGRVTSLCAGEVIPACVETASLFELETSYIFAYLVSCFMKFSQ

SEQ ID NO: 178108 - protein, 41 aa, Oryza sativa
  Clone ID: PAT_MRT4530_75697C.1.pep
YSISRGSRTYIMCLSNPGDDYLHHQAEVNKKGKLPPPGYVR

SEQ ID NO: 178109 - protein, 917 aa, Oryza sativa
  unsure (1)..(917): unsure at all Xaa locations
  Clone ID: PAT_MRT4530_75698C.1.pep
MGEIQGIEQILEKLAEEVEEIRGRIQKVKEKTTVLGNFVNLAHPMQVFPDEMSKVDKSKLMCDACEYGKHTRTTYISRGLRSILPFVLVHSDVWTSPIASNGVAESKNRHILEVTRSLMYTMNVPKFLWSEAVMSATYLINRMPSRILGMKTPYEMVFGKNEFXFLQKCLGVLVLSEIIDHPLENWILEPSSVFLXVTLLGKRDINVGVHLSGELLLVWMLLLESLXPFYGERTDLSSLFVDLDNPIIDEDGQEGENGSSGDKPSDQCDTIQISSDTEGEEFETGGEETNLPIAIRKGVRSNAVKQNPDGNVERYKARLVAKGYSQTYGIDYDETFAPVPKMSTLDVKNAFLHGDLQEEVYMEIPPGFATSQTEDADITYAVSVVSRYMHDPRSGHMDVVYRILRYLKASPGKGIWFKKNGHLDVEGYCDADWGSCLDDMRSTSGYCVFIGGNLVSWRSKKQSVVSRSTAEAEYRSMSMSLSELLWLKNLLAELKLSTSTSMKLWCDNKSAINIANNPVQHDRTKHVEIDRFFIKERMDEGTLNLGFVNSGEQDILHHVYSLMPLKDAARAACVSHGFLRCWRRYPILILNNKTIGLIKRKLSLDDMESYAVSKIDHIIKSHSGIGVKVLKLQLFACPNISAAVLDKCDIVQFKVPCLMQQLKYLEVTKCQMLQVIEIDAPKLSTFIYGDVGVKISLGDPLQVKDIRLMGYNEADTVCYARTKLPSILPNIESLVVSSPNEMTSTPVVPSKFLHLKFLEIYLKELFASLPSYDFFSLVSFLDASPALETFILHVEQQFERHDSILDGEPTDLRRILHDGHANLQNVTITGFNSTKSMIELTTHILENAPSLKCITLDTANFSGKNHLAMGECSPMMRGGILEARRAFEAARRHIAGKIPSFVEYKFLEPCRHCHFGY

SEQ ID NO: 178110 - protein, 92 aa, Oryza sativa
  Clone ID: PAT_MRT4530_75699C.1.pep
QWLYCSAGRKCMSRKRRCPVHKFASACTSPIKQFIQSRDYRACCVSCQFLPFIDRMYTKELPWPLASSVRSRFQYGIQGWGSIQVLVIKTYM

SEQ ID NO: 178111 - protein, 276 aa, Oryza sativa
  unsure (1)..(276): unsure at all Xaa locations
  Clone ID: PAT_MRT4530_7569C.1.pep
QSVPLPGRRRHPRRRGREMAGDGEEVAAGGGGETGGRQGQCHGGRATAAAARSRRGHGAGVGVAWRWLTGGQPPVRQGASSARGGXLVTHGRRCADVELAGXRLVLAEDANESLAVLLAGSTTTAPVGVVSLLGGVVMAFFHXPHKSPGENLVTIYGQAAAALRVVSSLGVSLRRSSNASMTVDGPFRFKIFHTLCSERLXPSWGPLHSCGGRHALRLFLLMXSKLLADGLGNDNTSSAMWEQLCCFCVXLGGDVLRLGSAAIVSYVATMGAGGGG

SEQ ID NO: 178112 - protein, 53 aa, Oryza sativa
  Clone ID: PAT_MRT4530_756C.1.pep
KIFIICYNKQDADNANSRYFLRYIDIVLLINFHFLLYFSFFTNPISISQFLYF

SEQ ID NO: 178113 - protein, 970 aa, Oryza sativa
  unsure (1)..(970): unsure at all Xaa locations
  Clone ID: PAT_MRT4530_75700C.1.pep
MGEIQGIEQILEKLAEEVEEIRGRIQKVKEKTTVLGNFVNLAHPMQVFPDEMSKVDKSKLMCDACEYGKHTRTTYISRGLRSILPFVLVHSDVWTSPIASNGVAERKNRHILEVTRSLMYTMNVPKFLWSEAVMTATYLINRMPSRILGMKTPYEMVFGKNEFXFLQKCLGVLVLSEIIDHPLENWILEPSSVFLXVTLLGKRDINVGVHLSGELLLVWMLLLESLXPFYGERTDLSSLFVDLDNPIIDEDGQEGENGSSVEIPNDWREKKQDPRWHQAMLEELEALEKNKTWDLVPFPKGKKVVNCKWVYTVKQNPDGNVERYKARLVAKGYSQTYGIDYDETFAPVAKMSTLDVKNAFLHGDLQEEVYMEIPPGFATSQTEGMLGCRPASTPIEQNHKLCAESGDPVNKERYQRLVGRLIYLCHTRPDITYAVSVVSRYMHDPRSGHMDVVYRILRYLKASPGKGIWFKKNGHLDVEGYCDADWGSCLDDMRSTSGYCVFIGGNLVSWRSKKQSVVSRSTAEAEYRSMSMSLSELLWLKNLLAELKLSTSTSMKLWCDNKSAINIANNPVQHDRTKHVEIDRFFIKERMDEGTLNLGFVNSGEQDILHHVYSLMPLKDAARAACVSHGFLRCWRRYPILILNNKTIGLIKRKLSLDDMESYAVSKIDHIIKSHSGIGVKVLKLQLFACPNISAAVLDKCDIVQFKVPCLMQQLKYLEVTKCQMLQVIEIDAPKLSTFIYGDVGVKISLGDPLQVKDIRLMGYNEADTVCYARTKLPSILPNIESLVVSSPNEMTSTPVVPSKFLHLKFLEIYLKELFASLPSYDFFSLVSFLDASPALETFILHVEQQFERHDSILDGEPTDLRRILHDGHANLQNVTITGFNSTKSMIELTTHILENAPSLKCITLDTANFSGKNHLAMGECSPMMRGGILEARRAFEAARRHIAGKIPSFVEYKFLEPCRHCHFGY

SEQ ID NO: 178114 - protein, 1056 aa, Oryza sativa
  Clone ID: PAT_MRT4530_75701C.1.pep
MGEIQGIEQILEKLAEEVEEIRGRIQKVKEKTTVLGNFVNLAHPMQVFPDEMSKVDKSKLMCDACEYGKHTRTTYISRGLRSILPFVLVHSDVWTSPIASNGVAERKNRHILEVTRSLMYTMNVPKFLWSEAVMTATYLINRMPSRILGMKTPYEMVFGKNEFIVPPKVFGCTCFVRDHRPSVGKLDPRAVKCIFIGYSSGQKGYKCWSPSERRTFVSMDVTFRESVPFYGERTDLSSLFVDLDNPIIDEDGQEGENGSSGDKPSDQCDTIQISSDTEGEEFETGGEETNLPIAIRKGVRSNAGKPPQKYGFEAQGVNDDENNIANYVSYASLSSTYKAFVTSLNSVEIPNDWREKKQDPRWHQAMLEELEALEKNKTWDLVPFPKGKKVVNCKWVYTVKQNPDGNVERYKARLVAKGYSQTYGIDYDETFAPVAKMSTLDVKNAFLHGDLQEEVYMEIPPGFATSQTEGMLGCRPASTPIEQNHKLCAESGDPVNKERYQRLVGRLIYLCHTRPDITYAVSVVSRYMHDPRSGHMDVVYRILRYLKASPGKGIWFKKNGHLDVEGYCDADWGSCLDDMRSTSGYCVFIGGNLVSWRSKKQSVVSRSTAEAEYRSMSMSLSELLWLKNLLAELKLSTSTSMKLWCDNKSAINIANNPVQHDRTKHVEIDRFFIKERMDEGTLNLGFVNSGEQDILHHVYSLMPLKDAARAACVSHGFLRCWRRYPILILNNKTIGLIKRKLSLDDMESYAVSKIDHIIKSHSGIGVKVLKLQLFACPNISAAVLDKCDIVQFKVPCLMQQLKYLEVTKCQMLQVIEIDAPKLSTFIYGDVGVKISLGDPLQVKDIRLMGYNEADTVCYARTKLPSILPNIESLVVSSPNEMTSTPVVPSKFLHLKFLEIYLKELFASLPSYDFFSLVSFLDASPALETFILHVEQQFERHDSILDGEPTDLRRILHDGHANLQNVTITGFNSTKSMIELTTHILENAPSLKCITLDTANFSGKNHLAMGECSPMMRGGILEARRAFEAARRHIAGKIPSFVEYKFLEPCRHCHFGY

SEQ ID NO: 178115 - protein, 1052 aa, Oryza sativa
  unsure (1)..(1052): unsure at all Xaa locations
  Clone ID: PAT_MRT4530_75702C.1.pep
MQVPNSTWILDSGASRHVTGMSSEFTSYTPFQSSFKETIQTADGTLRHVRGVGTVKCTPSITLSSVLYAPSFPVNLVSVSSLVDHMDCRITIDRENCLIEERRTGRKLGTGVRHNGLWYLDRRGTDKALCSALLASTSEEEAKLILKHCQLGHMSFDTMSKVFPDEMSKVDKIKLMCDACEYGKHTRTTYISRGLRSILPFVLVHSDVWTSPIASVSGAKYFVTFIDCHSRITXIYLIRRKSEVLKCFKNFYAWVRNQXNTCVKXIRSDNGGEYVNDEFRSFLSAEGIVHQTSCADTPPQNGVAERKNQHILEVTLLGKRDINVGVHLSGELLLVWMLLLESLXFYGERTDLSSLFVDLDNPIIDEDGQEGENGSSGTEEDTQSRSMKFVVGSIPYPVSEPIHEQNWRRPREEENLQVYTRRKTRSLEAQTMGQHESPMDGMEQQQSSIVAEVGDKPSDQCDTIQISSDTEGEEFETGGEETNLPIVIRMGVRSNAGKPPQRYGFEAQGVNDDENNIANYVSYASLSSTYKAFVTSLNSVEIPNDWREAKQDPRWHQAMLEELEALEKNKTWDLVPFPKGKKVVNCKWVYTVKQNPNGNVERYKARLVAKGYSQTYGIDYDETFAPVAKMSTVRTLISCAANFDWPLHQLDVKNAFLHGDLQEEVYMEIPPGFATSQTEGKVLRLKKSLYGLKQSPRAWFDRFRRAMCGMGYKQCNGDHTVFYRHNRGLKTILVVYVDDMIITGDDCLEISRLKQNLSKEFEVKDLGQLKYFLGIEIARSPRGIVLSQRKYVLDLLSDTGMLGCRPASTPIEQNHKLCAESGDPVNKKRYQRLVGRLIYLCHTRPDITYAVSVVSRYMHDPRSGHMDVVYRILRYLKASPGKGIWFKKNGHLDVEGYCDADWGSCLDDRRSTSGYCVFIGGNLVSWRSKKQSVVSRSTAEAEYRSMSMSLSELLWLKNLLAELKLSTSTSMKLWCDNKSAINIANNPVQHDRTKHVEIDRFFIKERMDEGTLNLGFVNSGEQVADSLTKALGARECTSSCSKMGMIDIYRPS

SEQ ID NO: 178116 - protein, 134 aa, Oryza sativa
  unsure (1)..(134): unsure at all Xaa locations
  Clone ID: PAT_MRT4530_75703C.1.pep
DCGGGDGATARTIVEAFPHVKCTVLDLPRVIGDKXTDGVVSYVAGDXLSFIPPAQAVMLKVVLHHWSDQDCVKILAHCKKAIPSREAGGKVIIIDVVISSTSGPLLEAELLMDVGMILIGKGQQRDENKWCDLF

SEQ ID NO: 178117 - protein, 311 aa, Oryza sativa
  unsure (1)..(311): unsure at all Xaa locations
  Clone ID: PAT_MRT4530_75704C.1.pep
SWFIFTPHPANLKSWLRTCTAPFFLQLRSLPAEGESCIVLPATQDAAHAPLPPFYEHIVSGGGGRLFARQSPQAASAVRARRCPRRRRRVDGGISAAVCPDGRASPDAKERHVRAEDGGEALLVVWAQIGGGLLILAISHHYRHRRRSPTPNISLPAACLRPGSRXSSCGRCPRRRPVREVWKGPLPKFLPVAVARSLPRPDVFAVPLAQVDWALLARHVTRRRGEDMVRKCSSSTSSPTDRTQSARLLGHAAATVTSPLAMEVSTLFACTARLASACACELSNHAVDADATGNLRATPKSPRPKTQHATA

SEQ ID NO: 178118 - protein, 56 aa, Oryza sativa
  Clone ID: PAT_MRT4530_75705C.1.pep
SRRRRRGRSRRLPVLFCFFLATGCLAAHVQPARDPDIGIDDGRQAGPCTARRRQLS

SEQ ID NO: 178119 - protein, 63 aa, Oryza sativa
  unsure (1)..(63): unsure at all Xaa locations
  Clone ID: PAT_MRT4530_75706C.1.pep
EIKFSPRWEKGGNWDCVEKTQGVKKGPSXGVFKVKPKKTPFKEVPPGKENGGXKWGPSCSCPD

SEQ ID NO: 178120 - protein, 52 aa, Oryza sativa
  unsure (1)..(52): unsure at all Xaa locations
  Clone ID: PAT_MRT4530_75707C.1.pep
LRGVVXAPLPAFLPAAARSWNRPSCSLVHPVVGSCWGSLAVAGRRGGRRPPR

SEQ ID NO: 178121 - protein, 70 aa, Oryza sativa
  unsure (1)..(70): unsure at all Xaa locations
  Clone ID: PAT_MRT4530_75708C.1.pep
RTRTALCGRRALHVRFIEPHYHHACYVAFVKEIRETPNVKYGAXDPHQTTAYRNLLHLIKELQAVDQYPK

SEQ ID NO: 178122 - protein, 248 aa, Oryza sativa
  Clone ID: PAT_MRT4530_75709C.1.pep
MSGNIAFGRFDDSFSAASLKAYVAEFISTLVFVFAGVGSAIAYTKLTGGAPLDPAGLVAVAVCHGFGLFVAVAIGANISGGHVNPAVTFGLALGGQITILTGVFYWIAQLLGAIVGAVLVQFCTGVATPTHGLSGVGAFEGVVMEIIVTFGLVYTVYATAADPKKGSLGTIAPIAIGFIVGANILVAGPFSGGSMNPARSFGPAVASGDYTNIWIYWVGPLVGGGLAGLVYRYVYMCGDHAPVASSEF

SEQ ID NO: 178123 - protein, 766 aa, Oryza sativa
  Clone ID: PAT_MRT4530_7570C.1.pep
MAFQFHTLLSAVTIWLGVAAATARLHAAVAGARAPPPPPPPGNCQRKCGDVDIPYPFGVWNGSESDGCAVPGFYLNCDVDDNHVYRPFHGNVEVLSISLPTGQARVTNSISSACYNTSSRDMDYNDWQINFTGTPLTISDADNKFTVVGCQTLAYITDDDNMGKYTSGCVAMCQGGDLTSLATNGSCSGIGCCQTAIPRGLKYYRVRFDTGFNTSEIYNVSRCSYAVLMESKAFSFRTSYVSSLEFNSSNGGRVPLVVDWAIGNETCDKARRKVDTYACVSHNSKCFNSSNGPGYICNCSEGYQGNPYLQDGQHGCTDIDECADPKYPCSVPGTCHNLPGGFECLCPRSRPKGNAFNGTCERDQTLHTGGKVAIGISGFAIVGLVVFLVREVIQHKRSIKRQALQRQTDMYFQQHGGQILLELMKVESSAEFTLYDREKIEVATNNFAKENIVGKGGQGTVYKAVLDGTTVAIKRCNEVDESRRADFVQELVILCRVNHPNIVKLVGCCLQFEAPMLIYEFVQNKTLQELLDLQRSRKFHVTLATRLRIAAESANALAHLHSLPRPILHGDVKPANILLAEGLVAKVSDFGCSTIDEKTQAVVKGTPGYLDPDYLLEYQLTAKNDVYSFGVILLELLTGKKPLSKERTSLIPIFQGAMESGKLVELLDSDIVDEANMGVICQAASLASQCLANPSSSRPTMRQVAEQLRRLALADEVQQCPQPPLVLDGLILTEMGSTTSSWYTGSGTSGVYNLENNVVLSTEFAR

SEQ ID NO: 178124 - protein, 98 aa, Oryza sativa
  Clone ID: PAT_MRT4530_75710C.1.pep
MWDREASDGRCGGVATRRRRAGSRRGKSCAWATGDGGGAAEGGAYPGLCCCLSLPLDRISLWLTVSLLLQVAEQLRAVTAHRRKTERAEGEVLAILES

SEQ ID NO: 178125 - protein, 370 aa, Oryza sativa
  unsure (1)..(370): unsure at all Xaa locations
  Clone ID: PAT_MRT4530_75711C.1.pep
LLTTIDTSNYWLLKLNPGKYTFGVPSGKLLGFLVSGRGIEANLEKVKAIENMKSSTKLKEVXKLTKCIATLSXFVASMGEREPSFFAFLKKXDKFEWTQDVENAFIALKRYLSXPPVLVVRQPVEELFLYIAATPYSVSTVIVVERDKVQHPIYYVSEVLHDAKTQYPQIQKLLYAVIMTSWKPLHYFXAHKVTVISSFPLCEVVRNKDVVGRIAKWVIKLSQFNVHFVLRTAIKFQVLADFVTDWTIPDNSIADQTDNETWXMTFDRALNSQRAGAGFILTSLTGDRFRHAIHLNFRATNNIAKYEGLPSGLRAAVALGVKRLIVKGDSELVANQVHKDYKCSNPELAKYLTDVRKLERKFDGVEIRHQ

SEQ ID NO: 178126 - protein, 127 aa, Oryza sativa
  unsure (1)..(127): unsure at all Xaa locations
  Clone ID: PAT_MRT4530_75712C.1.pep
MADKTLREFAAPSANNVAIGPQINMGDVDFDLKSSLITMAQASPFCGKPNEDANTHLQQFLEICSTYTIKXDKCSTAFHSKFFPMGKTNALRGSISXFQQTRDESIPEAWERLQEYVAACPHHGMDD

SEQ ID NO: 178127 - protein, 135 aa, Oryza sativa
  unsure (1)..(135): unsure at all Xaa locations
  Clone ID: PAT_MRT4530_75713C.1.pep
VMLMLILLVLRKKLRFCGAQLHDSQCSGGIVAFRYNDLCHATKNFSEKLGGGGFGSVFKGVLSDSTIIAVKKLDGARQGEKQFRAEVSSIGLIQHINLVKLIGXFCCEGDGRLLVYDHMVNGSLDAHLFQFXGGV

SEQ ID NO: 178128 - protein, 412 aa, Oryza sativa
  Clone ID: PAT_MRT4530_75714C.1.pep
MASTKIKVANPIVEMDGDEMTRVFWKSIKDKLIFPFLELDIKYFDLGLPYRDQTDDKVTVEAAEATLKYNVAIKCATITPDEARVKEFSLKSMWKSPNGTIRNILNGTVFREPIICKNIPRLVPGWTKPICIGRHAFGDQYRATDAVIKGPGKLKLVYEGKDEEIELEVFNFTGAGGVAQSMYNTDESIRSFAEASMATAYEKKWPLYLSTKNTILKKYDGRFKDIFQEVYETKWRAKFDDAGIWYEHRLIDDMVAYALKSEGGYVWACKNYDGDVQSDLIAQGFGSLGLMTSVLVCPDGKTIEAEAAHGTVTRHYSVHQKGGETSTNSIASIFAWTRGLAHRAKLDDNARLLDFTQKLEAACIGAVESGKMTKDLALLVHGSSNVTRSHYLNTEEFIDAVADELRSRLAAN

SEQ ID NO: 178129 - protein, 69 aa, Oryza sativa
  Clone ID: PAT_MRT4530_75715C.1.pep
METQFRFLGNNSLTGSLPDVKSSSLNNLYAKMIFGIAMIYSFHTFVILGFLQRFFVQPTHGTLSFMGYQ

SEQ ID NO: 178130 - protein, 50 aa, Oryza sativa
  Clone ID: PAT_MRT4530_75716C.1.pep
NLNKVQDQLLLISQSYSISVYICMYNHLYASYNRVRMHVKVHALLLTASR

SEQ ID NO: 178131 - protein, 38 aa, Oryza sativa
  Clone ID: PAT_MRT4530_75717C.1.pep
LILFSVLWVTRSHQFVSIMLTPIVRAFLRKDNSIMRTS

SEQ ID NO: 178132 - protein, 198 aa, Oryza sativa
  Clone ID: PAT_MRT4530_75718C.1.pep
MDYGDGEVRLVRRKGKKRLAPPPPPPPAAERGERDRLDELRRDYRDVLKDNEMKRRKLESINKRKLVLLSEVKFLQKKLNSFKKNDSQQVRLKKKAPRVPSHVGINDASAFYGASTEVPSTSKRTDLDLNQDSAMNDELSDFPGHHNHLELKKAEQAGVDEDIMTADVNLSACRDTGNSPASDDKRSVSWQDRVALKV

SEQ ID NO: 178133 - protein, 733 aa, Oryza sativa
  unsure (1)..(733): unsure at all Xaa locations
  Clone ID: PAT_MRT4530_75719C.1.pep
PAIIMIIILFFGIKICXFMTKFPTFQKFDRSFLVVGFVALLKPHAFDGPNYKRWKACALLWLMAMQCFFASRGKMSEQPVSPEKEAKFEVTDCLFRVALINVLADNIVDMYMHMPSGKDMWDALEAKFGVSDAGSELYVMEQFYDYNMVDDXSVVEQAHEIQMLAKELENNKCVLSDKLVAGGIIAKLPHSWSDFATSLKHKRQEFSVTDFIGSLGVGEKARAKDNRGXKVEGGSSANLVQKKNPHASHNNKKVKPDVKPKTTINSKKKGKEKVKGDYFVCGKLGHWAKDCPDRKDKNSANMVVSNGRGTMGYGXFLPTILSIFHSPNWRVDNGANSHLCADIFLFSSYQIAGGSSLLMGNRSLAAIHGVGMVVLKFTSGKTLQLKNVQHVPSIKRNLVSGSXSCRDGFILVFKSNRCVVSKYGTFIGXGYDSGGLFRFSLDDRCNIVVNHVSNDDESNVWQXPLCHVNFGCMTRLANMSLISKFTLAKGSKCHTCVQSKQPRKPHKXSEARNLAPLELVHSDMCEMNVVLTKGGKKYFMTLIDDCTRFCXYLLKTNDEALHYFMICKAEVXNQLERKIKQLGSDQGGEYFSTEFTSFCEEFGIFHERMPLYSPQSNGVAERKNRTLTELVNAMLDTAGLSKEWWGEAILTACHVLNRIXLKKEVTSFEEWEKKKLNLSYLRTXGCLAKVNVPIVKKRKLRLKTVDCVFLGYVIHGVGYRFLIANSRVSQQPA

SEQ ID NO: 178134 - protein, 80 aa, Oryza sativa
  unsure (1)..(80): unsure at all Xaa locations
  Clone ID: PAT_MRT4530_7571C.1.pep
MDVAAARPSWSSPPSLAGSGRWWPASCSAGGIFCPWWVSXLMGGDVRTWSWRDDGLCWREAGMGLDVHDDDFLVVGRVFS

SEQ ID NO: 178135 - protein, 97 aa, Oryza sativa
  unsure (1)..(97): unsure at all Xaa locations
  Clone ID: PAT_MRT4530_75720C.1.pep
LFSLGSNCWGGHCNLQSPSLLSPGRHPSWSRQKPLPLPSKVLTGNLGSHPSSPELPDGRXRRLRSTRGLSTRGPGVIGHGLPRRGSTPAAMMASSAW

SEQ ID NO: 178136 - protein, 39 aa, Oryza sativa
  Clone ID: PAT_MRT4530_75721C.1.pep
ASPSFLLLTLFISFPLFDILLPTFSASTPFSEELACSPG

SEQ ID NO: 178137 - protein, 141 aa, Oryza sativa
  Clone ID: PAT_MRT4530_75722C.1.pep
RRGPMDPCSPCSGTRSRACKKRTPAWTSTSRTGPRAAGPRPGGLSTSTMRATERIWSQGKLRSRRNSVVKCRSKKLDYICICQWGHLFDSRQFSSILCRICLPCSNSFVCFICVAKLENCVKFHWEVDTSSAATSRPGHNL

SEQ ID NO: 178138 - protein, 682 aa, Oryza sativa
  Clone ID: PAT_MRT4530_75723C.1.pep
MPAAAAAHHLAGVAAAFLLAVLLHVHLAAGEDEPPPWYLCDPYSASGRYSENSTFQANVNRLSATLPRNTSSSPAMYATGAAGDVPDKVYGYALCRGDVADAHACERCVAAALRDAPRVCPLVKDALVFHDLCQLRYSNRNFLLDDDYYVATYSLQRSSRLVSAPAPAAVAAFDAAVAMLANATAEYAAAANTSRRYGTAEEEGVDGDGDSGRPRMYALAQCTPDKAADVCRACLTTLTTVQLPKLYSGGRTGGGVFGVWCNLRYEVFPFFSGRPLLHLPAFVEAPPPATSAAATRRGEKKRNKTGIVLAIVMPTIAAMLLIVVAYFCCWRRRRPEEQTFLPYDIQSIDSLLLDLSTLRAATDDFAETKMIGRGGFGMVYKGVLPEGQEVAVKRLCQSSGQGIEELKSELVLVAKLYHKNLVRLIGVCLEQQEKILVYEYMSNKSLDTILFDIDKNIELDWGKRFKIINGIAQGLQYLHEDSRLKIVHRDLKASNILLDFDYNPKISDFGLAKIFDGDQSKDITHRIAGTYGYMAPEYAMHGHYSVKLDVFSFGVLVLEIVTGRRNSGSYDSGQDLDLLNHVWGHWTRGNVVELIDPSLGNHPPIEQMLKCIHIGLLCVQKRPASRPTISSVNIMLSSNTVRLPSLSRPAFCIQDVSASDSSNPHSTAVSSNDMSITDLVPR

SEQ ID NO: 178139 - protein, 323 aa, Oryza sativa
  Clone ID: PAT_MRT4530_75724C.1.pep
MTTSSWSGLLVISCMLLMSWAAAAVDMSPVRFDAAYMPLFGGDNLVPSPHARTVLLKLDRFTGSGFVSKSAYHHGFFSASIKLPHDYTAGVVVAFYLSNGDVFPGQHDELDFELLGNRRGHAWHVQTNMYGNGSTGRGREERYLLPFDPTAAPHSYAIAWTPAAVIFYIDAIPIRELVRCSSGDYPAKPMSVYATIWDGSAWATDGGRHKVDYAYAPFTAVFSDLVVTGGTDDDHCAAMGLMTSEVAVMTPAKRGSMRRFRSRHLTYSACYDTVRYNGTGVVFPECDESEQDNFHAWGESKRVINSRSSSSATYATGSGVRID

SEQ ID NO: 178140 - protein, 264 aa, Oryza sativa
  Clone ID: PAT_MRT4530_75725C.1.pep
MTMNTPRPRSQPPPPHPPLFKPTTPPPPPLLSTSTSTSPPHDFSFAHYLSSPPPSVQRRGRADMSRTPPLGRVGSDLSHNNYSSKANQHRQTGSSSSSKEKDREYKAKSKASSPFFSGLGGSWRSGLSRDEEVKRKAKAKTRGLDVGQWVNEYMASMVEHLLASFSRHGGGEREKREQQRRRPHSFSAHGPSALREQRERWRRRRGQLSSAPASLRASPVNSGHLSVGGSVKVSTSSEESTMEELQSAIEAAIAHCKNSITVAK

SEQ ID NO: 178141 - protein, 50 aa, Oryza sativa
  Clone ID: PAT_MRT4530_75726C.1.pep
ILNASMVRPYGDGGSNETEETLIRIAFKGEQSVLMVLVTASYIGSGRVEV

SEQ ID NO: 178142 - protein, 79 aa, Oryza sativa
  Clone ID: PAT_MRT4530_75727C.1.pep
LPINNLSLSLGSLLGTLTQSLRSGVPHAPTVLPSFFGRPPHRRTLGASASTAHDAAASQSDGQSLAPYARTLLRSSDSF

SEQ ID NO: 178143 - protein, 71 aa, Oryza sativa
  Clone ID: PAT_MRT4530_75728C.1.pep
LDIQSTRHQIFRHTPSITCKDNSNYLNQIRQKHHKNITMCGGALIPNDYGDKPPSGSSSLATTTTTTAAFP

SEQ ID NO: 178144 - protein, 96 aa, Oryza sativa
  Clone ID: PAT_MRT4530_75729C.1.pep
FRLLETPHPLLVSSSPRSSLASSSPSSARFPNPPRSRSPPQVACLLRPAPPPPVRRRSPVPARLFLVAWQGYILVLACSFMNDVLPFEGQKCATTI

SEQ ID NO: 178145 - protein, 208 aa, Oryza sativa
  unsure (1)..(208): unsure at all Xaa locations
  Clone ID: PAT_MRT4530_7572C.1.pep
HNPFTHPSHDKSTDPTSQRTAFRTFDDDREPRFGNLRNDRSSAAILGRRRDAASTRLDDVEPRTKTTTGTDARTARNTPLXMTMMXRRSKTMSWVTDGTSTTRMNGDDDDGPRRGLDGGEAMPRKMSPARRCXFRRWWWRGRRCTCGGRADRGNSGEADGEAGVARRCSGEIRATSWQETRQRRNSGSNATVAGEDALPEVSAGNGEH

SEQ ID NO: 178146 - protein, 194 aa, Oryza sativa
  Clone ID: PAT_MRT4530_75730C.1.pep
MEETYTVKVGEATPAAGGKPSAGPVYRSIYSKDGLMKLPEDILSPWDFFSGAVKQYPKNKMLGQRKVSDGKKVIKIGSAIRSLGVKPGGHCGIYGSNCPEWVMAMQACNSQGICYVPLYDTLGANAVEFIMDHAEISIAFVQESKIQSVLSVVKKCRAHIKAIVSFGDVTSELKREAEQLGVSCFSWEEFSSMG

SEQ ID NO: 178147 - protein, 203 aa, Oryza sativa
  unsure (1)..(203): unsure at all Xaa locations
  Clone ID: PAT_MRT4530_75731C.1.pep
MEETYTVKVGEATPADGGKPSAGPFYRSIYYKDGLMNLPEDILSPWDFFSGAVKQYPKNKMLGQRKVSDGMAGDYVWLNXYKKCTRRSYKIGSAIRSLGVKPGGHCGIYGSNCPEWVMAMQACNSQGICYVPLYDTLGANAVEFIMDHAEISIAFVQESKIQSVLSVVKKCRAHIKAIVKFWRCDKVXKREAEQLGVSCFSWE

SEQ ID NO: 178148 - protein, 100 aa, Oryza sativa
  unsure (1)..(100): unsure at all Xaa locations
  Clone ID: PAT_MRT4530_75732C.1.pep
TPSPLPALPPPMRSFPPPRSRPAPPTRGRGKNPRTPSPPAPHPSRHAXGLHPASPPRRRRRRPTQRFALRPPRPPRPCGHSRWSSMSRAAHRCQPRRRGN

SEQ ID NO: 178149 - protein, 77 aa, Oryza sativa
  Clone ID: PAT_MRT4530_75733C.1.pep
LIALSGCGTGVSQSGASRGVGEQSAIAQYREVGTFTRMCWHFSRFYKYHLVGFFNSSGILGHLCFVISICHPYTLLS

SEQ ID NO: 178150 - protein, 206 aa, Oryza sativa
  unsure (1)..(206): unsure at all Xaa locations
  Clone ID: PAT_MRT4530_75734C.1.pep
QHPTTRSTPRSPRPISCRIHPHDPGPTPSPLPALPPPMRSFPPPRSRPAPPTRGRCHQISGNPPAPPPSAPIPPAVPSVVAVXPAPRPPDRQESTHALTPSAPSLPPCIGPXPASPPLPDRRESAVPPPPAPHPSRRCSVSPHRALRRPGPSPTTPXDESPPSYTSIAPPPSSSSNTAIRPPSSTPTAPLRPFTMVLEECHCSAQA

SEQ ID NO: 178151 - protein, 170 aa, Oryza sativa
  Clone ID: PAT_MRT4530_75735C.1.pep
MMLRDMWIRRGVSGRTPGLPGTIWSGPNLVLVWDPSRWHMVNLCRLSKCLVMKALRSLVVAVLHGLDDPEVIKTVRTAVPTVMGGCEKDTVALTQGGADVSSSTLGVTGLNGGDDDDNKRQGLGFEVGVNEMAKSDGLAGKRPAATWRRLETELEVTPDPRGAWGGDRSN

SEQ ID NO: 178152 - protein, 218 aa, Oryza sativa
  unsure (1)..(218): unsure at all Xaa locations
  Clone ID: PAT_MRT4530_75736C.1.pep
MAQETFLFTSESVNEGHPDKLSDQISDAELDACLEQDPDSKVACETCTKTNMVMVFGEITTKANVDYEKIVRDTCREIGFISDDVGLDADKCKVLVNIEQQSPDIAQGVHGHFTKRPEEVGAGDQGHMFGYATDETPEYMPLSHVLATKLGARLTEVRKNGTXAWLRPDGKTQGTVEYYNDNGAMVSVRVHTVLSFTQHDETVSNDQIAADLXEHVIK

SEQ ID NO: 178153 - protein, 271 aa, Oryza sativa
  Clone ID: PAT_MRT4530_75737C.1.pep
LGMLSGRAVTLHHRSDSGERLVGNVVPDEAESGEEAEASSKVLYRASFQELMPNYLQYDTIIWAVISLLLVLAWGVGLLMLLYLPYKRYVLKKDIFSRKLYVTENKIVYKASRPSYIPFMGIVKKEIEVPLQLVVDVIIEQGCLQSVYSLYTFKVESIASGKPAPLDELQFHGVHNPDLLKTVIIREASKRIQEHQSWKYRIYSGEGPSDVTPIDRLDSPNAKVTASSRHNFQESKGRIPKSDSILLHKLEEVCQSVKNLESLLLGSHSRA

SEQ ID NO: 178154 - protein, 64 aa, Oryza sativa
  unsure (1)..(64): unsure at all Xaa locations
  Clone ID: PAT_MRT4530_75738C.1.pep
MEVAAPAMLAPSSLGRRQHGWRPPLATSVRVRHGGRRTAPERLAPSRWMTATATLAPXKGPFLG

SEQ ID NO: 178155 - protein, 943 aa, Oryza sativa
  Clone ID: PAT_MRT4530_75739C.1.pep
MDSRMDQYEVMEQIGRGAFGAAILVNHKTEKKKYVLKKIRLARQTERCRKSAHQEMALIARLQHPYIVEFKEAWVEKGCYVCIVTGYCEGGDMAELMKKANGTYFPEEKLLKWFAQLALAVDYLHSNFVLHRDLKCSNIFLTKDQDIRLGDFGLAKTLKADDLTSSVVGTPNYMCPELLADIPYGFKSDIWSLGCCMYEMAAHRPAFKAFDMAGLISKINRSSIGPLPPCYSPSMKSLIKSMLRKSPEHRPTASEILKSPYLQPYVNQYRPFADISHPIHSLEKPITSSRSSQKSMSGSQCSSISGSDIDSIQSSERNTSGPSTSSNNTIDTEGAEATDHVSVKNCSRSDDVKSNKETVGPELERQDSSKSIHVDQRPRNEIKQPKIIKKILTTLREESKLRQNNSPIRASRVKLNSPSNREQLSDDSKHSSDISSSSKSSEVTSRESAKVICEPVKRAQASPPLKHLSPIVEHSPKAKIKQDEPLQPDPAKQAMEDVDAAVGKVKNRTPPSYSRRLSIPPRRPLGAESPLHADTKRAHNKVIKERAKSPCRPVHGPDNDIIEPPGFPMAPPSPLGGVQMKVGNARAKSAPPRAVSIKEDSSDCSSSTIAYAENTELSEPSKQDSSAQLVSSCKCSIPGAAIQKHDLTAMPSSELNTTNFQKSMASNDDVCENLALEPSSDISEQVSIFKDNVPCSKISQSTANAIVQNDEDKFTVQELLSSVADIAPFVSTKNFALEKGSPPIQSLERTSSPHLNPPIEDVIHVIRHSSFRVCGEQAVAENAEMGVQSSDVGKLLNVVREEVDSRSIPSNNLVPHRLPDCAAPKPNISETNTISSKTACSDVVKFLTVPEVNSTTTAINNGFKEEASPTKEILDVKSFRQRAEALEGLLELSADLLQHNRLEELAVVLKPFGKDKVSPRETAIWLAKSFKGMMNDEASRSSM

SEQ ID NO: 178156 - protein, 49 aa, Oryza sativa
  Clone ID: PAT_MRT4530_7573C.1.pep
CLIHILSLFFLAEAYDSLDPNGNITIKWDVMQWTPDGYVVSSTSIIRIN

SEQ ID NO: 178157 - protein, 147 aa, Oryza sativa
  unsure (1)..(147): unsure at all Xaa locations
  Clone ID: PAT_MRT4530_75740C.1.pep
MAPEETPLAAAAADDGGGNELSALAILDDDAALGAHPDQRRRILLQRSKQLALVAVDDLQQRPTATYPVSDRGNKAPLCPVRRFRLDPVCGADGVTYWCCYPEAACAGTRVXAWRRYCKGGAGSTPVSGHVLLAVYARHYNHACLPL

SEQ ID NO: 178158 - protein, 80 aa, Oryza sativa
  Clone ID: PAT_MRT4530_75741C.1.pep
YGLHLYASTRFSVGMVCFGFLVFYGCVFVSAAGRGELEGNGSSLQVEESWSGMASASEANGLCCHSRLTLEVLFFFSSYR

SEQ ID NO: 178159 - protein, 659 aa, Oryza sativa
  Clone ID: PAT_MRT4530_75742C.1.pep
MAEERENFESQWVPSDVIEETLKEMMAHGVLPAKENIGWHPAFGEAFPTPDTHEIVVFTHFFYGASQALELLDRLLRLKEQGLQEEQITQHFIKCRLAPIKERSRTAFEYDGKTDPNREDPNSLEFKIMKERMYKIFSSGIVVSFSHLLPIVPYNAFNPPPAAKLPGVQRFNPWPKRDAIPPSQTVSRKRKMIVSDDDDSDDGPVGKQPKKAIPPKKKTTSHPMPKIRRSSRKPSDIDPTGKNSDPSTSSGAAEEEKTSSAAVAGTNTSKENPPTSSQSATGETEADNEPPTGNQSASAEASTSQEPPTGNQPGEDKENPQQQNVDGEKNIPETEEQTSRPPLNQDTDAGPEASTFDKVEGPARPPPTIITGPMIGDEEEILRIKSTEDSRPPILVKWWDDEMQPQGIVINKQKEDGEVALLTRTLNQATRLLNRIHLRNEAKTDTLEKLVPHLGTLEETRAKLHETKEEARNTEHELRDRIAELQDANFELSGSSKVQAAKISELEKRIKALEDEAALPKEKDLAVKEFEDHKGKTKAQFDFLINKAMYLSNSGTSSLDTVEIFDKLRTALDVYFKNIKEAGNMGASMALAMTKSLYPKINVDAIDGFAAGTSEEDAHDLINDAQKTAERIAVDVLDRFQNTSLSPANSDDGEDDSDE

SEQ ID NO: 178160 - protein, 111 aa, Oryza sativa
  unsure (1)..(111): unsure at all Xaa locations
  Clone ID: PAT_MRT4530_75743C.1.pep
TSAPCKRLSTRDSRASHVTSPPGARHGHHARALRGLRRRGGEVPAAAGAARRRSPARPTXTDPAAAAEAPPTSYSRTRATFPPPPXLCRCSPASVSTRSXRRRCPCSPTST

SEQ ID NO: 178161 - protein, 133 aa, Oryza sativa
  Clone ID: PAT_MRT4530_75744C.1.pep
MCRLDPSTVPGATDGTCRMHTQTTAVVSSPRKKPREEVYVFLTDQFTSQPPIAPARGRGTRAAWCQPDYRSKAWRARLPPLPATNPAPRSGTVTLSIGRFRNRFRSAAPAPPRHRHCTHIDFATAMRLSSFSA

SEQ ID NO: 178162 - protein, 473 aa, Oryza sativa
  Clone ID: PAT_MRT4530_75745C.1.pep
MGMVARKWISKRQEGRAVRQLAVSGSSTGAAALLPVGVARHRTDGQMGGRSLAGLDGQVRRWGGEGEVAGARRGRRSGTGAQSGARRRTRSGAQCGCGAGAAARDAGGELMRVGPPKQSDAGEERRGAWSRRSSEMWERRGEKRRGRKGSMRIQRWGQKRFSKKNINLHREAYRFVPSRNAGKAIHPANKRHGVHPDTSLVEGVQSQDNLVEKLAAVPEVILSPSKKSKRRGSDIIQHALERAEKIKADRNLENQKAKEDQLEDIFLLHQLCSEIMDETWLRKYGPPQMKGETDLLTPGEIDIRYVWRNRLACLLREEEIKWYRRAKTKDILEVAINIIIGVAQKVISPTQTAFIPGRNIMERVVILYEIIHEIHRKNKSGVILKIDCEKAYDKLGNFSVRYLGIPMHFRILSNKDRKTIEGRIEKKLSSWKGDEHKNKYRLNPKIKGTLGVHNLKIQNQCLLSKWLFRLINE

SEQ ID NO: 178163 - protein, 56 aa, Oryza sativa
  Clone ID: PAT_MRT4530_75746C.1.pep
PESSGMHIPKSPNQITSQLHITNLKVTHTHKSNTSQILNNTKYITDYTSQIYTNVQ

SEQ ID NO: 178164 - protein, 274 aa, Oryza sativa
  Clone ID: PAT_MRT4530_75747C.1.pep
MAIAAITGGGRRPPCRRGPAAVAPPARFSCRCGTHPVPRRNVLSTMLSTSTVILFGSKQITLAEITGATFREYIDTFDGYSFLYPKSWIQVRGAGADIFFRDPFVLDENMSVEISSPSSSKYVTVEDLGPPEKAAERVLQQYLTEFMSTRLGVRRTSNILSASSKVADDGKLYYEVEVNIKSFASNNELAVMPQDRVQRLEWDRRYLSVLGVENKRLYELRLQSPEQVFKEEEGDLRRVMDSFRVNKTLSEARCGDLGIPNNGSHQFRVRARFH

SEQ ID NO: 178165 - protein, 77 aa, Oryza sativa
  Clone ID: PAT_MRT4530_75748C.1.pep
FVFYNLLGVSFFFFFFFFFLKTKIFPPKLLDNTGMTWILQPHGGQANMRQFNPTFKRKFYIPKTSLIFPEKRDTPLF

SEQ ID NO: 178166 - protein, 80 aa, Oryza sativa
  Clone ID: PAT_MRT4530_75749C.1.pep
MATTLKAEEEMLVLFIQQWHKSQVEIWARAVEQRGAATAGVDVVTASSAQDAGSHRARPAHLLAVAAAGGMTWGSARRAG

SEQ ID NO: 178167 - protein, 241 aa, Oryza sativa
  unsure (1)..(241): unsure at all Xaa locations
  Clone ID: PAT_MRT4530_7574C.1.pep
RRGAEDEDDDGDGCEDGAEHAAVMTMMVAAQQDDELGDRRDVDDEDERRRRRWTAEGFGWRGGDAKEDVAGSPLXSGGGGGAADGARVEEGPTGEIPARRMERPAWHGGVPAKFGRRRGLAEEEDGVPVPGEVVATTADAQETRQRRXQWQQRHCCRRGCTSGGLRGKRRACRGRGGDTVHGRPRLHRPACLHRRRLVSPPPFIGVHVFTDRLAFAAADWCLGVFIVIDGRLCSHAGHLCH

SEQ ID NO: 178168 - protein, 41 aa, Oryza sativa
  Clone ID: PAT_MRT4530_75750C.1.pep
SKGPKKEGSNNIRIVPFVSKGKKVVRNWNYLRYVRSPWSCS

SEQ ID NO: 178169 - protein, 353 aa, Oryza sativa
  Clone ID: PAT_MRT4530_75751C.1.pep
YENQGYVVQEVYVLSNQNYCCSEDDGLVELLWCNGHVVMQSQAPRKPPRPEKTTAAAAAAMAEDESASWFQYPVDDVLEKDLFTELFGEMTAAGGGGGDVRRAACKEERGAVAAFQSRMMPPPWPARGKAEFGDVDDVCGVSEVTVGESSMLTIGSSICGSNHVQTPPVGNGKAGAGTAGAARRAHDTATVASSSMRSRSCTAKAEPRDVAAAGVGGKRKQRGGAAMESGSPSEDVEFESAAATCSPAQKTTTAKRRRAAEVHNLSERRRRDRINEKMKALQELIPHCNKTDKASMLDEAIEYLKSLQLQLQMMWMGGGMAPPAVMFPAASTSIVPQRMLQGLKFRPKYPKFP

SEQ ID NO: 178170 - protein, 995 aa, Oryza sativa
  Clone ID: PAT_MRT4530_75752C.1.pep
MEGEEKVSPFLDVPKDIPIATKSLTIKTTNTNGGRGGGDWSNPISPAISFSPYLNSPSPPSSAFVSALQSPYVSPRLADPPPPQQPQPQTPRQRQHRETKASDVAAAAASTPTSCTDVSHSEDTDAPSASRGGGGGAPPRGSFTFPVPRVSFTRGMVASPMSTTKLRSCDVYIGFHGGAGAGAGAALTRFCKWLKSELELQGIASFMADRARYSDAQSHEVADRIICSVTFGVVVVTMASFLNPFSLEEIRFFAQKRNLVPILFDTEVLDIAGLFDDDKFEGNKEGVEAFEGLMRCHEFKLETDESNWRGCVSRTAAVLQSKLGRRCIGEKESHGVECLPFPRNKHFVGREKELSEIEGMFFGRADDAGEDFGCPRGAMTTGESSVGASDGFADEDSDTVRTSNGRFISLDLRKCKQPMLEAFVDPVIGKFSGKGRSILRQRSKNKKSRFRCSSKSHGNAGVICINGASGIGKTELALEFAYRYSQRYKMVLWIGGEARYLRQNILNLSMYLGLDISAEAEKERGRIRSFEEQEHDAFQRVKRELFRDVPYLLIIDNIDNERDWWEGKDLHDFIPRNTGASHVIVTTRLPVVMNIEPMQLLQLSFPEAVILMKRKMKEDYPSEEIEVLRKFDERLGGLSFGLWIVSSLLSELMIAPSTLFEAVDQISLSDTMLALGANDESLWQNNLFLIKVLVFCFALMDRVKGGSLALRMITAGSWLAPAPMSSTLLATMASKLPTKANSIQLWGESLKTALLCGTHCFLAPQAKKAEVESSLLLVKLGLARRTTHHPGFWIQFHPIMLLFGKIRGGLAPATAAVSGVIRSRNISVYSDHMWASAFLVFGFKSEPPVVQLKPGDMVLFIKKMALPLAIQAFMTFSRCGSALELLKVCTNILEDAEKSLASRIQDLKQGPLCWKKKLQTNSHADEFIWQEVTLLKATLLETRAKLLMRGGLFDSGEELCRTCISIRTVMLGHDHSQTLAAQETLAKLVRYRSKI

SEQ ID NO: 178171 - protein, 66 aa, Oryza sativa
  Clone ID: PAT_MRT4530_75753C.1.pep
CDVTSLSEDYSQVWTLMKYVRSPPLPSPAAAPSAFASSPQTRSPTARSRGGSRASAPARRRRLCVS

SEQ ID NO: 178172 - protein, 340 aa, Oryza sativa
  unsure (1)..(340): unsure at all Xaa locations
  Clone ID: PAT_MRT4530_75754C.1.pep
MAGEIIPDGGGGGAVLAAESVMLPASMVLVQLFSVVLVLLSKLALSTGMRPFALLAYRNLVGAVAVAPLAFIFERKNRKIPSIVEWCWISLNATFGLGREVGVYRLXGKIKLFGIITCVGGTMVVSLYKGKLLHHPWPSHLLKFHTQKASGYAYHHNLLAGTKSITSQGVVVQCMVRLASVFPYRYWATTLTCLSGSLQAFVIGILISPTKSAWTLKWDMQLLTVVYSGVFNTGISFVLMSLAVKHRGPIYPSMFNSLSLIVMVIMDSVLLGTSIFLGSILGTAFIIVGLNAFLWGKGKELKQAVAQHTSHKQNTDHNEQGPQILSGGPAKHCRGSTKTR

SEQ ID NO: 178173 - protein, 47 aa, Oryza sativa
  Clone ID: PAT_MRT4530_75755C.1.pep
LLFSRYILGQKISNCWNKESSVYIYVKKTLAYKVWSEMNYMLPTCYT

SEQ ID NO: 178174 - protein, 54 aa, Oryza sativa
  Clone ID: PAT_MRT4530_75756C.1.pep
MDPKMKQLQEALADIETDAEQLLLARHQLGENDRIRNGNREALTALRKEPRQPN

SEQ ID NO: 178175 - protein, 83 aa, Oryza sativa
  Clone ID: PAT_MRT4530_75757C.1.pep
APQVDRKPQQLAVVSDRALVKLVAVTSPMVTRLHTAHVVVARQSVYTRRLMKVCALYDGRLGQGTRLKVDVVLISPLFVREEQ

SEQ ID NO: 178176 - protein, 49 aa, Oryza sativa
  unsure (1)..(49): unsure at all Xaa locations
  Clone ID: PAT_MRT4530_75758C.1.pep
VAAHGREAAKMAKKLLRSTGKAAWIAGTTXEVLVVPLIIQMDHERRFND

SEQ ID NO: 178177 - protein, 46 aa, Oryza sativa
  Clone ID: PAT_MRT4530_75759C.1.pep
GISSLLHRGQTLPFFPHVLETSQIYPLLKIRPPWQDNCYFPPLLLL

SEQ ID NO: 178178 - protein, 145 aa, Oryza sativa
  Clone ID: PAT_MRT4530_7575C.1.pep
MAVAAAARCGAPTRARRSRPRELRRQRLDPPPPNSGAATACGSAIPDLGSGRRWRWELAATVVLGSGGATLGRAGSTAVGNGYGCGDGDIGDCGLLADPAASPPSLLRLLRPQRPKVTGGGQRQSSVVSRAPTRLVAGSRGWRLN

SEQ ID NO: 178179 - protein, 58 aa, Oryza sativa
  Clone ID: PAT_MRT4530_75760C.1.pep
CYLTGGINKDMGLLKNWTTSTNLTTKARRINLNWVHEGIEKGSKGSLGVSMVGMQCSK

SEQ ID NO: 178180 - protein, 607 aa, Oryza sativa
  Clone ID: PAT_MRT4530_75761C.1.pep
MVVQKNQRKPGEASWPKVVLKKWLNLKSKDSEFNADEEDDDDGSDVDEQDENVEGGAPYRLRRRNSETLRAQYINTKELKLCVGTWNAAGKVPPGDLDIADWLGAGAGEPADVYVLGFQEVVPLNAGNVFGAEDARPAQAWEELIRSALRRARPPASSRPRYKCYSHPPSPSRGDATAAAAATDDDELFPGTDTDTDTNTDDDSLFSSPAESEQQNVAATPRRLTRLNHFTAAADAAAAMDDSGDEHQQRTLLKTLSRSDRVGLAWPEQPLDLLAKHATATASTTMPSSRSFRTYNSFRPSRAAAAADQSNDDLAMIADLVMDLAAARKRRSPYVRIVSKQMVGVFLTVWVRRGLRRCVHNVGVSTVGVGAMGYIGNKGAVSVSMSVYQTMFCFVCTHLAAGEKPADLHKRNADVQEIHRRTHFAGVGMPRNIYDHERIFWLGDLNYRIDVAYERAHELISTMDWTQLAEKDQLKRELRKGRAFDGWTEGVLEFAPTYKYELNSAKYIGDDQRGGRRTPAWCDRILSFGKGVKLMSYGRAELTMSDHRPVVATYAAEVEVFSSRKLQRALTLTDAEVEAGTVVAVPDHLAGIEGQRGSVTARINLTL

SEQ ID NO: 178181 - protein, 145 aa, Oryza sativa
  unsure (1)..(145): unsure at all Xaa locations
  Clone ID: PAT_MRT4530_75762C.1.pep
MDASDGSGNASGGAGTGASACWCYSLLGMRKNAYATDVRAVYRRLDMKWNPDRCVSDPGXGQSCGFSWIQEAYSVLANKGKRAMYDTVLVDPVNDDDQDXYDLMQEMLERMDNGQNEKADPLKDQQKMLEDIVRLDGGSRDWGYN

SEQ ID NO: 178182 - protein, 145 aa, Oryza sativa
  unsure (1)..(145): unsure at all Xaa locations
  Clone ID: PAT_MRT4530_75763C.1.pep
WLCAPSCAPPSRRSRSHSAVIAARAHQLAXTTVVPLSRRRREMGSGERDLGARVLPLSXGRRFIRRGDDWSRPSDQTAQIRPVSGRRRRXITLRXWATEVHRTVPAYVGRAQLLSLRAIEWTQLAEDGPAQVWAGLGRPGPKANL

SEQ ID NO: 178183 - protein, 750 aa, Oryza sativa
  Clone ID: PAT_MRT4530_75764C.1.pep
MGMLKIGKNCSVCKEWQEHCYWSHMADDCKHFLTYMVGDFTESMIVPSRFANNFNGHISEVVNLKSPSGKTWSIGVAYSDTGELVLRSGWKEFVDANGVQENDCLLFRYSGVSSFDVLIFDPSGCEKASPHFVENRGFGREEKSAGAEGGGRDGDKNGHHQHQLEMTPHKNSSSPCIIEMKWGRNQSRLCIIDMYAAMGIIVVTTNIGTYMHERACLAEQDHREEKKEGDDEDEDEDEDEDVDKDGEDRYYFCRHGGRVTEYNLSKGDKEEISRVPVPVEPGNPVLVKVIHASHLLSSRYSTVGVSPEFAGRYLGPAMAREVVMERGGGGGGGDQWHVRFVRRESSRGFHGTGWRRFARDNGLLAHDVCLFELRLVDGAGAGDRLRRRPRPTMAVHVLRRARTAAFARSGKNTATGAIWPTTTVPARFANNFNGHISEEVNLRSPSGETWSIGVANSDAGELVLQPGWKEFVDGNGIEEGDCLLFRYSGVSSSFDVLIFDPSGCEKASPHFVGSHGFGRAENSAGAEQGGRNGRRTPPIVDGDNGHRHHLEMTLHRNSCRSIPRACKRSLFSDETEAKENDGEDEDVVAAAEGGRYGEYYFSRHGRVAEYNLREEDREEISRVPVPVQPGNPVFVQVIHSSHVRSSKYCIVGVSPEFAGKYLGAVEREVVLERASRGGEWHVPFVHRQNTRGFYGAGWRQFAGDNRLVAHDVCLFELTMVDAAASGGGNRRRRWSRRPTMTVHVLRRQLS

SEQ ID NO: 178184 - protein, 633 aa, Oryza sativa
  Clone ID: PAT_MRT4530_75765C.1.pep
MAAPPGRGGADGYCDLPDVRLELDPGKVRGGGGGFTVCFWLYLSSSARPSSVILHQVAEGGGDKVPFLALGEGNKLILFPLLGFHREAPTPDSSYPWTDITNLTEVNECPLDNWFHVGCEVTENIMRLHIDGDLVAETHLHSLYNEPDYQDAAADHRVLGSEDKLEGYVYNMELSCMLGNIQQQFAKNPPFKLSIDYSCSDGIEEGDDGIWNIVGGKIVASLVYADNGALVEKSRDDSEPPLLISCDGIEYPAVSRPLPIIRGRALFKLKISQLSSKCDNKLFRIFFSTLGMKRYTFLEAYSKPIRCISRNRTSRPLGSAKRIGSASMDDIKSINNCEGFGHSGKANGRLQTHDPSSVNKHAKKMVLDKGAQDVMVSDSTASDYDSMDAGSSWSLSDGDDVESFSDAEIFRYCLDGTHERSKFLRAAAPSVNEDDLIKLANQVSLYSGCTHHRNQILISKQLLQEGADIWSIISKNNERALWSSAVPEMKAKFLEIVHPSNRGLSEQDFEVLRGIAGCGDDIGRDEFDKLWSWLYPVAIALSKDKINRLWDFTAHRWIEGLITLQETENALRSSRDRLMKPGTFVLRFPTTRSWPHPDAGSLVVTYVGSDNSIHHRLLSLDVRVDRLPSSMQS

SEQ ID NO: 178185 - protein, 64 aa, Oryza sativa
  Clone ID: PAT_MRT4530_75766C.1.pep
RARGDLEHGGLPPPKPGGATPRDPFSQPGMGYPRDPLPHRRGEGETPVRLSAARPATPSRTVKT

SEQ ID NO: 178186 - protein, 75 aa, Oryza sativa
  unsure (1)..(75): unsure at all Xaa locations
  Clone ID: PAT_MRT4530_75767C.1.pep
PTRPPTRPEEEEEEEKLAAAAAMATSGLRSCSAVXXPSLLAPSFNKIRLTVFAYALSCIRPIFSRNVFISXYIVP

SEQ ID NO: 178187 - protein, 44 aa, Oryza sativa
  Clone ID: PAT_MRT4530_75768C.1.pep
MESVRLAVDVSEVRWRLTSVAVAVEKEQQGRTAMARRLGEKAAA

SEQ ID NO: 178188 - protein, 280 aa, Oryza sativa
  Clone ID: PAT_MRT4530_75769C.1.pep
MSGATTAFSGSTYPTANVFYPYIAKVKIAILASRAQAQTALLEAARLGQQSRLYEPDPNDVLLVTMADAMLEKFNKYWENTNNIMIIATILDPRFKMRYIRWCFSEFFGETRFPVVSNMAKRFLAVPASSVSSESTFSTGGRILDDYRSSLKPETVQALVCASSWIRASQNDNSAPIPVGENGDDDIEIVDFPNCYKPTPYGRKGVWDYGRKGAANCHAICVLCLCATVLDEIMKMMNLAGCSFTRYALMLNIGVLNNSECVIVTVEYWSADVYGLGKCV

SEQ ID NO: 178189 - protein, 74 aa, Oryza sativa
  unsure (1)..(74): unsure at all Xaa locations
  Clone ID: PAT_MRT4530_7576C.1.pep
MNAENPDAXDKYEVLREAYLGLSDPSQRQANDKHGXVKGLLKINIMDPDTGFGKQFGSDYYDYDVGQRELAYIA

SEQ ID NO: 178190 - protein, 72 aa, Oryza sativa
  Clone ID: PAT_MRT4530_75770C.1.pep
MLRVAGRRLTTALAWRPAAAAGARGPLAGGSLPGDYEFSRAPQGPGYPGESSYLAASRGFSSETLVPGYPDV

SEQ ID NO: 178191 - protein, 742 aa, Oryza sativa
  Clone ID: PAT_MRT4530_75771C.1.pep
MDMVAISDGGEDEENSFDLNDEMSVSLPSSRSSSEGEDGDDTSKTQKRGAKRPKAGISLSPSKVKITRGKRASCWKYYKVINVPSKKEKGKMECKAKCRFCHHNYAYRPGGTTTTLNRHLDKCTIYLNKLAKAKAQGTLDFPLADGSMVVHPTEYDHDHTKLLIARMIILHDYPFRIVEHKGFNALMKWMNPSYEFIGRKAIKSECMKLYESEKEHLRKSLREAETISLTTDMWTSNQNLQYMCLVAHYIDVNWVLQCRVLNFVEVEPPHTGIVIAQAIFDCLVDWKIEDKVMTITLDNASNNDTAVSNLKSKLAARKNAQFDPDYFHVRCAAHIVNLVVNDGLQQIQSLITNVRNTVKYFKKSPARMYKFVGVCNTYSIKVGRGLSIDVKTRWSSTYRMLETCIEYRNGFDYYAESDTKYEWLPLQSEWDLFEKIQPILGTMSGATTAFSGSTYPTANVFYPYIVKVKISILAARTQAQARLLEAARLGQQTGLYEPDPNDVFLVNMADAMLEKFNKYWENTNNIMIIATILDPRFKMRYIRWCFSEFFGETRCVTEVAAITDEMEKLYRKYERICRHNQGGNSPHNGHSASSSISTTTSLASIIPSGFQSFLQSNAKESSKSELLIYLDEPNVSLEDSTFNLLNYWKVNAHRFPVVSNMAKRFLAVPASSVSSESTFSTGGRILDDYRSSLKPEAVQALVCASSWIRASQNDNSAPIPVGENGDDGIEIVDFPNCVVASN

SEQ ID NO: 178192 - protein, 165 aa, Oryza sativa
  Clone ID: PAT_MRT4530_75772C.1.pep
MTSNSHAAAASRRSKKQTSGGVLACTATASRRQEMDMVAFSDGGEDEENTFDLNDVMSVSLPSSRSGNKGEDGHDTSKAQKQGAKRPKVINVPSKKEKGKMESDGSMVLHPTEYDHDHTKLLIALMIIQHDYPFRIVEHKGFNALMKWMNPRYEFTSRKAIKMNA

SEQ ID NO: 178193 - protein, 101 aa, Oryza sativa
  Clone ID: PAT_MRT4530_75773C.1.pep
ALEKFSKERGPPEGYKPFVEACIDAGQKTEALKYIPKLTDPRDESEAYARIKMAKEAAEAASQVKDSDELFGRLKLTLAQNTAAASIFDTLRDRLSFQGTY

SEQ ID NO: 178194 - protein, 45 aa, Oryza sativa
  Clone ID: PAT_MRT4530_75774C.1.pep
MKMMQTTTALYACCHDSRFDDRRSSYSCRRPRDVLCAKNNGEGTA

SEQ ID NO: 178195 - protein, 791 aa, Oryza sativa
  unsure (1)..(791): unsure at all Xaa locations
  Clone ID: PAT_MRT4530_75775C.1.pep
MSSSVSVAAEWDLLSDRFYRRITVYSPLPWSPPSAAAASSSSTSGGGGGGGGSGGVLGRLDLSTHIVAAAPFGGPIAAVRDDSKIVQLHSEPSRRRLLLYSSSGHPIASSPWPPQLPRLHSLAFSSSLNLVALLSDGSLLRFRLPDLKPNPSPTPVPLLPTSSGGVADAAFWGGGVAVLTEDNRVVVTTDIDAADPHPREFADPCVGQDEQVLCMAVVEPQFVMSGSPEVLLAVGDRVLAVDEDDVQTLGLELEIGPVQKMAVSPNGKLLAAFAHDGRLLVIPTDFSKIIFEYECDSALPPDQIAWCGLDSVLLYWSAALLMVGPNGDPVLYNYDEPIKLIPECDGVRILSNSNMEFLHRVPDSTTSIFGIGSMSPAALLYDARDHYDKQNAAGHEFDISRQHALLRAATYGLAFCSQFPHERFQEMCKTLRVLNAVRDPQIGMPLTIQQYKLLTAPVLIGRLINANQHLLALRISEYLNLNPEVVIMHWACEKITASAAIPDTVLLEGLLDKIPLLLSIDEQDKALSKAIESGDTDLVYLVLFHIWQKVAVEKSAPLDFFGVINARPLARDLFMAYARHSKHEALKDFFLSTGRLQLVISPSMSYFLNYREKLQDAAFLLLKESRELERNQSRELERNPMASKGSPLXHGPQVRLIEQAHRLFAETKEHVVESKASEEHAKLLRSQHEXIDAGQKTEALKYIPKLTDPRERSERYKNKGCKINCFDAKTPMSAPDAYARVIKAQVGTGAASQVXDSDELFGRLKLTLAQNTAAASIFDTLRDRLSFQGTY

SEQ ID NO: 178196 - protein, 46 aa, Oryza sativa
  Clone ID: PAT_MRT4530_75776C.1.pep
TRIYPGMAELSHTCGHLHCLLLGRYVGSDRAELIGEILKYNGNKDT

SEQ ID NO: 178197 - protein, 58 aa, Oryza sativa
  Clone ID: PAT_MRT4530_75777C.1.pep
MASYCHPRVSPVPDLVLCGEPFVLSVELAGVYGSCDSDLVLCGTAIGQGPKCDAHRPS

SEQ ID NO: 178198 - protein, 103 aa, Oryza sativa
  Clone ID: PAT_MRT4530_75778C.1.pep
SMIKLGMSLSYISTESANADTLGVFPDNHIGQPTVPSSSEFICQVVYLRILWSQGSAYLLRNVNSLRAILAKGHNIYLQASCAVHVNITGGLLAAFKCFIKTL

SEQ ID NO: 178199 - protein, 87 aa, Oryza sativa
  unsure (1)..(87): unsure at all Xaa locations
  Clone ID: PAT_MRT4530_75779C.1.pep
IPSLPLSLSSPHISPCSTPLPLASASPYGVPRLPGCGRLDTXGEGCEWLDPMPGTAPVEGFGSVASFPFPTSLPLLSAHPSISTPLP

SEQ ID NO: 178200 - protein, 126 aa, Oryza sativa
  unsure (1)..(126): unsure at all Xaa locations
  Clone ID: PAT_MRT4530_7577C.1.pep
MCYRGEELPYCGRHRRCRLAEGAAPPGPHRAAPPPSSPSPSARRHSAVLAGRILSPLRSSSVSRFSGTLRDGARKSGERXEGPDKDRAGDSGISRRCQILLGFLCFSAXVLLFTIFCLIIWGVKYR

SEQ ID NO: 178201 - protein, 409 aa, Oryza sativa
  Clone ID: PAT_MRT4530_75780C.1.pep
MATAASASASASPAAAFGAKTRRPGPSPSPSPSPASAFARPSPRASAAGRLHASLHLGGASATGSSIVSNASGIHLAAPVLAPLAVPKMTGAVGAHKNVLLFHCEEMRELAEQVVARNDDIELRSISWRTFADGFPNLFISNAHTIRGQHVAFLASFSSPSVIFEQLSIIYALPKLFISSFTLILPFFPTGTSERMEDEGDVATAFTLARILSNIPISRGGPSSLVIFDIHALQERFYFGDSVLPCFESGIPLLKSRLQELPDSDNITIAFPDDGAWKRFYKQLQHFPMVVCNKVREGEQRIVRIKEGDPRGRHVVIVDDLVQSGGTLIECQKVLAEHGAAKVSAYVTHGIFPNKSWEKFQPDNGEGPGHGLSHFWITDSCPLTVNAVKDRQPFEILSLAGPIASALQI

SEQ ID NO: 178202 - protein, 157 aa, Oryza sativa
  unsure (1)..(157): unsure at all Xaa locations
  Clone ID: PAT_MRT4530_75781C.1.pep
TRGREPRADKVSILASKFPEXVSIRSCDLLPTSWMSVAWYPIYRIPTGPTLKDLDACFLTFHYLSTATRSRDADPSTPACPPSGGFNSCMNAAGKLTLPVFGLAPYKLRSSVWSSNGPHEQQLAASLMQAADDWLRDRQVHHPDFRFFLTHYNTVWR

SEQ ID NO: 178203 - protein, 652 aa, Oryza sativa
  Clone ID: PAT_MRT4530_75782C.1.pep
MTMAAAPARSAGAAAEKRMVDPPRVVGEYKLLEEIGVGSFAKVYLATHLRTGDVVAVKEIDPRRIDERVRGGILEEKAILSTLSHPNILRLIDTIQEENLYLILEYCNGGDLEGYRTKGGEDARLPDATARDFMRQLAEGLKMLRGRSIVHRDLKPQNLLLSTNGDAITLKIGDFGFARSLVQENLAATMCGSPSYMAPEIMRCEDYDAKADLWSVGVILFQLVTGKLPFYGANLFKLRQNIHESNGVKFPKEIKDDLHPDFIDLCRGLLRLDPKKRISFEEFFNHKFLSTTGSTLYSGGSIQRKREISSEPNHPADLLRDTCQIISSDVLKDKSESVDSRNLQAFDSWEWIEREYVLVQANSTSTEILSSLEKSMKDGTGAKPASYDRSTVKRSAWNQNRNSVSRGVAIKSNGCTPLSTSHESTAAENLLNPPYCYTRLQLLNQYIVVLTELAEEKLFKGLDLEALSVELIILAIWNEALNACSLSTDATHDGFFLTQAHVNFLPKNDHRPSRNVVQGLDFTRLVSVCSWAESGFIKAYDRAEKISHRLRDNNDNTEMPDAVEIIFQTALIYGTTGAAKEVLGYQNRSVALYSKAIILLTFVLQEATNLPLNPPFSLSSSDQQRIHRYIANLRSHLCSAQLTGQQERYVQN

SEQ ID NO: 178204 - protein, 254 aa, Oryza sativa
  Clone ID: PAT_MRT4530_75783C.1.pep
NSFVVWDPHVFADLLLPRLFKHNNFSSFVRQLNTYVSTPNPNPNPFPCGDSTKKKRSLPGNPDPEAEVIALSPRALVATNRFVCEVCNKGFQRDQNLQLHRRGHNLPWKLRHRAAAVSAVTTAAPAPRKRVYVCPEPTCVHHDPARALGDLTGIKKHFSRKHGEKRWRCERCGKRYAVHSDWKAHVKNCGTREYRCDCGILFSRKDSLLTHRAFCDALAEESARLLAAANNSSSITTTTCNNSNISSNNNNNNI

SEQ ID NO: 178205 - protein, 40 aa, Oryza sativa
  Clone ID: PAT_MRT4530_75784C.1.pep
LGKFTRLGARCCCCDNLYSVWCSNFQLGSHLYWLEACGVS

SEQ ID NO: 178206 - protein, 85 aa, Oryza sativa
  Clone ID: PAT_MRT4530_75785C.1.pep
MSRGALIKKGKDGWEMLVKLGSLKNSILVFLVKSALGFSTCGGIVLLLVIWRVPPVGMPATLIKRVGRWIDLLVQLACVGELFYY

SEQ ID NO: 178207 - protein, 777 aa, Oryza sativa
  unsure (1)..(777): unsure at all Xaa locations
  Clone ID: PAT_MRT4530_75786C.1.pep
MRPLHTWPSRTSTPTARPIILHHASAPPWTPLGGWEGRGERERGEREAQTTTTQVASGGGGEASKRNAILRRVTELEDFLPFPFAVAGDATVARGNKKAREIGKSKMSNSTSGFSQNQGQHRPASSHSLAKAPAQPLQTPQYLLLHDNKNMGQLQQANQFIFPDYGYPSYQFPGIPLMSNVQAESHQTKPATTNYRTSIDSPKQSSSAEKSQDIPSRPLMMTPQEKIEKLRRRQQMQALIAIQQQQQQFGQDGSGSDTMVPQAYSPKSKNPDSLGSSVVIDDNANKVFSLELIPTGHEEIQKSSGIPDDPFIEEKIYXSFKMLLRSWIPELGVVFETVYSVCSHSVSERLITSDRRSANQNKQLSSDHGSSLLINETSGGTTEQESKVVDANAKSGEQAEHKNHLNNEYSGKPNQFPKEGDVQKKSVRSRRRTEERGKSKMSNSTSGFSQNQGQHRPASSHSLAKAPAQPLQTPQYLLLHDNKNMGQLQQANQFIFPDYGYPSYQFPGIPLMSNVQAESHQTKPATTNYRTSIDSPKQSSSAEKSQDIPSRPLMMTPQEKIEKLRRRQQMQALIAIQQQQQQFGQDGSGSDTMVPQAYSPKSKNPDSLGSSVVIDDNANKVFSLELIPTGHEEIQKSSGIPDDPFIEEKIYYQLQDALAKLDTRTRRCIRDSLLRLAHSVSERQITSDRSSANKSNKDDDEVSEDTSKRRFEDSYRRTWGTIRKSPEWARNDTAAFTVIRFLLGPIISKIFCSKTSEIIILCVSDGPISLRMAGVSP

SEQ ID NO: 178208 - protein, 557 aa, Oryza sativa
  Clone ID: PAT_MRT4530_75787C.1.pep
MHLTLSPGRKAAHARTASHPCHYPELARLDGGVRELMSWTATSRSGGEGSSGLALVEAVLAALGEVLELPVAVAALHGGEAAAAARDDAFLVLADAYGTFESALLALRESVAGARCGARRGDGAAVAAALRARRRTEKELCRLAGAMRQAASRTPAADATTGDGVGDAVADAAAAIAAASEAVFLGCAAMSPDMSSSMASSPLSKNWLARLHLHVVPASKKVSPATATAAALERLEECIGELESGSEKAKESLPLVVELKISSNQEQALWLFSETWEVLAAVSSMIGMQLTIRPAAARSASLPREHSHPVVARLDGGISALRSWSAAAARLSGVDGDGRCDGLALVEDVLAVLGELLGLPQAAAAIHRAGGGAACERALDGFLALADAYGTFESAVLALRQSAAELRAGARRGDGATVATALRAHRRTERELCRLAAAMRHAVRRTPAAASRTANDADGEVVGIVAEAAAVTAAASEAILLRCAAMSRDVPAMVQTAASHKWAWLGVTRAAKKAASPALEKLEELEECIGEMESGSEKVFRRLLQTRVSLLNIHNPL

SEQ ID NO: 178209 - protein, 66 aa, Oryza sativa
  Clone ID: PAT_MRT4530_75788C.1.pep
CGRSGICGNGYKSFFGIFLSYTRKEGKNYLLAKHKPFFWFTYENNVLTQQNLSNVHIVNAVVLMHK

SEQ ID NO: 178210 - protein, 78 aa, Oryza sativa
  Clone ID: PAT_MRT4530_75789C.1.pep
YFLGAGLLASRLPGIQFLAVGDAPPPPPQHGAGRRLLSTQNQVTPPPPAPVSSPPIGPPPPMCLTRPACSSLNIGVGS

SEQ ID NO: 178211 - protein, 73 aa, Oryza sativa
  Clone ID: PAT_MRT4530_7578C.1.pep
MARTANATAIFFISIVSQPAGFGGGAAWVDGDAPPPTTTRGARVEAVVALAFKTAVTDDPSGALPTTRAGGPA

SEQ ID NO: 178212 - protein, 156 aa, Oryza sativa
  Clone ID: PAT_MRT4530_75790C.1.pep
NFGFWSRNVSVADETLWFPPQFPPIPIPPPRGGKTHLFFSKVNRVWGFFPPGLPNPTHRHWVPRAPVFSKPVGFDGFALAPEGTWRLWISSFRPGDLGAVDLGGRTLVGRGGLALVVLGGFGPAARVSPEIVGVDPRGLFVAGARILLWGRVPWGG

SEQ ID NO: 178213 - protein, 152 aa, Oryza sativa
  Clone ID: PAT_MRT4530_75791C.1.pep
MRRPAGSSSAAALAMAILLGVLVLMALVMDGGEKTGAPAIAAGRRMLVGAADAGQMRTLEDFKADDPFQDSKRRVPNGPDPIHNSCDVSDVLGNRQVRKISGPSVAARIPRHGRFRFKEGRHICGAKRWLHCKEEQNKNNIMMGSGCGCWCN

SEQ ID NO: 178214 - protein, 99 aa, Oryza sativa
  Clone ID: PAT_MRT4530_75792C.1.pep
TATDHLIPLAISCVSCRRTRHTTHIDRSEVDCPVMTTTAAGRATLCAAREEHELLATRLNVNGIRPSHCARGSILMYLTVPGLSMMPMRVMAYDFICCV

SEQ ID NO: 178215 - protein, 101 aa, Oryza sativa
  unsure (1)..(101): unsure at all Xaa locations
  Clone ID: PAT_MRT4530_75793C.1.pep
MTNLATTMLPDLIEIQHASFHWFLEEGLIEELNSFSPISDYTGKLELHFLGKDYKLKQPKYDVDESKRRDASYSVQMYVPTRLIXKETGEIKEQELFMAIP

SEQ ID NO: 178216 - protein, 295 aa, Oryza sativa
  Clone ID: PAT_MRT4530_75794C.1.pep
MEEVEVEEDGKEEDSKIPQTNLNNSNLQGDFKGMELRGKRVMNPKVLSKGTKVEVNVSEWTSESAAIGKMHVVWVIVEGLPDEMKQRGECSQIQCPSIEQVELLAEEDKNKALQIIQDRELALVLQEKEARGQFSGDKAAEDNIPEHLMLEFEKASKSAPHDVSVARETQEGQFASNCEDGVEVEGDEEGKLQLGDSEELFDSQDSEDAFAKSLGVVLPKEEMGSQEEERRASKRFRDREDKKTLEMTMNRKEAQNAFLNKGQGSSPLHHDSSISLANLASLIGVSLGCSIEAVD

SEQ ID NO: 178217 - protein, 461 aa, Oryza sativa
  Clone ID: PAT_MRT4530_75795C.1.pep
MAFLSKFFPMGKTNALRGRISNFQQTRDESIPEAWERPHHGMDNSLILQNFYNGLTTMSHDHLDAAAGGAFFSKTVRGAIDLIEKMVSNMGWSKERLQTRQQGIHTVKETELLAAKLDLLMKRLDDHDNRPQDTVKALDLHVTCEVCGGTGHSGNDCPETHEEAMYMGKNNNEYRPQGGQGWNQPRPYYQGENNNSNFSNQPSLKDLIFVQAKTTDALSKKLAANDKILENINVQLDGFTSSFQNQLIFNKMIETQLAQLASLVPANEIGRIPRRGGKSTRDRPYPNPAGTNGVAREAPSSDSANKEVQPEKAVPQEYYDTRLLSFPQRSRKPSVDEQFARFVEVIQKIHINVSLFDAMQVPTYARYLKDILNNKRPLPTTEVIELTEQCSNVILHKLSEKRKHPGCPTITCSIGAQQFNQALRDLGVSVSVIPMDVFDKLNFTVLAPTPMRLQLADSSVR

SEQ ID NO: 178218 - protein, 85 aa, Oryza sativa
  unsure (1)..(85): unsure at all Xaa locations
  Clone ID: PAT_MRT4530_75796C.1.pep
MEIQYELNSDRDPNRSPTGLGGPSDGSYIFVRGVTGGXIASPWEYGEENARGGEGRAGAIDYFLYIDMRYFARIHSISVLYLSKR

SEQ ID NO: 178219 - protein, 722 aa, Oryza sativa
  Clone ID: PAT_MRT4530_75797C.1.pep
MDAYEATKVVFSRIQALDPDHAAKIMGLLLIQDHGDKEMIRLAFGPEALLHSVMAQARKELALLPPPQAASSSPTVPAAHSPFLLSRQNSGRCPAPSPSSWAQAQPFSRSNSMGNGGAADEMVGAGEELMSPLNGGGGAAANAPPFFPRGGDALLDDFELQEQLAFLHDGAGGVNPGHALQAFDGAECRSPGPGESGGMLPYGLAWANGGPGHRRSASVNELCLGGDGFGWKPCLYYARGFCKNGSTCRFVHGGLSDDAAMDATTAEQQQCQDFLLRSKSQRLGPAAFPFTPTGSLPASPSATSKCLSLLLQQQQQHNDNQRAAAAALMLAGGDEAHKFMGRPRLDRVDFASMMNPGSRQIYLTFPADSTFREEDVSNYFRTRSDWHFCIAVLGNAPRCSIYGPVHDVRIPYQQKRMFGFVTFVYPETVKLILAKGNPHFICDARVLVKPYKEKGKVPDKYRKQQQGDFCCMSPTGLDARDPFDFHQLGARMLQHSNSANELMLRRKLEEQQQAAELQQAIDLHSRRLIGLQLLDLKSSAAVHAAETTTMSLPTPITNAFTSGQPGATTIVESPPSSTGQLMASCGSPSEGKVVNGGNKADSAGEVTRNADSDQRLMSLTHEQQAYKSAIIPWLKVCFTIVCACILSSGEHNLPDSPFASSTKSTAFFTATAATAIGSEGDFTTGSSCNIGGSAVGSANPLRPPTLDIPSPRTCFFPMPRNT

SEQ ID NO: 178220 - protein, 51 aa, Oryza sativa
  Clone ID: PAT_MRT4530_75798C.1.pep
SVPFLPAEILTTWVSIPILSPMTLLLCSLFTWMKLEGFTVHATPHSCNHLL

SEQ ID NO: 178221 - protein, 117 aa, Oryza sativa
  Clone ID: PAT_MRT4530_75799C.1.pep
QQGDFCCMSPTGLDARDPFDFHQLGARMLQHSNSANELMLRRKLEEQQQAAELQQAIDLHSRRLIGLQLLDLKSSAAVHAAETTTMSLPTPITNAFTSGQPGATTIVESPPSSSKHR

SEQ ID NO: 178222 - protein, 275 aa, Oryza sativa
  Clone ID: PAT_MRT4530_7579C.1.pep
MVKLATAREARMYGPALTVRRWEYINAGAYVFAALLLAVALTALSADGGGGGGASRTALTVAAVALALVAAVNAHDLAAHLAGVDCRVGLVRYNAQLGLVELLVPALHVAGCVLAVVAMAFLLSQGERETHAANTLLAAALVWLLGSILNSCQVYERADGRAQLLQSSVQVPMLLGSLLFLVGAVVNRRRRPEPPVLVGRSWAWTMCVLGSVLWLVAAVFNMGKVFVMHQSDAPRLEKLRGGAQERLSRDREGRLPLNWEEAARSRRVALPAELR

SEQ ID NO: 178223 - protein, 108 aa, Oryza sativa
  unsure (1)..(108): unsure at all Xaa locations
  Clone ID: PAT_MRT4530_757C.1.pep
LGPXTPGSAALQPSLAPRGARXPPPARISPSQRPPPAAVRVVVVASPPLTRRRAAASSATSAHSGRIRPGDGQIRRRXCRIRRLLAGICRRRRXPNRRLSHAERGRRH

SEQ ID NO: 178224 - protein, 148 aa, Oryza sativa
  Clone ID: PAT_MRT4530_75800C.1.pep
LSPVSSPLLSSPPPPMGRIPSIPSAHPLPPRNPSSAYCADLRHRISERVGCSLRSGLFHSVLNWECECAGQGCWDFTSGRDYRDCPSYVSAVVFLYKAVDLVEGYELLQIIVDSDLYWCDMCPHVFNLGRTCFLMLGLFIQSAILLMV

SEQ ID NO: 178225 - protein, 116 aa, Oryza sativa
  unsure (1)..(116): unsure at all Xaa locations
  Clone ID: PAT_MRT4530_75801C.1.pep
GSGSGRWSMVDRVHGPGSXGAPRGAHVAPTWRTRGGHVAVMRAAGYDGSDPLGXGSDGGGGGTRPACTGPAQAGLAPMARGGAARXQRRRKAATGGDRPAAEGSGEEAARAALAAA

SEQ ID NO: 178226 - protein, 107 aa, Oryza sativa
  Clone ID: PAT_MRT4530_75802C.1.pep
TEKQTRKSYTQQCKYDQIYTQECKYDMVLLYQITVNLATNRITIQLAKYKKNSDTEQLRYTIHWHISGYSPPIISPDLVKRINNKDILPLNFLSNIRSSHVRLILLN

SEQ ID NO: 178227 - protein, 368 aa, Oryza sativa
  Clone ID: PAT_MRT4530_75803C.1.pep
MSSSCIPTGLRLDLDIVKAATSPGAHSSPLRPAHSSPSSTLSEASNTSSSSATSVSLKRARAPRKRPNQAYNEAAALLASIHPSVFPVKKSPKTASRPPTRQLSGLSAVFDPSSDLLPPLPVLADAAFLLRDTPPTPRQNCSSPAPVSSAFREFRDPAPLSPASPHTTDEPGELDFDDDCFLDVDEAAADGAAGGIDGIMGSLTVETNTAAATTSDDSILSSSGIHPYLRSLMVVGLAGRFELGLGSRHGTMAPKTGLGLKLDADDVLKAWSGKGSMFADGGAPESPKSAAEVRAKLADIDLFPENGNGAGGIREASVMRYKEKRRTRLFSKKIRYQVRKVNADCRPRMKGRFVRSPSLLQQVLEEES

SEQ ID NO: 178228 - protein, 877 aa, Oryza sativa
  Clone ID: PAT_MRT4530_75804C.1.pep
MDDDDSGIQEEPAPPPPPPPPPPPPPPLRRLLTATRSGGSRWVDGSEVGSSESAPWSLDGDRSLRLSVDSAASAGGASGGGGGGGPLSRASSGAFRRRFGKQPRRVDSLDVEAMSVRGAHGHSSKEISMLSTVAMAFQTLGVVYGDMGTSPLYVFSDVFSKVPIKSEVEILGALSLVMYTIALIPFAKYVFIVLKANDNGEGGTFALYSLICRYAKVSLLPNQQRVDEDISSFRLKLPTPELERALSVKESLEKNPVFKNILLFLVLMGTSMVIGDGILTPSMSVMSAVSGLQGRVPGFGTDAVVIVSILFLVLLFSVQRFGTGKVGFMFAPILALWFINLGTIGIYNLAKYDISVVRAFNPVYIYLFFQTNGIKAWSALGGCVLCITGAEAMFADLGHFSVKSIQVAFTAVVFPCLLIAYMGQAAYLMKYPFAVERIFYDSVPEILFWPVFVIATLAAMIASQAMISATFSCIKQAMALGCFPRIKIIHTSKKVMGQIYIPVMNWFLMVMCIIIVATFRSTNDIANAYGIAEVGVMMVSTALVTLVMLLIWQTNLFLVMCFPVIFGSVEFVYLTAVLSKIQEGGWLPLAFSSLFLCIMYTWNYGSVLKYQSEMRGKISLDFILDLGSTLGTVRVPGIGLVYNELVQGIPSIFGHLLVTLPAMHSTIVFVCIKYVPVPYVPFEERFLFRRIGQKDYHMFRCVARYGYKDVRKEEHGFFEQLLVETLEKFLRKESQEMALEASAMAVERDDVSVVSDIPSSPVEAGDLHVPLLSDQRLGDGTQTFITEGNTPVLPTSSISEEDPSLEYELESLREAIASGFTYLLAHGDVRARKESFFTKKFIINYFYAFLRRNCRAGTATLKVPHSNIMRVGMTYMV

SEQ ID NO: 178229 - protein, 86 aa, Oryza sativa
  Clone ID: PAT_MRT4530_75805C.1.pep
GLPSQCYLHIQSNREQQLDCWFSRHQLSCEYAKPELVCRVCLKILSGHSISKQCDDLGTFSFTWLLGKQMFHSPVSRHKFPEQGDR

SEQ ID NO: 178230 - protein, 54 aa, Oryza sativa
  Clone ID: PAT_MRT4530_75806C.1.pep
PPLEFFFFFFFFFLSDTVLVFNASRGFHLSHLSIHVIPSVRSNDCYNLYKRKND

SEQ ID NO: 178231 - protein, 88 aa, Oryza sativa
  unsure (1)..(88): unsure at all Xaa locations
  Clone ID: PAT_MRT4530_75807C.1.pep
SWFFQLGGEASLGVVIRDHGSQVLLSAWRIIRHCSXAEEAEAYSCRGGEEPSRHHRSSSSSWCARPPQVRGAELPHHSSSSLSCAHPP

SEQ ID NO: 178232 - protein, 45 aa, Oryza sativa
  Clone ID: PAT_MRT4530_75808C.1.pep
PTNQKIGHLQGPKRGSHGHLEKWIGRKLDQGSRWERKAQPIRPFV

SEQ ID NO: 178233 - protein, 144 aa, Oryza sativa
  Clone ID: PAT_MRT4530_75809C.1.pep
MAREVRHPGADAEAELTVEEAAAHAYSKSPRRASHLPPHHVAYLPPHLGKKLSLAMLAFCVMHTHGLLPCVESCNVFIFTALGLRLPKIAEPRTNAQHPSNHRLPGRHPTVASSPLLPTPISSPRREREEERWKEKGGKVTFHR

SEQ ID NO: 178234 - protein, 110 aa, Oryza sativa
  Clone ID: PAT_MRT4530_7580C.1.pep
TLLLSAPLWDLGRPADGSRHARRRRARGRTRARRQARPRRRPYSRPWPGRSPARHHRAPWRRTPLCARWRGSRAVPAPPLAPVVPPPATAAAPPPRAPSTAGLWGSCSSL

SEQ ID NO: 178235 - protein, 161 aa, Oryza sativa
  Clone ID: PAT_MRT4530_75810C.1.pep
SLSMSFNRSFVVGAISWKSSKQTITAGSTMYAEFIACYEATGQVNWLKKFIPGLKEKAKRNSEIKGENVRWISLSLSPTAQGGLDPRPDRGRPAQWLVGLRHPAPYKEGWRTGRHKTRGSTRHRHRATSSPCLACPPEPAARCTGPARRDEDNDEHLKALN

SEQ ID NO: 178236 - protein, 187 aa, Oryza sativa
  unsure (1)..(187): unsure at all Xaa locations
  Clone ID: PAT_MRT4530_75811C.1.pep
MAREVRHPGADAEAELTVEEAAAHASSPSPLAMPAPTPTLLLAHFTLPPLAGEDLTXLFVTALHGHLSTMXRPPPASLSRFLPQLTPLRLSRLILHLTPSPRHDDGHLLDSLLHHAFQTSSSTSSSPPALPLFAPMAPVVACSSGRSSSSTACSLASSPATSSSSPRSASGSPRSPSLAPTHSTHPT

SEQ ID NO: 178237 - protein, 297 aa, Oryza sativa
  Clone ID: PAT_MRT4530_75812C.1.pep
MAFRLSNNVIGALNLVTLLLSAPILSGGIWMATRGDGGECDRHLSSPAIALGAVLMAVSLAGLVGACCRVTWLLWVYLLAMFALIVALLGFTAFAFAVTNRGAGEAVSGRGYREYRLGDYSTWLRRHVGSSKNWDKIRSCLAGADVCRSLQDRNETWAQFVADDLSPVQSGCCKPPTSCNFTYGGGTRWGKTARLSSADPDCDEWSNDADEVCYGCRSCKAGVVAALKRDWKRVAIVNVVFLAFIVVVYSVGCCAFKNSRRDTSRKRRPMPTPRSPRRASHLPPHHVAYLPPHLVRW

SEQ ID NO: 178238 - protein, 49 aa, Oryza sativa
  Clone ID: PAT_MRT4530_75813C.1.pep
SPIHHARDDVAGEAHQRGVGVDVLAVGGTPTERADEARHLLAADVAEPV

SEQ ID NO: 178239 - protein, 102 aa, Oryza sativa
  Clone ID: PAT_MRT4530_75814C.1.pep
IEKKGKLHANFNEFTEVSMLPLFPLYARITLDYWMLKTEDLNAYWWSILNICKAKMNRWKMMFFKCNMQVHYSTTILRYVQLVTSVHLKKNILPPSQNISQF

SEQ ID NO: 178240 - protein, 85 aa, Oryza sativa
  Clone ID: PAT_MRT4530_75815C.1.pep
MASLSKRGGGGGEGEGILASWMAAHGREAASRAKKVVRSTGKAAWIAGTTFLVLVVPLIIEMDREQQLNDLELQQQALLGPAPLK

SEQ ID NO: 178241 - protein, 46 aa, Oryza sativa
  Clone ID: PAT_MRT4530_75816C.1.pep
SKNCFLERHYLIDVSAFLGRVRHFHSHTTSKQSAGKHTGGGSWRTL

SEQ ID NO: 178242 - protein, 64 aa, Oryza sativa
  Clone ID: PAT_MRT4530_75817C.1.pep
NPPSGGVPPKGGLKALYFPPVVGNPKNFFPHRESFFGLTFFWAILLKQALCQINPPLLIFPLFF

SEQ ID NO: 178243 - protein, 1004 aa, Oryza sativa
  Clone ID: PAT_MRT4530_75818C.1.pep
MAWRPRAAAPAQPPAHLAASPVAASPSSTAPSRLAPARLRPARVALRGCSPPGRPSAVGRRPWRCGPLFNARTPASRRAAARRRRLGTSCPPPVVCDNALAIAYSATRLLLLLLSPSRAVRWYASWAQMPPSRSLACLLLPPLLLLLESVRDADAGPLAVEIVRPSFTATSYDYVDTGGAFLVSRNGSFRAAVFNPGKQQASFYLAVLHAPSGTPVWSANRDAPTSSTGKVQLSVGGITVSDANGTVLWSTPPLRSPVAALRLQDTGDLQLLDAGNATLWRSFDNATDTLLPGQQLLAGAYLSSAKGATDFSQGDYRFGVITADVLLTWQGSTYWRLSNDARGFKDTNAAVASMSVNASGLFAVAADGAMVFRVGLAPAEFRMLKLGSDGRLRIISYALVNSSAPVGGDFIAPAGDCDLPLQCPSLGYCSPAGNGSTCTCPPLFAASVTVAGSGGASVSYIALKPLTSYFATKFDAPTNTGVNKTACRALCTASCACLGFFHDSVSLSCRLIGGKQLGSLYKGASDTNLGYIKTFNSATKAGSNQIGSSSANHTVPIVLPSVAAFLLLAVLGWYIWWRNKMSKNGRKKKGKSSTMKVYLGRQKSPSRDTGYNADADDDGGGDDDDIVIPGMPARFSYQEITTMTSNFATKVGSGGFGTVYKGELPGGEGLIAVKKLEAAGVQAKREFCTEITIIGNIRHVNLVRLRGFCAEGSRRLLVYEYMNRGSLDRSLFGRTGPVLEWGERMEVAIGAARGLAYLHTGCEQKIVHCDVKPENILLANGGQVKISDFGLAKLMSREQSALFTTMRGTRGYLAPEWISNAAISDRADVYSFGMVLLELIHGRKNRGEQEAAAPANNVAVAAGSGEHSDLPSGWSSAMTSTASGTSGGGDEYFPMLALELHEQRRYLDLVDARLEGRVDEAEAARTVRVALCCLHEDPALRPSMATVVRILEGSVPPPEPRVEALGFLRLYGRSYPLPVPGSLTAMAGGGSHLDESLKDTSAPR

SEQ ID NO: 178244 - protein, 644 aa, Oryza sativa
  Clone ID: PAT_MRT4530_75819C.1.pep
MLKLGSDGRLRIISYALVNSSAPVGGDFIAPAGDCDLPLQCPSLGYCSPAGNGSTCTCPPLFAASVTVAGSCTPGDGSTLASPAACQNNDSSSGGASVSYIALKPLTSYFATKFDAPTNTGVNKTACRALCTASCACLGFFHDSVSLSCRLIGGKQLGSLYKGASDTNLGYIKTFNSATKAGSNQIGSSSANHTVPIVLPSVAAFLLLAVLGWYIWWRNKMSKNGRKKKGKSSTMKVYLGRQKSPSRDTGYNADADDDGGGDDDDIVIPGMPARFSYQEITTMTSNFATKVGSGGFGTVYKGELPGGEGLIAVKKLEAAGVQAKREFCTEITIIGNIRHVNLVRLRGFCAEGSRRLLVYEYMNRGSLDRSLFGRTGPVLEWGERMEVAIGAARGLAYLHTGCEQKIVHCDVKPENILLANGGQVKISDFGLAKLMSREQSALFTTMRGTRGYLAPEWISNAAISDRADVYSFGMVLLELIHGRKNRGEQEAAAPANNVAVAAGSGEHSDLPSGWSSAMTSTASGTSGGGDEYFPMLALELHEQRRYLDLVDARLEGRVDEAEAARTVRVALCCLHEDPALRPSMATVVRILEGSVPPPEPRVEALGFLRLYGRSYPLPVPGSLTAMAGGGSHLDESLKDTSAPR

SEQ ID NO: 178245 - protein, 343 aa, Oryza sativa
  Clone ID: PAT_MRT4530_7581C.1.pep
MAGRSALCQGEPCLAAAAPSDRLPADPDRWSRGLAVDHPRGPDPRFQLLLLNACFIANEPLASFGYILHHTFSSEQPDKIPEWTTKPALTPSLQSFIDIIDDLRIRGLSGYKVAADFVGLDSDTVARRVGQVMISAPATASDVPVPLWEKGPAEREAAINALPLTDVIGPLVDHQTATSLKEGVTKEASDAAAAATTSGNYVSKKGRKFSSVLRTSRKAPSPALYEKEKTLRRAARAKATQGGTGATTSASPATASTDVVVATRDREVTPSSPAVGLVPARGPPADALTSGELQAELERILQDGAHGVGHEIEETRAAAASANQRAEQLPRVSKPDEGAGGRQ

SEQ ID NO: 178246 - protein, 108 aa, Oryza sativa
  Clone ID: PAT_MRT4530_75820C.1.pep
MTSTSAPTTLDALWQGSPNEKHDDNSDMASSPQQIEGVRPLDDVATSGRCITSDSNGALVLLPDAVLRPRSFAVADVLRPRLCCCSAAGAGPLSSIPLFKTQEQPYSI

SEQ ID NO: 178247 - protein, 61 aa, Oryza sativa
  Clone ID: PAT_MRT4530_75821C.1.pep
MAEYYETGRHGHGGNDGEDHGSSSKKTSQQGGAGDQEYSHKQQERMAAIIQKGLSLVVGSQ

SEQ ID NO: 178248 - protein, 117 aa, Oryza sativa
  Clone ID: PAT_MRT4530_75822C.1.pep
MCTTLASPPVREEELVVSGPNQLDEDKNGLEQRSRRHSSYCGTLISLAAGLKGGLHIITNIADGMAFMHDTLWEDGGTNTTKLDAKTPTEAKSMCMRREDGGTNTPSWVTADESPQA

SEQ ID NO: 178249 - protein, 107 aa, Oryza sativa
  Clone ID: PAT_MRT4530_75823C.1.pep
MRRGEDDQVLTERQLLSGKGLAQRSLAIFGSVEARREGRKVAAGSPERAAAEASVAQVRHKDDGGRALSSAEIEPGGGGGALARLGWLPRFEAAGPTEEEGGTEKWR

SEQ ID NO: 178250 - protein, 45 aa, Oryza sativa
  Clone ID: PAT_MRT4530_75824C.1.pep
RDKLKVILRVFLGFGKTLCRSHSGSILNLRLKIPVHVTRFDELYN

SEQ ID NO: 178251 - protein, 99 aa, Oryza sativa
  unsure (1)..(99): unsure at all Xaa locations
  Clone ID: PAT_MRT4530_75825C.1.pep
RTPRLFWRRIVYYNPXWHMIVSSWETIVYNPVLDIXRWVIPIVVVLSFLAVYWRCLGVRKRIGRSLLPLYRGTEAPVAQEQINPGLEMVMNDANRWENP

SEQ ID NO: 178252 - protein, 583 aa, Oryza sativa
  unsure (1)..(583): unsure at all Xaa locations
  Clone ID: PAT_MRT4530_75826C.1.pep
MGWRSRASAVAVLWMLAAVVAAAALDPDQDELERAFPIVEPDHGHTKLRLAKEGLEAIKRIETPIAAVAVIGPYRSGKSFLLNQLLSLTCNKGFGVGHMRDTKTKGIWVWGTPIELDVNGSKVSVLYLDTEGFESIGKSNVYDDRIFALATVLSSILIYNLPETIREADISRLSFAVEIAEEFYGRGKMLLLSQQNYCGLSRGISSDIKLLLTLLTFMRQKENLSSKWLMKLSNGCLTTMVNRIRDSLAFMGDNSTAFSLPQGRTLNGKEFVSFLRQILEALNKGEIPSTGSLVEVFNKAILERCLKLYNERMERVGLPVSVDKLQLIHNLAEDEARKLFDKQHFGKHHTTRSILKLDEEMRKVFGNFGFANEYQSSKLCKAKFSECEDKMEHLQSLKLPSMAKFNAGFLRCNQSFEMECVGPAKESYERRMSKMLARSRALFIKEYNNKLFNWLVTFSLVMIVIARFVIKFFLLEVAAWVIFIFLETYTRLFWSSELLYYNPIWHMIVSSWETIVYNPVLDIDRQVSSLCEVHNMXWVIPIVVVLSFLAVYWRCLGVRKRIGRSLLPLYRGSYGSSSRPRTD

SEQ ID NO: 178253 - protein, 124 aa, Oryza sativa
  Clone ID: PAT_MRT4530_75827C.1.pep
MTLLAAGATTAELIASRSQYDVTGKAPASGEHGEEEQRQRCHHPASVAKRTQGSNEAACMTIAPTPSLRPHGLSSSVPPQGGSGASKRHADIHHEVTNLPGKGGLRENARFLRSSLSRLDSCSA

SEQ ID NO: 178254 - protein, 102 aa, Oryza sativa
  Clone ID: PAT_MRT4530_75828C.1.pep
MRAAGPAVVGKGAAAALHGRCAEFGGGGGGIQRRRRTGAADPTTVMRRGGGSGDGEVRAHPPCTACGCLSHHHRGESRFPDRLLNGNRSILPATMTITMASN

SEQ ID NO: 178255 - protein, 149 aa, Oryza sativa
  Clone ID: PAT_MRT4530_75829C.1.pep
MANAPWPEIRFCELYNVGYLLALVQFYDAMDLPISLDLREIPSKWQPLFIEEDPWEHVVGMGLGAVFVNQLVKWDEKLKEDLDKMLERAKQANERRYFDSNGGMEELEPPPGQAEIPGFIDNQQIVSISADSYNSWVTIYHIWKYDYQK

SEQ ID NO: 178256 - protein, 86 aa, Oryza sativa
  Clone ID: PAT_MRT4530_7582C.1.pep
NYAFSFWHKAHHHLQARDPPRPLDPPPRPRPRRRRCPPPPPRPVSLTPAASTAAPAAGGRARAGGRRRRLGLGLTLPDGVGERARP

SEQ ID NO: 178257 - protein, 57 aa, Oryza sativa
  Clone ID: PAT_MRT4530_75830C.1.pep
FRDYTYGAPNHEIHQIKRQGRYTRVEIYMNILIHSYLILEHMTTYNRTLIVVQKSLD

SEQ ID NO: 178258 - protein, 149 aa, Oryza sativa
  Clone ID: PAT_MRT4530_75831C.1.pep
MTCNCSARSWNSPGIYTTARSWNSPGIYTISICAGSWRRRSDATGLGPASSMLPPQTSTVSDGELGVLWLRFDLYDEWDLQVPPMSMTIYSFDVEEIVVDALPRLEVIEFGALVLGRSIHDEGVHVGTVVEMLVAASHNGKVDPANLSN

SEQ ID NO: 178259 - protein, 167 aa, Oryza sativa
  Clone ID: PAT_MRT4530_75832C.1.pep
MNDTLKTVLRKFVLVFFDDILIYSPDWSSHLDHIAQVLSLLNKHHWKEVVDWKVPISVKKLRGFLGLAGYYRKFVKGFGVISKPLTNLLRKGVPFHWNSETESAFQHLKQALVSAPVLALPDFQKVFTVETDASETGIGAVLSQDGHPIAFISKALGVTPRTSPDRD

SEQ ID NO: 178260 - protein, 70 aa, Oryza sativa
  Clone ID: PAT_MRT4530_75833C.1.pep
APRNGELKLELTIMILWRIEKALEETELEVKLASTQRAEKGGGAQAHWCQSHLLGEETRKKEREKRDEVL

SEQ ID NO: 178261 - protein, 73 aa, Oryza sativa
  Clone ID: PAT_MRT4530_75834C.1.pep
DGGSNSFPIARSADYFQSLYMPPITKMKQYLNPLGSSRAHNVEPHFVLLYSGGVQPWHPGSSPSQWVNSVLEP

SEQ ID NO: 178262 - protein, 40 aa, Oryza sativa
  unsure (1)..(40): unsure at all Xaa locations
  Clone ID: PAT_MRT4530_75835C.1.pep
FXWMAXXTNXFXPAHNLSAFFAQXXYRYSXPLRXLXXRCG

SEQ ID NO: 178263 - protein, 362 aa, Oryza sativa
  Clone ID: PAT_MRT4530_75836C.1.pep
MTSPATTYASPFVLSVLLLVSIPVIFLLAPRLLPPKTLPAIPDADESDDLALFRRAILSSSSPSSATPTPSSAASYFFRRRPAPKVAFLFLTNSDLVFSPLWEKFFRGHHHLFNLYVHADPFSALTMPPTPSFRGRFVPAKATQRASPTLISAARRLIATALLDDPSNQFFALLSQSCIPLHPFPTLYNTLLSDNAGPHGRHRSFIEIMDDAYMIHDRYYARGDDVMLPEVPYDQFRFGSQFFVLTRKHAIMVVRDMKLWRKFKLPCLIKRRDSCYPEEHYFPTLLDMQDPEGCTGYTLTRVNWTDQVEGHPHTYRPGEVSASLIKELRKSNGTYSYMFARKFAPECLEPLMEIADSVILRD

SEQ ID NO: 178264 - protein, 97 aa, Oryza sativa
  Clone ID: PAT_MRT4530_75837C.1.pep
EEGPKTVEKGTTQCRNGEYENPKCQRGSKGLMKQTGDPEGDGTGGQTNRGREPEDEPHKSPRQDRPRTRARAKGGPKTKGAQGRNTTGATPRPDNNT

SEQ ID NO: 178265 - protein, 470 aa, Oryza sativa
  Clone ID: PAT_MRT4530_75838C.1.pep
MTTRIAPGVGANLLGQHSAERNQDATTYVGNLDPQVSEELLWELFVQAGPVVNVYVPKDRVTNLHQGYGFVEFRSEEDADYAIKILNMIKLYGKPIRVNKASQDKKSLDVGANLFIGNLDPDVDEKLLYDTFSAFGVIVTNPKIMRDPETGNSRGFGFVSYDSFESSDQAIEAMNNQHLCNRPITVSYAYKKDTKGERHGTPAERLLAANNPGSQKNRPHTMFASGPPTQGLANGAPVPRPFSNGAVPPQIQHVRPPPPPMQQFPPMQMNGQPVWPPQNTQLPPHMPPQMHYRPAVRPPPPNMMPPPPLGMLLFIKLSDMIRYPSTEITERIRNWMPRNMGLLLQSDGQNDKKCTPFSNGSLQMDPQRSLLAWLHPKRIRRQNEGVSGEQVEKKKAMHEERTGERKCNGGSAFACPCCPLPKSRVSPIPHEQSLVRCLKRILALAVYQNTSTGPTGSTRQSCFINFYPGV

SEQ ID NO: 178266 - protein, 79 aa, Oryza sativa
  Clone ID: PAT_MRT4530_75839C.1.pep
SITVPQPGAWGRHACRLPLFMLHVTTTADFFIHLRTLAPDGSHAAYRIREGGGRAADHLWRRTTGATDTWRRALTPAWT

SEQ ID NO: 178267 - protein, 120 aa, Oryza sativa
  Clone ID: PAT_MRT4530_7583C.1.pep
MVMSGVVARHPKRRRQRRQAEQRRGGESGVSGDGGGVARSSLLLASAPPLLSSPDRQPFVLGEHADNLDTTSSVPTTIVEILSSPLDGTASLGRIWWRRRPYSSPLFGKLLRCGSKLAGA

SEQ ID NO: 178268 - protein, 110 aa, Oryza sativa
  Clone ID: PAT_MRT4530_75840C.1.pep
MEGDLATLVASRAIVEGQAFVSGDALVPHPVRSLREAETEAKKMNMDLTTREYDLLLSWQIEGRANRVHDGELPPWANPTKVVIMDDGVGPSKKWKRATQKGTSCRWAKS

SEQ ID NO: 178269 - protein, 1138 aa, Oryza sativa
  Clone ID: PAT_MRT4530_75841C.1.pep
MKTVETTSSGLFSLPIDLVEEILMWLPSRSLARLRCTCRSWNELISSGGFVDRYLQNAAARHSAPAKLVLTPLSKRHARSFHAPMCCRDCPRIIGARPCRGLVLFCRPCALTYSVCNPSTGGVLHLPPCHSEWYMSSAGIGFDSATGKYKVVQLVDPSSPKVVGTQCRVLTVGDDPLGWREPLGEACTILQEDHAKEGGCIADVDPVFANGRLHWTLTPKFLVCDTPQGILAFSIGDESFVTVPLPPFASADLDVCSSSVCVATNVYLEHVRPSKLLPKNKEIFAPAGTVLAELDGCLCMVRDLRHRRNMDLNETTMFEIWKLGTYETGEWSLDYRIDLPRGYRAAERLVTPWLVMPLAYVGGDPASTGGQRRKAVLLATTAHEAHVYDPEAAVLHRVASMSDDESRSCDAAFYLDNRLRLTLYQESPVQMDGMEHDGGDAKLIGFLSELSKEQKLDFIALLETGKDKFADSWLNNICGGKYFLWHWTRPKGRSGGILLGINLELFDVASIDEGEFYIKFHLRNKEDAFLWNLVAVYGAAQDEFKQDFLLELVNSCSKEALPMVIGGDFNIIRNPMEKNNERYNDRWPFLFNAVIDSLNLREILLSGRKFTWANSMPNPTYEKLDRVLVSTEWETKNPLVTVHALCRDLSDHTPLVLDTGKGTHRNSQPLFKFELGWLLRDDFQNLLVEIWSKDIQKDIQGATNIERWQNKIRRLRQFLRVWAKNLSGVYKKEKARLIAKADELDKLAETRILTSQELILKNSYKNALAQLLREEEVKWYQRAKTKRIVEGDRNTKYYHMIANGKHRKTKIFQLEQEEGVIKGDAQLKKYVTNYYRGLFGAPDRNCFSMCESQKDDIPQVSMEENTFLTKEFTEEEVKHVVFQMEHNKAPGPDGFPAEFYQVFWEVMANRIALVAQKVIRPSQTAFLKGRNIMEGAIILHETLHEMHKKKSNGVILKLDFEKAYDKVNWNFLQQALRMKGFSDIWCKWIDQVVSGGSVAVKVNDEIGHIFQTKKGLRQGDPLSPILFNLVADMLAILINRARDLETLNGVIPHLVDNGLSILQYADDTILFMDHDLVKAKNLKLVLAAFEKLLGLKINFHKSEMFCFGKAKEVEKDYTTLFGCHFHGNTLGKDLVFAS

SEQ ID NO: 178270 - protein, 576 aa, Oryza sativa
  Clone ID: PAT_MRT4530_75842C.1.pep
ARFSLRFTPPFVIFLFPLPSLRFHSSPPTPPPPRFPDHRIAAQRSGGNPSAAASHRRRMASPARPAAASVSGAFGLSADPARCSFDQTLRREDFQDNRLLRSLVNIHEQETYSREIITEAIESCMKKQADNLVNTLDVISGRLSQLELYCYKLERSIGELRSDVMDYHGEANINFRCLEKHVKEVQNSVQVLQDKQELAETQKELTKLQILHEESAQKSEGTAPSVLMTKEIDGSMPVAKHELALVPLHQVNAAQSPAMQFQSCNGLVLQQLVPVSLSTQQDQQHMNQATLYCMQTQAHVEHRQAQPFQPAPQPVQRHTQNTPQTVVEAQQVTSQAPDFYIQPQQQWAHQTGQQVHQARQPQPQVVQQQHYNNIQQVPAQIVQMQTSSPQAQSAPHVTLLYPPYGSQQPACANSEPRSRSMAMQPSYSTISSSQRNHHEVAPVYVQSNTISVPLAEHSIQSQQPPQLQSFGNGSFKPSKVSLHGVASYTVQGNAQAYNTAYGNPSNNAATVVAVLPQQAQSSAPMVLHHLGPQSLQNHPIDMVEKVARMGYFKDQAESMALRMATAGQNVEFKHLA

SEQ ID NO: 178271 - protein, 701 aa, Oryza sativa
  Clone ID: PAT_MRT4530_75843C.1.pep
LLREEEVKWYQRAKTKRIVGDRNTKYYHMITNGKHRKTKIFQLEQEEGVIKGDAQLKKYVTNYYRGLFGAPDGNCFSMCESQKDDIPQVSMEENTFLTKEFTEEEVKHAVFQMEHNKAPGPDGFPAEFYQVFWEVIKEDLMAVFRDFHSGELPLHRLNFGIITLLPKNKEAKQIQQYRRICLLNVSFKVFTKVMANRIALVAQKVIRPSQIAFLKGRNIIEGAIILHETLHEMHKKKSNGVILKLDFEKAYDKVNWNFLQQALRMKGFSDIWCKWIDQVVSGGSVAVKVNDEIGHFFQTKKGLRQGDPLSPILFNLVADMLAILINRARDLETLNGVIPQLVDNGLSILQYADDTILFMDHDLVKANNLKLVLAAFERLSGLKINFHKSEMFCFGKAKEVEKDYTTLFGCKMGTFPFRYLGLPMHFKRLSNKDWKDLEDKFQKKLSCWRGKFLSSGGKLVLINSVLSSLATFMLSFFKIPKLDFYRSRFFWQCDEHKKKYRLVKWSVLCRPKECGGLGIQNLEMQNKCMLSKWIFRLINEDGIWQSLLRKKYLTKKTILQVQKRPGDSHFWTSLMLAKESFQRFGSFLLQDGSQVRFWENYWIGVQSFEKEYPNLYNLVRNKNEVVAKVMSGIPLNVSFRISIVGRNLEAWYELVSKVVNIVLTDQKDRFFWKNNKEGIFIVKSMYKLLMYEGLVPRKNFI

SEQ ID NO: 178272 - protein, 443 aa, Oryza sativa
  Clone ID: PAT_MRT4530_75844C.1.pep
MAEQRGNMLMKKYEMGKLLGQGTFAKVYHARNTETSESVAIKMIDKEKVLKGGLMDQIKREISVMKLVRHPNIVQLYEVMATKTKIYFVLEHVKGGELFNKVQRGRLKEDAARKYFQQLICAVDFCHSRGVYHRDLKPENLLLDENSNLKVSDFGLSALADCKRQDGLLHTTCGTPAYVAPEVINRRGYDGAKADIWSCGVILFVLLAGYLPFHDKNLMDMYKKIGKAEFKCPSWFNTDVRRLLLRILDPNPSTRISMDKIMENPWFRKGLDAKLLRYNLQPKDAIPVDMSTDFDSFNSAPTLEKKPSNLNAFDIISLSTGLDLSGMFEESDKKESKFTSTSTASTIISKIEDIAKGLRLKLTKKDGGLLKMEGSKPGRKGVMGIDAEIFEVTPNFHLVELKKTNGDTLEYRKVLNQEMRPALKDIVWAWQGEQPKQQQQPTC

SEQ ID NO: 178273 - protein, 83 aa, Oryza sativa
  Clone ID: PAT_MRT4530_75845C.1.pep
NMGSNLVFIQHVYRLTLSGYCKKLVVGVSPTRLVFGWLGLGGQKLVKVSSMGTSRTVQAAGAVDAFAVVKEQSISHAPTRLRN

SEQ ID NO: 178274 - protein, 102 aa, Oryza sativa
  unsure (1)..(102): unsure at all Xaa locations
  Clone ID: PAT_MRT4530_75846C.1.pep
DPRYQRDPXEGFRVSNSIASTPTKVYEAEVHGAKSPGDLVESLDYDLIARGRRCGSGKPRALIGKRIEITGMLSTWDRLPPSRPHARRMQETSSEGMQLKVH

SEQ ID NO: 178275 - protein, 141 aa, Oryza sativa
  Clone ID: PAT_MRT4530_75847C.1.pep
GPRPGQEGCCPFPGPQEGGLGCPRGRPRCPVLVEGWTLPSGCFAGYRLLGPPPPLLKGFLLPPRPWWPFGPVPGFPGFFCNKCWAPPSFFSLCGGPRGKKFSRGPFPFLVPKKKKEKKKKKKRKKKKKKRKKKKKKRKKKK

SEQ ID NO: 178276 - protein, 552 aa, Oryza sativa
  Clone ID: PAT_MRT4530_75848C.1.pep
MSESALDKHIVVKIPDHVLPDAFIGESVGKGKEDGATVDNMDPSRPFLVIKKSDLDKADEWVKIKYAWMAKSLTNDIIIPDPTPQVVRDAFFDISPRLDSVLRKDSVRCFFRLFAECTAAMAFKCNITSETLSCIVRHNALRCAKTVLEGKAPQLSCMHANPNCINPYGIFPLHEAAERFSVDMIKLLFCHGASANLHTVNDAGIPGLLPLHVAVGNTCLHKYLEDNLSPVQYHEDYIYKLIHLLCLPEMKVFLDTVRLLAEKTDNLADELWNYMKNDKLVESAVLLLAARKHIREGKPDGFDIIAQRIYEDYDSLVCDKGDTAEGQKLLEERRALLKCKCLIVTIISQAGEVLDNYIQAHSEVHNNETDLMKFMLARTTIMLSTMKYDLVPNVEVLARVSYILKEFGFCPNEEYIDTMILCPYNKISYSDIVHKDVTKAVAQMSTSLPAAEKKAARKKALKGWDPTFIKRNFFPYWRSVLGAQLSVSNGAADEKSMLHRPQFRNSVNAHEGAKDMSKKVPSGMLLLITIGLQSIMLRTSFADTLRRLRIYM

SEQ ID NO: 178277 - protein, 237 aa, Oryza sativa
  Clone ID: PAT_MRT4530_75849C.1.pep
LCPARRCSDKLVESAVLLLADRKHIREGKPDGFDIIAQRIYEDYDSLVCDKGDTAEGQKLLEERRALLKCKCLIVTIISQAGEVLDNYIQAHSEVPNVEVLARVSYILKEFGFCPNEEYIDTMILCPYNKISYSDIVHKDVTKAVAQMSTSLPAAEKKAARKKALKGWDPTFIKRNFFPYWRSVLGAQLSVSNGAADEKSMLHRPQFRNSVVQYCCIQNAHEGAKDMSKKVPSGMLL

SEQ ID NO: 178278 - protein, 67 aa, Oryza sativa
  Clone ID: PAT_MRT4530_7584C.1.pep
LARGRVLPGGETRMNWRNFLLGYGSRAGLLSEPVRGNWALGRRTFIAWWGLGSLFSRGAWKKTNPFR

SEQ ID NO: 178279 - protein, 91 aa, Oryza sativa
  Clone ID: PAT_MRT4530_75850C.1.pep
SRLLLPTVLPPTPPQHAAEGERGNYHCESGTTSARLRHIITQREAPSCGLTKSSRGARPKERRRRKEVKEHVPHKDVVALRWPLGNTSSSK

SEQ ID NO: 178280 - protein, 65 aa, Oryza sativa
  Clone ID: PAT_MRT4530_75851C.1.pep
VVRDAFFDISPRLDSVLRKDSVRCFFRLFAECTAAMAFKCNITSETLSHMEFFHSMKLLNGSLLT

SEQ ID NO: 178281 - protein, 1068 aa, Oryza sativa
  Clone ID: PAT_MRT4530_75852C.1.pep
MGGPTPTGEPPPSLSSSPMRQPSPVPPRPPAPAPPQPPATAPPSLVPLLLVVPSSSAPSSSSNEVLPMGENAHVLPMGEDAPMLPMGEDAPMLPPSSSKEVVPVPIAVVAPSIGIQDGMDPYSTYVLTVRIIRAGSRFEGAWVFDWTIDSDTTNFKDFVDDICEKYPWGIDETVTVQYLDSGLNLFCTIYSDNDLMTMFKCFEQNKTGDVFITINGSSDESIIGKLCTPSVPIPSQACISQISNEPLEDGNLADNMVDMYLANPFEHFEHVGVDEEDQYSIGSDTPESDNNESNTSDSEYVPGVDEDEEDDGDDSSDDDDDWVTANATPDESTPIITYDKNDPPMSKGTIYPSIEEFRLAIAQYSIKHEFEYAIEKSEPNRFRAHCPVKGCNWRIHASRSADKKSIEVKVHVADHECASTRRDEKLKRASKAWICERVIEWMREDPSVGTAELVRRIKEHHKINVNYKRVWTGQELARKRLFGDWDSSFDKLYRWKGEIEKRCPGSLISIDHMTFKEKRRFTRMFVAFKPCTHGFRAGCRPYLAIDSTHLTGKYRGQLATACAIDGHNWLYPVAYGIIDSETSENWIWFMEKLRLAIGNMDDLAICTDAGKGIDFAVEEVFEGVEHRECMRHLVTNFKLKFHGKVFDEHLWPAAYAWTEQSHSYHMGKIEAAKPEAILYLKQHHPRLWSRSKFSSASKVDYVTNNLAESFNNWINKHKGLMLFELMDKIRRKTMKMFQKRKKVANKLQGQIILPSVMRELNAKSRDLDLDVDRSDDLEAEVTEKSPGGKRHVVNLEEKTCTCREWQVSGKPCIHALSFITSVRGLHIDSFVDECYSVAKFAAAYAPRIPGLTDMSQWPESTHGFFLYPPILKRSAGRPRNRRCKGGAEGKGTSKGRSGSQKCPICHNFGHRWQTCKEADPDAKEAYALLAKTRQKRKKTTPSNSSTCAANTVQIVTSTSTPTLVGPPSKKKRAAAPDSSSCNLITCANANATSVSSSGPNQTQNQCALLPVTVTEVSTPPPKAKAKGKNKAITALPDSPSMSTRSKKKLKKLTSTSPSMSTRSKRKLI

SEQ ID NO: 178282 - protein, 114 aa, Oryza sativa
  Clone ID: PAT_MRT4530_75853C.1.pep
VVRDAFFDISPRLDSVLRKDSVRCFFRLFAECTAAMAFKCNITSETLSCIVRHNALRCAKTVLEGKAPQLSCMHANPNCINPYGIFPLHEAAERFSVDMIKLLFCHGASANLHT

SEQ ID NO: 178283 - protein, 689 aa, Oryza sativa
  unsure (1)..(689): unsure at all Xaa locations
  Clone ID: PAT_MRT4530_75854C.1.pep
MSAAQHHFQCQRWTMMGSNAFKTAVKSQKYLKMGSSKANHPAASSSKVSSVSSSKPKPKPTPIRNPTPPPPPPRRRTPPPPPPGSGPGPQRPSYLSVALRRRGPPAGSAAGTPAPPRAAAAFDVAPPVAEHTDPVVFPASLAEMSGGGGSSSSDDQILLFGSFTEAETKLWQPNANKTRELSEIQFGSLNFSALNLSKESNSITQGAVYPAKLSXQFDVLDDSNVKKDEKFATIASKSVIPSMFDTVLRNFTPDVPAGTASRPRQEDAQEFLSFAMDRMHDELVKLNGNGSNSKEGMIVSSNDDDAWETVGKKNKSAIMRTVVKATGNKASVTVQPFRLIHLDIFPDAVQKLDDALRLFAAPESSKAGYPTLNAFIEFISQFDVLDDSNVKKDEKFATIASKSVIPSMFDTVLRNFTPDVPAGTASRPRCPVLRVHLNLQQEDGQEFLSFGKDRTHDELVKLNGNGSNSKEGMIVSSNDDDAWETVGKKNKSAIMRSQSFVPSELTAIFGGQLQSCVKATGNKASVTVQPFRLFHLDIFPDAVQKLDDALRLFAAPESLEGYRTAAGKAGLVTARKSVKIHSLSKIMILHLKRFSYGSHGCTKLFKPIHFPLELVLSRDLLSSPSSESRRYELVATITHLGANPSRGHYTADAKSASGQWLRFDDDNVTPVSLNKVLHDQAYVLFYKQL

SEQ ID NO: 178284 - protein, 268 aa, Oryza sativa
  Clone ID: PAT_MRT4530_75855C.1.pep
MILCPYNKISYSDIVHKDVTKAVAQMSTSLPAAEKKAARKKALKGWDPTFIKRNFFPYWRSVLGAQLSVSNGAADEKSMLHRPQFRNSVVSNESSSLNHNISFLGRIQQLSGTHESRRYSTAAFRMLTKWHVAVDNHRSAKYYAAHVFCGHLKKVANIHVTTKTLFKVMLSTLNYDEMQHAVCCIRLEPSTREMWTCVPACCTCTRFNVSLNTEQVKCVAKCHFSLSAISSTYIRVMILECYWATWQPEKLAKHHQNFCHVSIRYKLL

SEQ ID NO: 178285 - protein, 299 aa, Oryza sativa
  Clone ID: PAT_MRT4530_75856C.1.pep
MAAEAAPEWVEKGDNAWPLAAATLVGLQSVPRLVILYGDCGAVGPRTEKDREAFPPNNVLLTLAGAGLLLWMGWTGFNGGAPYAANVDASVTVVNTHLCTATSLLVWLLLDSFVFGRLSVISAVQGMITGLVCVTPAARLVLHKRSRLLARVDDTLAVLHTHGVAGSLSGVLTGLLLLAEPRFARLFFGDDPRYVGLAYAVRDGRAGSGLRQVGVQLAGIAFVVALNVAVTSAVCLAVRVAVPQLAGGGDAIHGEDAYAVWGDGETYEQYSVHGGGSNHGGFPMTANPVASKADEMIWI

SEQ ID NO: 178286 - protein, 973 aa, Oryza sativa
  Clone ID: PAT_MRT4530_75857C.1.pep
MELQRVQNSTVNVMHVMEYLAANVDLAKDLVMRCSAVARELKNDDLLGMTEDLDSVIKNIGHELSRIPASTFGSSRFPDGRADANLQIAGHRPRYCDQNSCDGYSEADMSIIPANSRPRRRTLHNSDMPRLVDFLQGMYHESHDIGAHSFNSLPEVAEYVEPLYDSFFCPLTNKVMVDPVTTESGVTYDRKAIEEYFEKFADGSEPVVCPVTKMSMQSKALRSNVPLKSTIAEWIMRNEATRVRIARTALSMASTEAMLLEAIQELKLLAKIRRKNREQMHKIGITKFLPRLLEHKDGLIRCDSLDLLCLLAEDETGKEVIANTRAITRTIKLLSSNSPDERHAAISFLLELSKSELLLENIGSTSGSILMLTTMKFNDSDDPVAAEKAGEVLKNLENCPKNIKYMAESGYLDPLQRHLVEGSEDVQMEMVSYLGELVQKQEMTINIAGSASEILIKMVHSGNTVIRKAALDVLVQISSDGPNSKTLVDAGAVPVMVEELFIRKIDDEPMGSKTEAAAVLANIVESGLDPDTIVVNKEGHVITSKYSVYNFTHMLKCSMPDDLNLSIIRVLLALTALPKPLMTVVSVMKEQDSSLTVIEFMGSKTEALGISATRLLIALSPQMGHTIAEKLCKAPGQPGRLVKSIGQPGRVTERHAVAATLLARLPYQNITLNLALLEQGAVPTLLAKIEEMQRGEMRVSRHAKTYMEGLVGALVRMTTTLYDPDVLLAAMDHNFTAVLTDLLVRSAGSDEVQRLAAVGLENLSHQSVNLSQPPSEEQRRPKKKNILRRLRDAHTGRVHDNNRKPPPPPAQGRLCPVHRGVCSPATTFCLAEAGAVEALVGVLESNENGRVVDAVLGALCTLMDDAVDVERGVAVLAEHDAARHVLRALRQHRDVGGDTAGAVSRRCFWAVERFLAHGGERCVRDVTADRALPSALVSAFHKGDAATKQVAESVLRSLHRMPDYSATYVSVEL

SEQ ID NO: 178287 - protein, 690 aa, Oryza sativa
  Clone ID: PAT_MRT4530_75858C.1.pep
MARPPSPSPVVPVKREPDGATAAVSDAYTPRPPLRKRRRLPSTPTQPLLLTPQAMSSTRDSFAGERSGLAPASVPTSVKRELGADGDGDGDGDRDARGKAVSVAEGNLQPRKTALAELPTLLANRRRLDRLLHELVRSHRWGDAAGVISALVSGTRHPESFDEMRSVFAVGMEIHRRLAENSGIQQNTRSRYYLRTQKLYDVWMRRLMWLPTCERKYMVKLELALFYLSQGCIDSAYNTTKTLIAKDGLKTPIVNLIHGLISYDNWYSGLPEDMQLEEFDVYCESHTVSMATHHCDENGQQDTSDDNCSIDADSSSPGCSSKSSINNWNIDKQRKFPEKPGFVHSAREDDSVGSQVDEKMVDTDFRSVFFNTANSPTCGLEKSLLPLRLKHSDGTPNACFDSYWKYKSTPNAFYEDAEKCLRVALYSTPPIMAALLPLIQILLLGDKLKDALAELEKICHSSTTALPFRLRGRLLEYFDQNQVSIISSCYAEALRRDPTCTYSMERLTRLHRKGYYNTIELLEAIALHLDSVNGKPCIWEELVSCFLRLFSEWTTDYGDCMSCNVQGDATFTASSKFSCVFFEQNTRETWKVRCTWWMNRHFSQSICTSETLTGDCKLLASKAACACHLFGPEFEYVEAVEGYLSGQKADDEIAFLSRNMQNSTPRSRLAHRLDRHAIAATGELCSLLRL

SEQ ID NO: 178288 - protein, 58 aa, Oryza sativa
  Clone ID: PAT_MRT4530_75859C.1.pep
LKHGDYVGSTSGSSEGKSRDHVDSSSRSTEQLWQAFFANPFDWWDNRTNKVTFFLLFI

SEQ ID NO: 178289 - protein, 348 aa, Oryza sativa
  Clone ID: PAT_MRT4530_7585C.1.pep
MSAVERKTACVTGGNGYIASALIKMLLQKGCAVNTTVRNPENMEKNSHFKDLHALGPLAVFRADLEEEGSFDEAVAGCDYAFLVAAPVNLKSENPQMKELVEAGVRGTLNVMRSCVRAGTVRRVVLTSSAAAVSGRPLQGDGHVLDESSWSDVDYLSSPANKTSPGKAYSLSKVLSEKEASRVAEENGISLVTVCPVVTVGPAPAAEAKPCVAAVLSLLSGDQEMISTVKLMEKATGGLMLVHVDDLCRAEIFLAEKPPPAAAAAAAERYICCGLSATMLQLARFLAAKYPEYNVDVAALGDLPEKPRIRLSSEKLAGEGFEFKNRTLDEMYDDAFLEYGRALGILPY

SEQ ID NO: 178290 - protein, 135 aa, Oryza sativa
  Clone ID: PAT_MRT4530_75860C.1.pep
TCPPGWAPPPPPPRRPTRPRPRPPPLPRRRAAAAATAAWGAPGTPAPPAPRRPAPPPTPPRCTARTARGYPSAPACWRSPSLSLSLAADEHNKLQQTPSNISARSIRGPICNLRFFRGDRREGVEGGKRLRTVPA

SEQ ID NO: 178291 - protein, 181 aa, Oryza sativa
  Clone ID: PAT_MRT4530_75861C.1.pep
MEVSHMANCSNVSSPEQQPMPPSSAAASSPSPPQLDYDVVVILAAMLCALVCALGLNSMLQCVVRCTRRAVADPVGWVEHRRAGAGLKREDVVALPVATYVASPAPSVAGCAICLSDFADGERVRLLPACGHRFHVVCIDRWLLAHCSCPTCRRRPSPEADGHGAVVGEDHHHRLQVLTAA

SEQ ID NO: 178292 - protein, 126 aa, Oryza sativa
  Clone ID: PAT_MRT4530_75862C.1.pep
VGKVLKRNSKLALLTPRLKRMTSKKNTIKDVRLPSKHIYGIWSTRLSTRSPCIVVVSVPPLTATSRLVRTARLKAQAQKDQYQRTLPSCQDKVPEFKWKTEREGHSNLMAQPYESQTDSLKKKKKK

SEQ ID NO: 178293 - protein, 195 aa, Oryza sativa
  Clone ID: PAT_MRT4530_75863C.1.pep
GSVEEKPLSGREAEATGGGGAEVRCSGEAQVPICHRANRCWQLPPVEGAPQLDPTIAAPPQLDPIVTRPLLLDLAATVRSGCCKASDRGGIEALAIVEEEELRHAVTAVVVVAPEADDGGCAPPGTGDGRLATLPPSRESRYAIVIISLPTTVVVVVALSTGVRSDHHRAIPVAAVVTTVVIAPMDRRWGKGDGC

SEQ ID NO: 178294 - protein, 77 aa, Oryza sativa
  unsure (1)..(77): unsure at all Xaa locations
  Clone ID: PAT_MRT4530_75864C.1.pep
TTHPCAVPHTPTSSLXQMTHSYTASTLRTYGLLHYDWETPLNHALYLYRDRKRAICKVLSDRLNLATNELWEQERHL

SEQ ID NO: 178295 - protein, 83 aa, Oryza sativa
  Clone ID: PAT_MRT4530_75865C.1.pep
MTHHWTWQGVVRFVPSFGHSISATHYRAAAGGCPIEGDRGCCHHYLTGSPGLCRRCPLRAHPAATGFEVEGRVAALPPIRDED

SEQ ID NO: 178296 - protein, 681 aa, Oryza sativa
  Clone ID: PAT_MRT4530_75866C.1.pep
MAAAEENSSLFLIFILTMIALPLVPYTIMRLCRAANVKAKTIHCRCSGCHRSGKYRKSIYKRISNFSTCSNLTILLLWIVMIFLVYYIKHVSREVQVFEPYSILGLEPGASESDIKKSYRRLSIQYHPDKNPDPEAHKYFVEFISKAYQALTDPVSRENYEKYGHPDGRQGMQMGIALPKFLLNMDGASGGIMLLGIVGLCILLPLMIAVIYLSRSSKYTGNYVMHQTLSTYYYFMKPSLAPSKVMDVFIKAAEYMEMPVRRSDDEPLQKLFVAVRSELNLDLKNIRTEQAKFWKQHPSLVKMELLIQAHLTGESFALTPALLKDYRHMLELAPRLLDELVKIALLPRSPHGFGWLRPAIGVIELSQNIIQAVPLSARKASGGNSEGIAPFLQLPHFTETVVKKIARKKIRSFQEFCDMPVEERATLLTQVAGLSDEGAQDVELVLEMIPSIEVDIKCETEGEEGIQEGDVVTMYAWVSLHRRNGLTAALPHAPSFPFHKEENFWLLLADAASNEVWLSQKVSFMDETTAITAASKAIQETQEALGASAKEIGIAIREAVDRVKKGSRLVMGKFQAPAEGTHNLTSFCLCDAWIGCDTKTSLKLKVLKRSRAGTRGHVAEEGPVAEDGIEEEEEEEEEEYDDYESEYSDDEEDEKSKGKGKVANGVAHQKANSDIDSGSDD

SEQ ID NO: 178297 - protein, 472 aa, Oryza sativa
  Clone ID: PAT_MRT4530_75867C.1.pep
MEHVIGGKFKLGRKIGSGSFGELYLGVNIQSSEEVAIKLESVKSRHPQLHYESKLYMLLQGGTGIPHLKWFGVEGEYNVMVIDLLGPSLEDLFNYCNRKFSLKTVLMLADQMINRVEYMHTRGFLHRDIKPDNFLMGLGRKASQVYVIDYGLAKKYRDLQTHKHIPYRENKNLTGTARYASVNTHLGVEQSRRDDLESLGYVLMYFLRGSLPWQGLKAGTKKQKYDKISEKKMLTPVEVLCKSYPTEFISYFHYCRSLRFEDKPDYSYLKRLFRDLFIREGYQLDYIFDWTKQGSESNRLRSSGRTSGLVGPSAERTERAAGVFWGVVSTARQDVPDRFSGTVDPFARRTGSGSGHYGEHTKHRNILDSLLAPKTAVDLDKRRPTSSSRNGSTSRKALLSSSRPSSGDPIDPNRSNLIPTSSGSSRPSTMQRLHQSTGLETRSSLTKTARNVHDDPTLRTFERLSISADRRK

SEQ ID NO: 178298 - protein, 444 aa, Oryza sativa
  Clone ID: PAT_MRT4530_75868C.1.pep
MAAAAASLVSLPLLSAIFGAAIALLFLSGYLRRKRAAIAHLPPSATAAAPDQPKQVRPSNQNQPKKGHQRSHHAVDKDAAKKHHHLDVNTLRGHTDSVTALHFSDDACNLATVCADGAVRVFRVDDVSSKSFKILRINLPAGAHPTAIAFSQGASSVVVAAQALLGSSLYMYADVGAPPAGGNKQQGKLSPPEIKWEHRKIHGKESVLNLAAARATYGTGDGSTILISCSEATDIKIWHGKSGKELGTVDTNQLKNNMADISPNGRFIAAAAFTADVKVWEIVYSKDSSVKEVNKVMQLKGHKSAVTCLCFALNSEQIITASKDGTIRVWNINVRYHLDEDPKTLRVLPIPLHDSKGSVCQYDHMSVSPDEKVLATTSGSTLQWLCVETGAVLDTAEKAHEGDITGIAWAPRTIPNGGTPAFVLATAGVDKKVKLWLAPKAIST

SEQ ID NO: 178299 - protein, 132 aa, Oryza sativa
  Clone ID: PAT_MRT4530_75869C.1.pep
MELLDIALSLDVINSGVSLKGGNCPRSPPHFSITLFYFYKYCGQRPGFIVKAGMKLTLLLLQILFFSLDLVSCAYGEYVFIYSGFAHNNITLDGAAMVTANGLLDITNGSTRLNGHAFYPTPLPFCNFSSGL

SEQ ID NO: 178300 - protein, 99 aa, Oryza sativa
  Clone ID: PAT_MRT4530_7586C.1.pep
MEEVVVRRRAWDCGSPLYDSFELASVYGLLDSNLMALPFAERSAELDAAADRAPARRTAAKEQRRRKKAAAAARRTGKAVLRSIFSADLAVFVSFRQIL

SEQ ID NO: 178301 - protein, 391 aa, Oryza sativa
  Clone ID: PAT_MRT4530_75870C.1.pep
MAAPSSLAFSHLADLHRAGGASPSPLPRRIRSSSASGALAAARSASSPWPNPARLPSSFLLKPAIQASDAVLKAASELGFLDTVTAGHADPSRVSYVKPDDSRHDTDEDHDTSQVSLDTSYHMILYKYHMIRDRNRLIPYRYLIPHKYHNMHQVIAYEIYDDTYHVSCDSYHVERDTCEVLGIARFLRRIGVILARYHMIPTRYRSWASRRRGIVADGRVLPRPCSTLNPNLITGSRILPRPRSTSELVAGDRVLRRDLVTGGHVHRPRLSRWLRPPRRSSSPVPPLSLRRILRRPRPTPELVAGAVSVTTRRILRRPCDHAPRRNSPAAASSMPELGDGGGCVRAADVSLICAAPMVAFVLASEEGGQGAIPLGQYPNGIPPSPLDPSGG

SEQ ID NO: 178302 - protein, 473 aa, Oryza sativa
  Clone ID: PAT_MRT4530_75871C.1.pep
MAAAARSALASAGRAANEAVSFVVFMVLDVVEVLLCVVYKVADYMLEGAWRPCYCSSSSTAAGAAASGKIVVSERGGSKVVSMLSSTKLHLEDISDTLYTRPSVLAGAASATTRSPSSRRGGGGVRAPPATTVTVHSAIVQMLRGKIGADGDGKQHKPYPSPRWSDCHCTNCNPADAGRLFVHVEAPPGGAATEEDVLFIHGFISSSGFWTETVLPNVSPEARARRRLFAVDLLGFGRSPKPADSLYTLREHVEMIERSVIERHGVKSFHIVAHSLGSILALALAVKYPAAVRSLTLVAPPYFPVPRGEVGTQYVLRTVAPRRVWPPIAFGASVACWYEHLSRTVSIVLCKHHRLWELAFRVFTLYRVRTYLMDGFFCHTHIASWHTLHNIICGSAGKIDKCLEIVRDQLTCDVTIYHGRDDELLPVQCSYAVKAKIPRARVKVVDGKDHVTIVVRRQKELAMELEEIWNRKR

SEQ ID NO: 178303 - protein, 82 aa, Oryza sativa
  Clone ID: PAT_MRT4530_75872C.1.pep
FVREPLLVLYLSLNSQCMSRSFLSYSMKGLFLEAFLFVFFLSVFWKEYCIWPLQRVQALAVFFRMGPAIAIALISSLQMDGG

SEQ ID NO: 178304 - protein, 260 aa, Oryza sativa
  Clone ID: PAT_MRT4530_75873C.1.pep
MIALQTLSGIGICKSSAGALADMHNLTKLKKLSIYNVKDFDSKNLSHELLSAIEYLTGCSLKSLAIDDGFTGFLNLMDSLSTPKYIHTLELSGELPRVPKWISELQNLEKLTLSLTSLSTDALFIIAQLPVLFSLAFSVSAASQDHGVMEILTKNTMNSGGKILIPSDGFHSLQLLRFSAPLLPLLSFLDGAMPKLQRLELRFRILEGAHGVENLASLQQVLLRVSQQAPETTKVQVSDIRSSVSLHPNRPTVVVDEYYG

SEQ ID NO: 178305 - protein, 62 aa, Oryza sativa
  Clone ID: PAT_MRT4530_75874C.1.pep
YPGKAKAYTNQPQNPIFTRAPKLLNKFLGEKSRGDIYWESSPRVYHVKNWDVLPTGMGISPI

SEQ ID NO: 178306 - protein, 105 aa, Oryza sativa
  unsure (1)..(105): unsure at all Xaa locations
  Clone ID: PAT_MRT4530_75875C.1.pep
TFTGGVESAPGPAGPGRGRRTRSPQRETAPTPGRRHGPRCAVGGHRHPHPLPPHPRREGAQSVTPGGARDRELAAKLHHLICRLLPHTLPCYSQIXRTHPVCCPR

SEQ ID NO: 178307 - protein, 84 aa, Oryza sativa
  Clone ID: PAT_MRT4530_75876C.1.pep
MHAGANTDPKEAYRAPRQVRRGQGSSSAGGLVSQQQGNGERHHRLDVWTSIICTTSRVVQVAPGGRKHIETHWVDRIVRGGAQS

SEQ ID NO: 178308 - protein, 288 aa, Oryza sativa
  Clone ID: PAT_MRT4530_75877C.1.pep
MAVRGWWRTVQSVCMTVQPTVGGGGRRGQAGGSGDAGKVERQAAEERDAEVVAHAGRRGGGGELREGAAATWNAGSGELLREGAVVARDAEAVASRLSSGRLSAATHLSASPPSAPTAPPTIGRTALRADHAVRRRHAERERKSEREKRGEEGKRSMTAGPPVLSTERMARGHEPRVTTITMKHLPFLVHLFFLLCLGLSLTTRCAGDVQFIYSGFTGANLTLDGVAAVTAGGMLELTNGTLQRKGHAFYPAPVPLRGAAGPNATTTTAEESFSPLPSCSASCPTMSA

SEQ ID NO: 178309 - protein, 87 aa, Oryza sativa
  unsure (1)..(87): unsure at all Xaa locations
  Clone ID: PAT_MRT4530_75878C.1.pep
RRALXXQSRRXAPDAAATXPLDRRAVAAALDAARRRLHLVAXRRAAXEASIPSPCPGXRGRPPSRRPAGGXXRGGGDGVKXTSSCRI

SEQ ID NO: 178310 - protein, 217 aa, Oryza sativa
  Clone ID: PAT_MRT4530_75879C.1.pep
MAPSSPPAMNMACARQGRLRQRYEGCYRLVSGCIPYMIKEDGENSSSSLQDDDHVLERLQVLMISTPKRSDLIFPKGGWEDDESIGEAACREAFEEAGVKGVLSGTPLGEWIFKSKSKQNSCGLQGACKGYMFALQVTELLESWPEQTTHGRRWVPVEEAYGLCRYDWMREALDKLKEQLLFAAGDDLRASPSPELDSSAGLYMVMPPVAEGAVALC

SEQ ID NO: 178311 - protein, 119 aa, Oryza sativa
  Clone ID: PAT_MRT4530_7587C.1.pep
MRGWGSRGRGWWRRGACVPRRPLPTPSSGSVGAGRLPSPLFLKIAGREGKGSRTSRKRDLEEGREEWSSSGASYCPCRRRGPWGREGCAAAQSRSSGERGRGRGCRGRSWRRGVRMDLV

SEQ ID NO: 178312 - protein, 76 aa, Oryza sativa
  Clone ID: PAT_MRT4530_75880C.1.pep
DGGDPEKLASNFSSGSEGEIFYSAVYTGLYYESQKDAELAKSHIVAACRSPYGSRSGDYMASLALVHCQCRNWTLE

SEQ ID NO: 178313 - protein, 140 aa, Oryza sativa
  Clone ID: PAT_MRT4530_75881C.1.pep
PLPPSTSPRRRPNSGAGLEALDLAAPPPPPSKVPTPPSSPRRSRERGAAASPPPRHPHRAATTSLCAAVLLRLTARGRHCTVSPRTGDGSSPGEGLAATIMARRTVVRRLAPAVARWGAGEMGAAAARVFAPSRPGGRRF

SEQ ID NO: 178314 - protein, 102 aa, Oryza sativa
  Clone ID: PAT_MRT4530_75882C.1.pep
VIHNLSMGHLSPESPLLYALHPLSAIASGRPPIAASAPRRCGSDAQAQIGGMGLARKHKHLQIFTFTQHFGGFERFTNSRHYLMVSPQYVPEIIAYLVHTTR

SEQ ID NO: 178315 - protein, 144 aa, Oryza sativa
  unsure (1)..(144): unsure at all Xaa locations
  Clone ID: PAT_MRT4530_75883C.1.pep
SAAAGDGRRNREEKRKEEESKEEETGGCRDGFRSCQRQGXGRTPNSPTRSRLMPRCHAGTGNPPPTLRRPHGRAXPPPREQTCATIRPPRKSPDAAAAAASRATSASRRPTTPPPTHRLDPATASSWDPSPPPLPTAGENSTSP

SEQ ID NO: 178316 - protein, 81 aa, Oryza sativa
  Clone ID: PAT_MRT4530_75884C.1.pep
PNPARLLWGARGKNKILPPKPKERLASASPPENPSRREKPKVGSPPVAAFFSISLCQRLKDSKGGVSDGPLVLVFPFPTLP

SEQ ID NO: 178317 - protein, 51 aa, Oryza sativa
  Clone ID: PAT_MRT4530_75885C.1.pep
QSTPPFSAFVRVLGYNIGPPATTPSVPELSTRKILSQTFCMHYMKQQISAI

SEQ ID NO: 178318 - protein, 95 aa, Oryza sativa
  Clone ID: PAT_MRT4530_75886C.1.pep
MPRAAPLPCVALISAAELVRSMADRRRGGYGRRQHVLEGIDCILKRKDFLAPWTALSRSNSRVSASPHPSIACSDCLELPYKRHINTTWDEDLVK

SEQ ID NO: 178319 - protein, 209 aa, Oryza sativa
  unsure (1)..(209): unsure at all Xaa locations
  Clone ID: PAT_MRT4530_75887C.1.pep
RREKGISLTLMQYEMFPKFESLRGFYSLLRSRVFANPFLKRLHKXTPPSTSGFSSLSEVSLTSKSNKXCKELPGMMQVLXKSSRRQHQALTQARNHNSHTHQIRIKHGWRGESSKQGSKVNLKSSPKISRXSKHSEVQLSFSEIPKTFRTNXRKYPEPKLPARYFQKFQKLLSDMSENIHKRFWLRRHFRKFRKSLSDNSELHCHFRKF

SEQ ID NO: 178320 - protein, 119 aa, Oryza sativa
  Clone ID: PAT_MRT4530_75888C.1.pep
MGLRRHLFAPIKGPPSPPLPAATLAFASCLFVRPSAVAVGRRSTAIIVKPKVAATSSSTLSPSVDLPPPFWSPIPTFPESPFSQEKNLKSSKWYTSGQSKTIRIAVPAVMGGSNNVFRD

SEQ ID NO: 178321 - protein, 174 aa, Oryza sativa
  unsure (1)..(174): unsure at all Xaa locations
  Clone ID: PAT_MRT4530_75889C.1.pep
MLYKSGSRKRTAEIFPFKTDGRDRPVHGRTTRDDDDDNVSGDVTTGGGSGAQAHRRTTVRRRERRAPARRERRSELTGDQNGGGRSTDGDSVEEEVAATFGLTMIAVLRRPTATAEGRTKTATRRRSXQRLPRAATTTGATAAHGWSCGGDGGARLHDARALLTTRGEGEGGGG

SEQ ID NO: 178322 - protein, 62 aa, Oryza sativa
  Clone ID: PAT_MRT4530_7588C.1.pep
MARELASRCLAAALFLLLLLLSVSLWPLFVLAWLEIKIHEIRQAKTLKKLSQMSEGIKAIFL

SEQ ID NO: 178323 - protein, 53 aa, Oryza sativa
  Clone ID: PAT_MRT4530_75890C.1.pep
TWPSWASCGKFKFLHHIGAGATIHESYVNWDVHARSDGHHYMASSADGKLCSG

SEQ ID NO: 178324 - protein, 151 aa, Oryza sativa
  unsure (1)..(151): unsure at all Xaa locations
  Clone ID: PAT_MRT4530_75891C.1.pep
ADGVDPDLNLWKGRGGPLFREKMVEXASDQFILVGCETKLVTGLGGSGLTQPVEVXVQFCWKYHPVRLPDLFYDVXGVEAKLRLDEGGQPYGTDHSNYIVDLYFQTXIQDALATGKEISALEGARLSLGCFWTLATSVIIAGTDGVRVQTK

SEQ ID NO: 178325 - protein, 101 aa, Oryza sativa
  Clone ID: PAT_MRT4530_75892C.1.pep
MLSLMSNAWEVDLFARFSSLDDMLRHFVANGFFTEETVVLFRAHTIGDTHCSSFLELVATSLALSLLILDLVSGQKSLATSSFLPTNAVRKKPPYNHVFIL

SEQ ID NO: 178326 - protein, 89 aa, Oryza sativa
  Clone ID: PAT_MRT4530_75893C.1.pep
TAGGLSLHKKKGLEKNLHILGDTCPGGGKTNPIKLNRRCKGVQKSPKVSWIQQSLGNWVPPPFQKKRQSRIGRIHLGVKKPRFINMPNA

SEQ ID NO: 178327 - protein, 115 aa, Oryza sativa
  unsure (1)..(115): unsure at all Xaa locations
  Clone ID: PAT_MRT4530_75894C.1.pep
PPPPGNRIIKGGGWPPQGFPLLCPAGHRFKNLPVGALVAKFFPEWKTPKTGXTTGPEGAVGLALPPGGFPLPVGPPSLGTNPPVRPLTGGPPSLGSGALVPLKVLGGVPRPLSPG

SEQ ID NO: 178328 - protein, 267 aa, Oryza sativa
  unsure (1)..(267): unsure at all Xaa locations
  Clone ID: PAT_MRT4530_75895C.1.pep
MAVLADSAARKLLHGASAQGVAAGMSLGLDGLLQLVADLFASLVHLFVLPFRAMGHAIQWFFAGVVAGLGGAARVLVLPLETLSRWLQAAVAGIASAAHLLVLPFEAFWRWLRDAAAAALPYVLAIVAVVCVVALLWLSCTFLCSAAALIGPPLAGAAISCGAFLLPAAVRTGQALVYAVCYAARGAGVVLAWVLPRCGRCCVVLVTMKAPGAAGMVISRGAFESLPRLYFLXILRSAGAVVAAAVFCARPVAWVFAAPVAALFRAL

SEQ ID NO: 178329 - protein, 472 aa, Oryza sativa
  Clone ID: PAT_MRT4530_75896C.1.pep
MDDAHSSQSPLHVVIFPWLAFGHLLPCLDLAERLAARGHRVSFVSTPRNLARLPPVRPELAELVDLVALPLPRVDGLPDGAEATSDVPFDKFELHRKAFDGLAAPFSAFLDTACAGGKRPDWVLADLMHHWVALASQERGVPCAMILPCSAAVVASSAPPTESSADQREAIVRSMGTAAPSFEAKRATEEFATEGASGVSIMTRYSLTLQRSKLVAMRSCPELEPGAFTILTRFYGKPVVPFGLLPPRPDGARGVSKNGKHDAIMQWLDAQPAKSVVYVALGSEAPMSADLLRELAHGLDLAGTRFLWAMRKPAGVDADSVLPAGFLGRTGERGLVTTRWAPQVSILAHAAVCAFLTHCGWGSVVEGLQFGHPLIMLPILGDQGPNARILEGRKLGVAVPRNDEDGSFDRGGVAGAVRAVVVEEEGKTFFANARKLQEIVADREREERCIDEFVQHLTSWNELKNNSDGQYP

SEQ ID NO: 178330 - protein, 71 aa, Oryza sativa
  Clone ID: PAT_MRT4530_75897C.1.pep
FFFFFFFLNKTRWCFLLVLHKLYNKNRHNSFTYLWEKHFDSPLLHPKFNTLKPRSFDSLWRKKELFCCYPP

SEQ ID NO: 178331 - protein, 595 aa, Oryza sativa
  Clone ID: PAT_MRT4530_75898C.1.pep
MDDPNYPIFDMSEYDPNFGMEQGGSIPAPMPEEPATTQVASEGSGTVAASGSTASSSKRSRTSTVWQNFDEIKETGPDGKEVTLARCKICRTKLSGKSSSGTGHLSRHAASCAKKQGIQLRQQQLILNPDGTVRSWEYDPQVARESLTRLIARQDLPLNFGESTAFEKYIQTAHNPRFKSVSSQTTTRDLRKFYKQGRDTLKELFNTCTFSVSITSDIWSGKAKEDYISVVAHFVDDNWEIQKRIIALKLIDVAHTADNIAERISMVVQEFDLTNKIFAITLDNAAANSRAMEILQPVFSVYGQSFLLHQRCACHIINLIVKTGFKRVSTHIDSVREAISWLFASNPRVAKWKRFCDASGMKPLFHMKQKYLKYWKEIPVLYAFAFILDPRGKLRGLVNMLNIIGEIMNIDYTNYYSDVKTKLYETFAKYENKFQGLRLQRPPTVSVAGKKKIQWGRIWGGSSSSTPAGSSASGTTGTFQGTQELSSYLDSDCTSTEDLNVLGWWNDHKTQYPVLSKLARDVFTVPVSTVSSESAFSTCGRIIEDRRRNLSSDMVEMLLIVKDWELAAERAQHSAENLELVAQFEDLYIDTDAQD

SEQ ID NO: 178332 - protein, 106 aa, Oryza sativa
  Clone ID: PAT_MRT4530_75899C.1.pep
MALQSLRGSMRSVVGKRICPLIEYAIFPPLPRIIVYASRRARMQRGNYSLIKKPKKVSTLRQYQSTKSPMYQSLQRICGVREWLNKYCMWKEVDEKDFGFEIGAFD

SEQ ID NO: 178333 - protein, 141 aa, Oryza sativa
  unsure (1)..(141): unsure at all Xaa locations
  Clone ID: PAT_MRT4530_7589C.1.pep
TKSRERDRLASAALILAAGRGDDNRRHHHLVWWERDLARGSSGAHTVHRRHEISSPIPVAVEQIXLRHRAIVIVSSPRPKPLKNPQDLCTVDGDRLHLPQLRPPSFIFDFFLSGEPRINSLLVHHPCDLTVPRGHICMSLR

SEQ ID NO: 178334 - protein, 187 aa, Oryza sativa
  Clone ID: PAT_MRT4530_758C.1.pep
MAPRDGEGGGRRHHFVLVHGLCHGAWCWYRVATALRRAGHRVTALDMDAAGASPARVDEVRTFEDYSRPLLAALAALPPSGDGERVVLVGHSHGGFSVALAAEWFPERLAAVVFLTASMPPVGRAMANTTDEKQFFGKAAAGTSSAKQGLQGKGGGEAEGDKVLSIDMEVEAAGLNVNGNLGVDEVD

SEQ ID NO: 178335 - protein, 360 aa, Oryza sativa
  Clone ID: PAT_MRT4530_75900C.1.pep
GNHLRSAPPGGKSPSARRCSFMSRSIRPLPAEEEEEEAGGFVTRSCSTVSTPSAASPSLAAAAAVERGEARMRDGGGGGGLGRGMEAKAEAREETESVLEAIAAAEAARRRSSPVRTGLWGGGEQVAAAAAAALTAAAAVQIPTASPYCDEMQRGVHGALGVVGELGRVDDFWFNINTVAYFEAVRIVCMKKSFYKPKELGVPLTSVGHCSGTPLAPLTPAAVLGRSDMRISGRVQARGQSMVHETTPDGSGELVTTAARSRRRRQQARREGMDPYGTNSGNNSRNDMGGGGRRVNNALDWLSPSGDGCARPDPAAVASLLVPISEPCRGIAMSWTTVEPWTSSNTREEARRPQALPAAY

SEQ ID NO: 178336 - protein, 169 aa, Oryza sativa
  Clone ID: PAT_MRT4530_75901C.1.pep
TRPPACSIAAKRHVDQSTTILDVSGVGYKNFNKAARDLIGRLQKVDGDNYPETLCRMFIINAGQGFRLLWNTVKSFLDPKTTAKIHVLGNKYQSKLLEVIDPSELPEFLGGTCTCEGGCMRSDKGPWKDPEIIKMVQCGMGRCGFNSSGHTEADEKMITEDDIVALPKK

SEQ ID NO: 178337 - protein, 642 aa, Oryza sativa
  Clone ID: PAT_MRT4530_75902C.1.pep
MSSAAVMPTPSMNSSSAGAAAAAAAAEGGGGEDERRARALSSSSSSLRQRAMSASSKLLRTSLSRSSKGAAARQRSSKVMSVSIEDVRDAEEMKSVDAFRQTLVLEELLPARHDDYHMMLRFLRARKFDIDKSKQMWSDMLQWRKEFGSDTILDDFQFEEMDQVLEHYPQGHHGVDRDGRPVYIEKLGAIDTAKLLQVTSMDRYVKYHVREFERAFAVKFPACSIAAKRHVDQSTTILDVSGVKLNFDLHVCEGRVQFNKAARDLIGRLQKVDGDNYPETLCRMFIINAGQGFRLLWNTVKSFLDPKTTAKIHVLGNKYQSKLLEVIDPSELPEFLGGTCTCEGGCMRSDKGPWKDPEIIKMVQCGMGRCGFNSSGHTEADEKMITEDDIVAIPKKQESIRRDSVDSPKIPREKIEHPQMSPLHEMSTSESKAPPGQEGSSSRYDDLFPMPDKNMDFNWNGEVSAEKLALARDMYASLPDAYKHGDAGDRQVVTGFMAFVMGVVAMFRVGKIAPKRAMDAAMGIATMEAMAKNRKLMQQQQRQLEQLPGPDTVTVSTAQYEALIKRLGDLEEKVAALTSRPPEMPADKEDLLKAAVTRVEALETELESTKKLLETSSGQQEEVLAYIEKKKKKRGMQNPFRW

SEQ ID NO: 178338 - protein, 133 aa, Oryza sativa
  Clone ID: PAT_MRT4530_75903C.1.pep
MAAAAARAGFRRMFSVSGFTPPPPPAARPLADPCNNLFVSGLNKRTTSDGLREAFSKFGQVIEARVITDRISGYSRGFGFVKYATVEEAGEGIKGMDGKFLDGWVIFAEYAKQREAQQPAQPAASTSYQYSNQ

SEQ ID NO: 178339 - protein, 104 aa, Oryza sativa
  Clone ID: PAT_MRT4530_75904C.1.pep
MAVPTIKPPPEASSKSREEAACSEASATGLSRRVPNTNGWPRVKGKHPHRRCLSACLCPILANLRGIDVPIDGPKGGHGAHNCIGSASSSFLAAMGRRKFVSPS

SEQ ID NO: 178340 - protein, 54 aa, Oryza sativa
  Clone ID: PAT_MRT4530_75905C.1.pep
NGQKFPILNLVQMSAVKVNLYQNSTPSPFWNINAHSVVYIIQSAVQRTHRAAAR

SEQ ID NO: 178341 - protein, 123 aa, Oryza sativa
  Clone ID: PAT_MRT4530_75906C.1.pep
SCLGVSMPPTTGGQDGNMELGLRLNLSRVPRRPFCCPLCILFACQDGREADLARCREGAIRHGSSGQRRGLRRSSLASYWFRCRMLLGRSIEEDVSSTLHDHHDLGNSAHRVPGSCVVYCVYP

SEQ ID NO: 178342 - protein, 334 aa, Oryza sativa
  unsure (1)..(334): unsure at all Xaa locations
  Clone ID: PAT_MRT4530_75907C.1.pep
MVSTTEFKGEYSLPSKKSPLDQFEGVKTHLYRLGAEHENGTLKSFAYTDQGSPSLLDTIILSQWEDYAWKGHFGYDVTACNLKVVEGGWSFVVQLNDKWNSCVLKEHDKFLEPVGCLKPNCMNSYDELLLCIAQGDKDIPEVVPSTKPPKDGLLLIANAYPVEYGHIFLVPSATNQLSFFWDKRMFSLIARIASEVFCINXLQFTRQSTSAVHLYEIIDYPMKALVLTGKDVNTLANFVSEVSLTLHDNNTAYSLLISNNGTKVFLFPQVKNLATGCCLSAWECSGYFIYRAKYDFDRASENEISNRMASVTLQDGAFENLKNLCCAVADDLVM

SEQ ID NO: 178343 - protein, 219 aa, Oryza sativa
  Clone ID: PAT_MRT4530_75908C.1.pep
KDGLLLIANAYPVEYGHIFLVPSATNQLSFFWDKRMFSLIARIASEVNSAAFRVFFDSCTSTMPDHMFFQACYFANPLPVESASTVAIYHGKATSAVHLYEIIDYPMKALVLTGKDVNTLANFVSEVSLTLHDNNTAYSLLISNNGTKVFLFPQVKNLATGCCLSAWECSGYFIYRAKYDFDRASENEISNRMASVTLQDGAFENLKNLCCAVADDLVM

SEQ ID NO: 178344 - protein, 105 aa, Oryza sativa
  unsure (1)..(105): unsure at all Xaa locations
  Clone ID: PAT_MRT4530_75909C.1.pep
KSRVKKFPSQLIQSGILANHSXLISHPYQRPPSKKTLESQVPXIPIPKALXKTHHSPKTTPLCPPPTPLCFLSPLAKILKNQKLTRGKPQPQIGEKIGNHPPQVP

SEQ ID NO: 178345 - protein, 53 aa, Oryza sativa
  Clone ID: PAT_MRT4530_7590C.1.pep
CIMAFLFLIVCGVIAIIVVKIVNPHNKNIRDIPGLAPPAQNRKLLSIESFGSL

SEQ ID NO: 178346 - protein, 159 aa, Oryza sativa
  Clone ID: PAT_MRT4530_75910C.1.pep
MAVHGYGGGGGGGDDTAARVCTVCLLEFADGDELRTLPLCAHSFHMDCVDVWLRAHASCSLYRNAIALPSPVCAACACARASMTSSSSTPSRNHSTSMPTAAAPACSRPAVAAALPLLYRPSYCPQHNSFSLFACSPFLGGIAPEVMNTSAQPSSRKFI

SEQ ID NO: 178347 - protein, 74 aa, Oryza sativa
  Clone ID: PAT_MRT4530_75911C.1.pep
MVLRVLAASMVAAVHGVWRQDRSSSGGGGAPQVDTGTYVRYSPEHVEALERFYGECPKPSSLRRQLLMRECPIL

SEQ ID NO: 178348 - protein, 160 aa, Oryza sativa
  Clone ID: PAT_MRT4530_75912C.1.pep
MPASTMCSLPQTVVASAATAQFTERCNDLPMPCSQILRAKVNSLSFSRKVPTKPTLHNLRCHATQTQSTQRKSATATIQRSDPKGKLKGPKLDDGSGGFPPFRFGKGGGGGGGGGGGSNYFGGFLLFTCVLLMDYLKEFEKNLLLQRHRIGDEATLGLAQ

SEQ ID NO: 178349 - protein, 289 aa, Oryza sativa
  Clone ID: PAT_MRT4530_75913C.1.pep
MPQLWDSGEMADRSLADATALWSGITDNKPPHTEGNLSTPQPEQCGGRREMIWASPSIFLATDEGEKGWHAQRERSAAVAPGRSYPLFLASLPVASSSRFTRALRLFSANASINYVLIATNCRCLCCNRAIHSMLQHTNILCVGIAMSNKSAERCNDLPMPCSQILRAKVNSLSFSRKVPTKPTLHNLRCHATQTQSTQRKSATATIQRSDPKGKLKGPKLDDGSGGFPPFRFGKGGGGGGGGGGGSNYFGGFLLFTCVLLMDYLKEFEKNLLLQRHRIGDEATLGLAQ

SEQ ID NO: 178350 - protein, 49 aa, Oryza sativa
  Clone ID: PAT_MRT4530_75914C.1.pep
RLDSTSAPRVPLPPSPRLGFRLGSRAAAPLLQLCYISGSCVADDAPEVL

SEQ ID NO: 178351 - protein, 123 aa, Oryza sativa
  Clone ID: PAT_MRT4530_75915C.1.pep
VVTPWVRSSGKEERFDFDITKVDKIFNLLLREKQIQLPAGHIIPSAKELGKRRYCKWHNSESHSTNDCKVFRQQIQVAIEGGNIKFDDSKKPMKVDGNHFPINMVHASGRTADGGTNRNFVTS

SEQ ID NO: 178352 - protein, 145 aa, Oryza sativa
  unsure (1)..(145): unsure at all Xaa locations
  Clone ID: PAT_MRT4530_75916C.1.pep
WIRHECIHXPLXPGSHXXXXIYKXCXIXGXPXXRTWAXXLXLAASXXLXFXXSXXXXXXXVVXXXSXXXXXXXXWXCSWXXXXXXXXVXVLQHPXXXXXXXIPXXLXXXXTXXYAATPXSXGAKXXVDLXXAXXYXVGPLMRILR

SEQ ID NO: 178353 - protein, 186 aa, Oryza sativa
  Clone ID: PAT_MRT4530_75917C.1.pep
MAVVRQLLVHRLSCSGLPASRCKTSCWSSGERLPGLKSRVRLLAVAIKPPRAAAGKDEIVRADDDDDGVSLGTVKLPANIDIARFETLLFQWGNSLCQGATLPLPVPLRVDKVEGGVRLGFMAVDDGVTQVLVYIDCLVSPATAASGPVFRAIRNGPMKDQEPPGEPRIMRSLLEALQKCIQYAQV

SEQ ID NO: 178354 - protein, 436 aa, Oryza sativa
  Clone ID: PAT_MRT4530_75918C.1.pep
MVIGAEIKDEMEEAPPLLLDEAARPRRVALFVEPSPFAYISGYKNRFQNFIKHLREMGDEVIVVTNHEGVPQEFHGAKVIGSWSFPCPMYGKVPLSLALSPRIISEVAKFKPDIIHASSPGIMVFGALAIAKLLGVPLVMSYHTHVPVYIPRYTFSWLVEPMWQVIRFLHRAADLTLVPSVAISKDFETAHVISANRIRLWNKGVDSASFHPKFRSHEMRVRLSDGEPEKPLIIHVGRFGREKNLDFLKTVMDRLPGVRIAFIGDGPYRSELEKMFEGMPAVFTGMMQGEELSQAYASGDVFVMPSESETLGQVVLESMSSGVPVVAARAGGVPDIIPEDQEGKTSFLFTPGDLEDCLGKIQLLLTDKEFRDNMGMTARAEMEKCDWRAASKKIRNEFYNAAIWYWRKKRAELIKPLQWLAQMFLPAPEVNRITQH

SEQ ID NO: 178355 - protein, 138 aa, Oryza sativa
  Clone ID: PAT_MRT4530_75919C.1.pep
MAISPAGPGPLRGPTPTGAGAGPIFDPRAAARARGRLAGSPLDLALSASPAPASRQATISSPLLSSLPSGVRRLELVLSLRSQRRRHTGRRHGGPAAAHRRGGEATPAARARPAAHRAAAAAHRARPAARLQHITKSE

SEQ ID NO: 178356 - protein, 290 aa, Oryza sativa
  Clone ID: PAT_MRT4530_7591C.1.pep
MASDVPMSPELEQVDGEIQDIFRALQNGFQKMDKIKDSNRQSKQLEDLTGKMRECKRLIKEFDRILKEDEKKNSADVNKQLNDKKQLMIKELNSYVTLRKTYQSSLGNKRIELFDTGNDQVAEDNTVQMASEMSNQQLMDAGRKQMDQTDQVIERSKKVVAQTVEVGSQTAAALSQQNIPWTFLVRKTEQMKRIGNELDSVHFSLKKASQMVKEIGRQVATDKCIMAFLFLIVCGVIAIIVVKVTSLVEIKTDPISSIVNPHNKNIRDIPGLAPPAQNRKLLSIESFGSL

SEQ ID NO: 178357 - protein, 209 aa, Oryza sativa
  Clone ID: PAT_MRT4530_75920C.1.pep
MAGGPTLPRPGLVAQRRGGGSGDGAATARDLTVSSCGRRRGAAKRRRKSSFMDSGRESSPSARHGRSRGRKRDLTASESAAARKSRQTTASSFTGRSRAAAVALLYDADAESRAVSQGALDMPAWPMAATSTLSVASGKSIGNQVYNVEWTNSTSYYFNSTSCPATHQHPATRAHDCLADGRLSRLDSNPTSLASLHHYVKSDILLKGN

SEQ ID NO: 178358 - protein, 102 aa, Oryza sativa
  Clone ID: PAT_MRT4530_75921C.1.pep
GGPRLPNLVSQLRSLLGTNNLALHAAAACTHVHTNYMSYALLCRNLCICSPCKESVVACKKLYACRRPDWSPTRLLANYVNRPVQKKKRKIDKKKKKSLKGG

SEQ ID NO: 178359 - protein, 331 aa, Oryza sativa
  Clone ID: PAT_MRT4530_75922C.1.pep
MAHKRGRLVGWVLLLLLAVAIAGAAAATPRQLFLVTQAPVTLTNHHGQLLTGNYSVNLLWYGRFTPAQRATVADFLLSMSSPSAAAEAAAVSGGPAAPSVASWWATTARYHPGAARLTLGRQVLDASLSLGRRLSETSLAALAARLSPHRGSIAVVITAPDVLVDGFCLSHCGLHASATSAAAAAATASPAATRGRGRFAYAWVGNAAEQCPGECAWPFHQPAYGPQAPPLVSPNADVGMDGIIINLATLLAGAVTNPYGGGYFQGPTEAPLEAVTACTGMFGAGAYPGYPGQLPVDAATGASYNAVGVAGRRFLLPAMWDPKTSQCSTLV

SEQ ID NO: 178360 - protein, 150 aa, Oryza sativa
  Clone ID: PAT_MRT4530_75923C.1.pep
VAGLQSELNYLQGHLSTMELPSPPPYVAGPTLAPPQPQPLMPMTAAANFNFSDLPSSSAANIPVTADLSTLFDPLPAAQPQWGLYQQQQHHHQQLHHHPYDRMGDGSSSSRGGDDDGSDGGDLQALARELLDRHGRSSSSSKLEPPPHTQ

SEQ ID NO: 178361 - protein, 368 aa, Oryza sativa
  unsure (1)..(368): unsure at all Xaa locations
  Clone ID: PAT_MRT4530_75924C.1.pep
MDHFGGRALGFGGGGGCGAVRCRHCSASLPAMPGARVIQCAQCYGVTRVGXPRPAPPPQPGRAVAPXVPMPVAGGGFFPGSRGKKRAVLIGITYAGMRRRGSQLMRGPVNDVKCMRYLLCERFGFPNDCVLILTDEEKDPCRLATKENIRMAMNWLVQGCSSGDSLVFHFSGIGVQVPDDDGDEVDGYDEAICPMDSFSQGPILDDEINEAIVRPLVHGAKLHAVVDAEHSSTVLDLPFLCCLSSRSGGWQWEDHRPPTGAYKGSSGGQAMLFSGCSDGNNKHSLLPEASTVGAMTHSFIKAVECEPRATYGSLLTTMRSIMRDGGVTCNLQGPIGAPIRKVANFSGIQEPNLSCSEMFDIYRKPFVL

SEQ ID NO: 178362 - protein, 77 aa, Oryza sativa
  Clone ID: PAT_MRT4530_75925C.1.pep
PCCRRRSGRGSVTARGGRSGCAASPAPPSCRCRRCPARRPTRGSGASAAATSPGARLQLTVTRLLRVGAAAELCRSY

SEQ ID NO: 178363 - protein, 100 aa, Oryza sativa
  unsure (1)..(100): unsure at all Xaa locations
  Clone ID: PAT_MRT4530_75926C.1.pep
GDGLQCKDKFLVQXVIXPSGVTXKXISRXKMFTKRIREXRLKXVKLRXTYIAPXQPPSPVPEESEEXSPSRVSESENGNSLGGGFTLKKHEPPEKFKLEL

SEQ ID NO: 178364 - protein, 109 aa, Oryza sativa
  Clone ID: PAT_MRT4530_75927C.1.pep
IVVVASVSAGDADPQLKLFSPCPRPVSAATSPTIGLPSPPPSSLPIPRITSLFTAIADRTPLTRTATSPPSDSPHLPSPSCTIAPSPSIRNRAPPTGTTTSPPSMGACI

SEQ ID NO: 178365 - protein, 58 aa, Oryza sativa
  Clone ID: PAT_MRT4530_75928C.1.pep
YQTAFHRGGGRSRIVDPPGCRNSARANFLQVVSFTCHRLASNYLLNTLRWMFPATNLS

SEQ ID NO: 178366 - protein, 97 aa, Oryza sativa
  Clone ID: PAT_MRT4530_75929C.1.pep
ISPVIDCLNIGRRKRAREKKKTLKRNPKFDSISVACSFRRSNWGRIIITGGSSCLLRRNHPLRRVDQGPTDHMEAATRCRAHAASHCCCIIVTRLQF

SEQ ID NO: 178367 - protein, 131 aa, Oryza sativa
  unsure (1)..(131): unsure at all Xaa locations
  Clone ID: PAT_MRT4530_7592C.1.pep
PHVSSHFFFPHLLFPFSLHPSSSQTERAVEQGTRCGDGAQAHPQPSLSRRPPTSTSSKXTSPAASRSSMTXLLHESSSPVELELDEAAADAELELDLVLDQAVAAQLPAATTLAAPRRRRSRRPRSSTQLP

SEQ ID NO: 178368 - protein, 69 aa, Oryza sativa
  Clone ID: PAT_MRT4530_75930C.1.pep
MGMEDGGLVSEAGLGNLKVARQGEMVKRTMTSSRHGKVLAANKKQSSGGGAWNERDVTMIEEQGIKCRR

SEQ ID NO: 178369 - protein, 1004 aa, Oryza sativa
  unsure (1)..(1004): unsure at all Xaa locations
  Clone ID: PAT_MRT4530_75931C.1.pep
MAEHTPPRPSRTPPHAPTPPHSRSPLSRPSCRPSRRHPAESPPPRRARGRGERQPLVAQPRVIVRESSAAVHYPVLTRTNNEEWVLLMTVNLQAQGLWHAVEPYEDEEIKYRDDRLALAAILRAVPPEMVRSLSTKRTAQSAWEAIKTVRVGTQRMFMTCPLRRSSAGEHRGLTGVYYIPSLTANLISVGQLDENGCESLVRNGFMRIRDQDRRLLARIPRSRNQLYPIRISAARPICHTARSSDEAWRWHARYDHLSFQSLRKLVQGDMVRGLLMIDHVDQVCDSCLAGKQRRALFSACAKHFAEHLLDLVHGDLCGPISPVTRSGNRYFLLLVDDQAPVAIKRFQAAAELESDCKLWVLRTDRGGKFTSVEFGAYCADRGVQRQLTAPYSPQQNGVVERRNQTVVTMAPSMMKDKGLPARFWGETVSTAVFLLNRAPTRALSGKMPYEAWHGVKPAVHFLRTLGCVAHVKNTKPNLKKLDDRSSPMIFLGSEAGSKAYQVFYPVSNRVQAAHGGAGDTDGTTDFTIEYTVAPIDINAPEQEQAGTPTPSSGSPSTTMGNAPTPPTLATPEAETGAASPEFVSPPSNLTDTRAADHDDDVPLRFRTVENILRHATTPGLMDSITDNKTWVLVDPPPSHRPIGLKWVYKVKRDERGAIVKYKARLVVKGYVQQAGIDFEEVFPLVARMESVRLLLAVAAHAGWGVHHMVVKSAFLNGELAEESANEHAVYTRVKGDAKLIIGVYVDDLIITGPDQASIGAFKREMCNIFKMSDLGLLSYYLGLEVKQREIGISLCQLAYAGKLLDKSGMGDCNACATPMETRLKLSKTSMSPLVNAMNYRSIIGGLCYLVNTRPDIAHVVGYLSRFMEELHEDHQAAVKHVLRYIAGTWHHGVHYARKQDGKPALHGFSDSDMAGDLDTRRSTSSVLFFLGSRPXSWQSTKQKVVALSLCEAEYIAATAVACQVRGEQEDCRQLRSHGGAAGGRTDKAARPCSIPGAVQWDRHR

SEQ ID NO: 178370 - protein, 89 aa, Oryza sativa
  Clone ID: PAT_MRT4530_75932C.1.pep
TAKEAMYDFPFLCISKAQKDNEQLPSANTMADLHTRQKVVTVQPAYNVYSPDYSNIPFISYISINSQYFNVALICDFANFYSEAHDESV

SEQ ID NO: 178371 - protein, 133 aa, Oryza sativa
  Clone ID: PAT_MRT4530_75933C.1.pep
MQVSAEDVGNELRRHTIELGEVHDNGRAPLLVTVECVEEEMTEWGEAVAWLVGMRLHGGMRRRADEDQTDWHVHISPRFGLALELSRSSRLVCVFFASTRAKRQHDYGRCGAKAEMLESALETGHDFREIWTS

SEQ ID NO: 178372 - protein, 69 aa, Oryza sativa
  Clone ID: PAT_MRT4530_75934C.1.pep
MTAVHCQASAEVQLPPYHAPPRGRKIDTRESWGSYRLIPASHGKTMLTSSLEVESKQSRIGISNYWELR

SEQ ID NO: 178373 - protein, 137 aa, Oryza sativa
  Clone ID: PAT_MRT4530_75935C.1.pep
FEVSFGDSLYLWEMMWALEYDPDIFFAACEDASAHKSKVSKSKLRGVRHFGKWDKDKDKENSKNGSEDTDGPVPISVFMVASVLKEKREKLLQEARGLDDLIRILNDVNGNLDAKKACAGALKLHKKYLKKVQTKKP

SEQ ID NO: 178374 - protein, 160 aa, Oryza sativa
  Clone ID: PAT_MRT4530_75936C.1.pep
MSTINQNPIIQYRQTIIIGSGTAGLSAAYQLQKSGIKSVFILEGSNRIGGRILTDYLDADSSKPLEMGACWMHGLQGNPVYELAQREQFPTHTGTILNFNIGTCVDENGLQISAELHNEVDQFFESLLQDTRDLFEYQQNHQTQISSISIQKVFLEKFEN

SEQ ID NO: 178375 - protein, 60 aa, Oryza sativa
  Clone ID: PAT_MRT4530_75937C.1.pep
LVHLEMKLHYSGFASTTDFASQQETDQLRQKKKKQSLILPTDINFTRLMKSCVQLIPENL

SEQ ID NO: 178376 - protein, 85 aa, Oryza sativa
  Clone ID: PAT_MRT4530_75938C.1.pep
GFAEFPVNECDGINFMIRRLRLRFVSFHFLAADDFNNLSFSDLGFTQSRERRSKIYVIKLEASTVIATDISCISAKNLRFGSYTL

SEQ ID NO: 178377 - protein, 79 aa, Oryza sativa
  Clone ID: PAT_MRT4530_75939C.1.pep
PARGKRKAPAPRGPRPLLKESHGPAAANGNGNKTPGVQGGLLFLLWGPVGVFKGKLNFFFSNGFVRIFFPFFFWDYWAG

SEQ ID NO: 178378 - protein, 44 aa, Oryza sativa
  Clone ID: PAT_MRT4530_7593C.1.pep
VSCYVLKCTLYIVNLSIVVGKNPCLLFISFCFCRGTSTMLSFFS

SEQ ID NO: 178379 - protein, 60 aa, Oryza sativa
  Clone ID: PAT_MRT4530_75940C.1.pep
MHSAPTYVWSQLATNENPDAPRKDVVFHAQKITNEKSQAESWQLHSIGILDGSDEAYSFE

SEQ ID NO: 178380 - protein, 95 aa, Oryza sativa
  Clone ID: PAT_MRT4530_75941C.1.pep
MGADLASKSTTRTLVSLGVHHGGGAALRGGAVGVVGARPSHQRAEHTGGGGERGHRGCCGGSAPNPSSFAARRLRRRLPHPLPQHRGAVRLRFRY

SEQ ID NO: 178381 - protein, 171 aa, Oryza sativa
  Clone ID: PAT_MRT4530_75942C.1.pep
MEEKEKQQLAGDGDGIAYGDRSKEEAEERKKQRTHANAHAFVCSLSLLLAATMALMLLSYGGSPLWLASELAAVLCLLLYLWAYHVTQNLAAGAGAAVPVEALVFAFPLVFGAGFLAALLAVAVAPVAGVLVMGADVAGVSALFGFCLAEYLRHNEAHAAVDGAAPASVET

SEQ ID NO: 178382 - protein, 106 aa, Oryza sativa
  Clone ID: PAT_MRT4530_75943C.1.pep
LQEVITKIQELSIVNKPSSTYMLRSPSPASQSQDPTSAAVLLVPHPSHLNPPGLAPPPPTCRIHDITGGRREGEMAQYRRRRRSIDLDINLRSGRKAAGLRHACCR

SEQ ID NO: 178383 - protein, 339 aa, Oryza sativa
  Clone ID: PAT_MRT4530_75944C.1.pep
MGQDLAEIHPRELQFTFEVKKQSSCTVHLVNKSNEYVALSSFQGQHVISQLNCSFLLLILFFTRLNEVTMQAQRTAPPDMQLKDKFLVQTTVVPYGTSDEDLVPSYFSKESGRYIEESKLRVVLVSASHPFGEQPINGIPNTEAAVEVPSLKDTLNIKNEIPVAEKEVHSPLEEDPVVIPAPPYPVKEAPILREVPVHISPVRETSFLREVPAPVSPVKETPILREVPTPLKETPVILTESPPPPTDTSSITVESLHPFEQNLASLKESPLEETLPKAAVVLSEQGAVIFGSSQVLLLTTACELLRSSSSGIDISWTLQFVTKNWRAATHQNLERGSIP

SEQ ID NO: 178384 - protein, 287 aa, Oryza sativa
  Clone ID: PAT_MRT4530_75945C.1.pep
MGQDLAEIHPRELQFTFEVKKQSSCTVHLVNKSNEYVAFKVKTTSPKRYCVRPNTGVILPRSTCDFTVTMQAQRTAPPDMQLKDKFLVQTTVVPYGTSDEDLVPSYFSKESGRYIEESKLRVVLVSASHPFGEQPINGIPNTEAAVEVPSLKDTLNIKNEIPVAEKEVHSPLEEDPVVIPAPPYPVKEAPILREVPVHISPVRETSFLREVPAPVSPVKETPILREVPTPLKETPVILTESPPSPTDTSSITVESLHPFEQNLASLKESPLEETLPKAAVVLSEQGA

SEQ ID NO: 178385 - protein, 86 aa, Oryza sativa
  Clone ID: PAT_MRT4530_75946C.1.pep
PGPGPGPPRKPGPAGGSGAHPPGPPPGGPHPPGPPPGGPQPPGPPPGPPGPGGSISPRENASYSFTKNSIQEQNFQERRQHILANC

SEQ ID NO: 178386 - protein, 791 aa, Oryza sativa
  Clone ID: PAT_MRT4530_75947C.1.pep
MAHLGAVLCIRVALVVVLLPSLLATVAVAHNDTGEHKNYLIIVRKPYEYDHNVYKTVSSWHASLLASVCDTAKEELATDPGAETRLIYSYRNVVNGFCARVTREEVYEMAKKDWFVKAIPEKTYKLMTTYTPKMVGLTGAPAAYHGGLWNRSNMGEGMIIGVLDDGIAAGHPSFDAAGMGPPPARWKGRCDFNSSVCNNKLIGARSFFESAKWKWRGVDDPVLPVYELAHGTHTSSTAGGNFVPGANVMGNGFGTAAGMAPRAHLALYQVCSEDRGCDRDDILAAMDDAVDEGVDVLSISLGDDEAGDFAGDPVALGAYTAIMRGVFVSSSAGNNGPNPLTVSNEAPWLLTVAASTTGRKFVATVKLGTGVEFDGEALYQPPNFPSTQWPLIADTRGDGTCSDEHLMKEHVAGKLVVCNQGGNLTGLRKGSYLHDAGAAGMVLIGPEFMGSMVQPKSHILPVAQIVYLSGEELKAYMKSTKSPTAALIYKGTVFGDRKTPEVAPFSSRGPSRQNQGILKPDITGPGVNIIAGVPVTSGLATPPNPLAAKFDIMSGTSMAAPHLSGIAALIKKAHPKWSPAAIKSAMMTTADTLDRRRRPITDQKGNNANMFGLGAGFINPTKAMNPGLVYDLTAQDYVPFLCGLGYSDHEVSSIIHPAPSVSCKQLPAVEQKDLNYPSITVFLDREPYVVSVSRAVTNVGPRGKAVYAAKVDMPATVLVTVTPDTLRFKKVNQVRKFTVTFRGANGGPMKGGVAEGQLRWVSPDHVVRSPIVVSAQKFLNGNTSSSDHAGH

SEQ ID NO: 178387 - protein, 48 aa, Oryza sativa
  Clone ID: PAT_MRT4530_75948C.1.pep
MPLLSEYRHGFPAFAIFSYGFRHRASPEWSGQRASWHASNKPLMGKGE

SEQ ID NO: 178388 - protein, 116 aa, Oryza sativa
  Clone ID: PAT_MRT4530_75949C.1.pep
HASAASPRTEPPPSPSSPPIASPPAPSRFRGRSHAPSAAGGPSAPWPHRLPPALQSPLRGGPATSHPSAAGASHPQQPPPSLFASLACMEKGNHRWAHAETETVRSPSPIYSSSVF

SEQ ID NO: 178389 - protein, 51 aa, Oryza sativa
  Clone ID: PAT_MRT4530_7594C.1.pep
STTPRRERAILGLYRAPNQLMPGFQRILENQASQLIVSGHHCSCGYIKRPC

SEQ ID NO: 178390 - protein, 111 aa, Oryza sativa
  Clone ID: PAT_MRT4530_75950C.1.pep
NMFMLKGQEESARIIHVKNIVRRSHIELVTSPGGSCRQRPGRAATTTPAPPRPAHPPAAPAPPPAAPALSTAVRRPPHWAPPSRRRRCTSPERAAVTASRRRPADAPPRVK

SEQ ID NO: 178391 - protein, 137 aa, Oryza sativa
  unsure (1)..(137): unsure at all Xaa locations
  Clone ID: PAT_MRT4530_75951C.1.pep
MGLGDRTVSVSACAQRWFPFSIQAKEAKRLGGGCWGCEAPAALGCDVAGQSGRGDCSAGGRRCGHGAEGPPAALGAXLRPRNLDGAGGDAMGGEARRASRRGRRRSDRERVRGGEASAGRGEGEGRRSDCIWRWQLR

SEQ ID NO: 178392 - protein, 1151 aa, Oryza sativa
  Clone ID: PAT_MRT4530_75952C.1.pep
MRQTQSRFASVPGFPALTRTAIAEPPPRRIRQTQTRSRTDKAALAAPPTGDHKAQARNPLRYRLSRHRRAAAANEATEAEAMAASDDGQLRTWVSDRLMALLGYSQGLVARLVVRLARECASAGDLAARLVDLAGFPPSPDTAAFAEDVYGRVPRSCGGGGDDAGVSEYQRQMQEAAAMAKKQSTIKLLDDDGEIGVSASPSSGGRKRFRRKAVGEDDDDAGRNARRRRSPDDEEEDGDAGEEEEMERDQIERAQLERNIRERDAASTRRLTDRKTTKREQGELARRSDAMDKNDTSGLRRLSRRAYLQRRKEKKVEEMRDEIVDHEFLFPGVQLTAAEERDMRHKKQVYGLVHDRDDYYRMPDAYDAAANVDQEKRFSVARRRYEEPAEAARDGKTANALSEQEAWEEQQIRKSRLQFGSMDRGRRGDEYELLFDDGVEFVRSTVMAGTAPADDDDTAAAAAADEYHAEAMDAKATLQDERKTLPVYKLKDDLLKAIDEHKVLIVVGETGSGKTTQIPQYLHEVGYTAGGRKKVACTQPRRVAAMSVAARVAEEMGVKLGHEVGYSIRFEDCTSEKTVIKYMTDGMLLREFLGEPDLGSYSVVVVDEAHERTLATDILFGLVKDIARLRPDMKLLISSATLNADKFSDFFDAAPVFRIPGRRFEVGIHYTVAPEADYIDAAVVTVLQLHVTEPPGGGDILLFLTGQEEIETVEEILRHRLRVLGGKVAELVICPIYANLPAELQAKIFEPAPAGARKVVLATNIAETSLTIDGIKYVVDPGFCKVKSYNPRTGMESLLVAPVSRASAEQRAGRSGRTGPGECFRLYTEYNFVSDLDDDAVPEIQRSNLASVVLALKALGINDLVGFDFMDPPPAESLLRALEELFALGALNSRGELTKTGRRMAEFPLDPMLSKAIVASERYGCSEEVITIAAMLSAGNAVFYRPRDKRVHADAARRAFHAGNAGDHVALLNVYNAWAESGYSPQWCRESFVQHRTMRRARDVRDQLGALLERVEIAPCSSAGGGDLDAVRKAVTAGYFRHAARLQRDGSYRAVKSRQTVFVHPSSGVAQAPPRWALYHELVLTTKEYMRQVTELKPEWLVEIAPHYYERKDVDEPEPKKTAAATTPQEQTTAGSTPTKQTPNLNSFFDV

SEQ ID NO: 178393 - protein, 571 aa, Oryza sativa
  Clone ID: PAT_MRT4530_75953C.1.pep
MEGALLCAANHAPLTPITFLDRAALVYPDRPAIVASSSGLTRTWRETRDRCLRLTAALAALGVHRHHVVAVFAQNIPAMCELHFGIPMAGAVICTLNSRLDAAMASVLLRHSEAKLIFVDCALLDVAHDAIRRISQSGATPPVLVLISELLDDPSDAKLPSGRVDYEYEHLVGNAGSSPEFAVRWPADENEPIALNYTSGTTSRPKGVIYSHRGAYLNSLAAVLLNDMASTPVYLWTVPMFHCNGWCMAWGVAAQGGTNVCVRRVTAATIFDAVARHGVTHMGGAPTVLSMIVNATAEEQRPVARRVTVMTGGAPPPPKVLHRMEEQGFLVIHSYGLTETYGPATVCTWRPEWDALPAEERARIKSRQGVHHHGLEVDVKDPATMRSVPRDGKTMGEVMLRGNTVMSGYYKDGAATAEALAGGWFRSGDLAVRHEDGYVKVLDRSKDIIISGGENISTIEVEAALFSHPAVEEAAVVGRPDDYWGETPCAFVKLRPGAAAAAKAGVVEEELMAYCRARLPRYMAPRTVVVVEEGLPKTATGKVQKFELRARAKAMGTVPAAAAAKSKRSKL

SEQ ID NO: 178394 - protein, 136 aa, Oryza sativa
  unsure (1)..(136): unsure at all Xaa locations
  Clone ID: PAT_MRT4530_75954C.1.pep
MARTKQTARLPTXGKAPRKQLATKAARKSAPATGGVKKPHRFRPGTVALREIRKYQKSTELLIRKLPFQRLVREIAQDFKTDLRFQSSAVSALQEAAEAYLVGLFEDTNLCAIHAKRVTIMPKDIQLARRIRGERA

SEQ ID NO: 178395 - protein, 267 aa, Oryza sativa
  Clone ID: PAT_MRT4530_75955C.1.pep
MELRRKGVYQTRGASRPIWGALPEGSVCCHAEVHPIDNVLPPEVVEVKVDDKANHTACVDVDMAGDDDHAMLRLEKIIKLFHLHMGPTWAIYRAEVHPIDNVLPPEVVEVKMDNKANHMTCMFVDMAGKLFKLDVKMRDLKCRGSVENSPDGIELEDSLHLHGGEEPVARHVACGGTASARCGVSMTGVIRHQGGGRHACSCRAIYTLLPAHTATTTAAIAAVQRDMRMHPNFDTAMYAPRTQQSLGACARCPNTTAPWTRDDRARH

SEQ ID NO: 178396 - protein, 61 aa, Oryza sativa
  Clone ID: PAT_MRT4530_75956C.1.pep
MGNRSGNEENGESLGGEDEETFYFTSAATAAGGTVASDVDAAAQEGGEHVIADVSFASHSA

SEQ ID NO: 178397 - protein, 174 aa, Oryza sativa
  unsure (1)..(174): unsure at all Xaa locations
  Clone ID: PAT_MRT4530_75957C.1.pep
WQASKAALCRLGRVHQCGIVQGSGSGAVCSARRGLQRSRRRQAEWRRGGGGXAGERAEGRKRVGVVVEAKGQGCEVGAGDXGKAGGGRGGSGGGAAPTARPRARRRRRARRRGGRRRRRRRPGRRGRRGRGGGGGAGGAASRARPWRRPRMPPCGAVRPVSSLRSLASAPARPP

SEQ ID NO: 178398 - protein, 142 aa, Oryza sativa
  Clone ID: PAT_MRT4530_75958C.1.pep
FTRLQPRERRDRMNPRRRRGADTSLRRLGLRPRRRWPDGAASPHGEPHRLRLRLGVGFPPSLWEKENISPRFDRDEPSHSDSDSNSNSNVGGFYPSTIKRAPHPPPEITKSLNSQNQFAHQTSQIPLPAVLGFAEELLSFHP

SEQ ID NO: 178399 - protein, 88 aa, Oryza sativa
  Clone ID: PAT_MRT4530_75959C.1.pep
MKKPDDLSSIHFINTKVIIFVETGRLHLHVGAQELVPLGLAASLSFCSHMATPNLIVIVGFVLGYNPHALDNLHTLTCSRFEMYCNLR

SEQ ID NO: 178400 - protein, 54 aa, Oryza sativa
  Clone ID: PAT_MRT4530_7595C.1.pep
ARGSSSQASARGDTHDPCRHRERRCGASVLWPGVAREAAGSRLVAGGADESRLP

SEQ ID NO: 178401 - protein, 411 aa, Oryza sativa
  unsure (1)..(411): unsure at all Xaa locations
  Clone ID: PAT_MRT4530_75960C.1.pep
MAKGKNSPPNLHGPNYIRNASDVFPCGRKTLGMMLLSVLLVLVLSAYSPEQIFLYPPMPAHNSHQTAINSPHDNAKACNLFNGTWVRDFGGPIYTNTTCPTIPEARNCVCQRXKLCKVRXQMDYVNWMWKPHGCAMEKFEPHLFLTIVRGKTLAFAGDSIARNQMESLLCLLSQVSXTLLMVLWTKFIVEDSQRQINGTVVEEHDIHLDKLDPRLATNLHQINILVISTSRWFFRRNYLYEGEELIGCIYCSEDNITSFSVPMAIQRVFRTALKNLKESQECRLQLTVVRTATSAHFENGLWNTGGSCNRTEPLREEAMIDQTEWAIRNAQVEEADRTKKNNGKGGVKIEIIDITKAMSMRPDAHPGIHWNNQWMRGYSDCSHWCLPGPIDMWNELLLAVLNKYKNSLEDQ

SEQ ID NO: 178402 - protein, 62 aa, Oryza sativa
  Clone ID: PAT_MRT4530_75961C.1.pep
CGITLVHEMHSYDARKALQKNGVQLSSGVIIGVKPIDPMHRQQLDESPLGGRGGEQDVSVPK

SEQ ID NO: 178403 - protein, 219 aa, Oryza sativa
  Clone ID: PAT_MRT4530_75962C.1.pep
MPPPMALSISSTAAATALLPTLPPSRSRLRVAPRRAAARVARVVSAGYAAGFYGGAAAAAGGENDEVGDEEGSSSGFGAGLGIGGGGLGMSAAEAALALEEREMPPCPPGLRQYETMVVLRPDMSEEERLALIQRYEELLVAGGAMYVEVFNRGVIPLAYSIRKRNSRTGLPSTYYDGIYLLVTYFTKPESLDALQMRLNADDDVIRSTSFKVRKRKAF

SEQ ID NO: 178404 - protein, 96 aa, Oryza sativa
  Clone ID: PAT_MRT4530_75963C.1.pep
MATKLTEAETATTMLFPATAGASAGVSSLHGAIPALVSAGLGAAADESAGDEARDIGGAGGEAIVIGGGGGLGEQALAHVPSARIPPPPPPPTSTS

SEQ ID NO: 178405 - protein, 120 aa, Oryza sativa
  unsure (1)..(120): unsure at all Xaa locations
  Clone ID: PAT_MRT4530_75964C.1.pep
SKQRPRSSHPQGAQPLQQAQIRSKPRNQPQTHRARTRRQPNPPKRRRKKPRGKTQAKSPPPXKRVPPTKTPKQPTPKKKGTNRGAQKAGQTPKSGGAPPPPTKTENPPPPPKKKRPPPGE

SEQ ID NO: 178406 - protein, 109 aa, Oryza sativa
  unsure (1)..(109): unsure at all Xaa locations
  Clone ID: PAT_MRT4530_75965C.1.pep
CKLQGEREVWSACDGSVVDTGVGGLASVRWQRGRRCRLGSSKLLGDACSDPTRQADQPGDGTTSXLAFNVSPWRPAPSWTSTPHHREHVGEKYKNGCVEIFFNVSDSLV

SEQ ID NO: 178407 - protein, 55 aa, Oryza sativa
  Clone ID: PAT_MRT4530_75966C.1.pep
NACQKVLKTTGEEDGRGYSSMFQQPCALRLVLPRCQIFLDIEPRVALLHHPPFGE

SEQ ID NO: 178408 - protein, 165 aa, Oryza sativa
  Clone ID: PAT_MRT4530_75967C.1.pep
IPDPFDYGAGFINPNMAADPGLIYDISASDYLKFFNCMGGLGSGDNCTTVKGSLADLNLPSISIPNLKTIQVATRTVTNVGQANAVYKAFLQPPVGIEMAVEPPMLVFSKDRKVQSFKVTFKVTRRPIQGDYRFGSLAWHDGGNHWVRIPIAVRIVIEEIYSKIS

SEQ ID NO: 178409 - protein, 95 aa, Oryza sativa
  Clone ID: PAT_MRT4530_75968C.1.pep
TLLSPPPAGPSPSLPPSPTAAIPASPPARSSLPARSGRGEAPPLPLLSGRRLPSNHRPPPPSPPPLLPEPTPIIRCRFFLFWAMEVGKCIIGAGF

SEQ ID NO: 178410 - protein, 605 aa, Oryza sativa
  Clone ID: PAT_MRT4530_75969C.1.pep
MSPNLESHIKSQVPALLLRRFFGGAGRRRVFVQTETGCVLGMDLDRSDNAHTVKRRLQLALNVPTGETSLTFGDRVLENDLSFIRPDSPLLLTRNSINRSCSTPCLCPVSKDFEHKDRSGLVEMLGCSISCARVKRLVDDVVTAIRSGVDPVPIGSGLGGSYYFRNISGDRVAIVKPTDEEPFAPNNPKGFVGRALGQPGLKKSVRVGETGFREVAAYLLDHDNFANVPPTALVKITHSIFHINCPVNGGSPAHDQKQQVSSKIASFQQFIAHDFDASDHGTSSFPVAAVHRIGILDIRIFNTDRHAGNVLVRKLDGGTGRFGCQTELFPIDHGLCLPENLEDPYFEWIHWAQSSIPFSEEELEYIKNLDPMRDVAMLRRELPIIREACLRVLVLCTIFLKEAAASGLCLAEIGEMMTREFRGLEEEPSKLEVVCMEARRKLAEWEPYSPVIEQGEDMDFQFSLDMLGEYNDVIRSPRFNGLGAKGNGFRNPLSKLVESIDEDNDDDDGRSESSKRSSERVHSGGLKFPSADKSSGSNGSVHALNRSADEQLPSSVYFVRLSDMNAEEWNIFLEKFQELLKEALQERAAAAGQRMKQRLGTSCKF

SEQ ID NO: 178411 - protein, 55 aa, Oryza sativa
  Clone ID: PAT_MRT4530_7596C.1.pep
MADGEEEEEAHDWRRSRAASPSARGSRSCGMGVCDVRGVFVEMRRRNFASSSRLL

SEQ ID NO: 178412 - protein, 366 aa, Oryza sativa
  Clone ID: PAT_MRT4530_75970C.1.pep
MEGGQIGAIGASGGGGRLSTRGAADSGEGYLGKKTTTEKRHMYISDEWLRANPSVTAYMSTSLNVRQQVAEEGIPRLGAEAACNAIGNWGKPASSITHVVFATTSTGCLPSADVTLIKLLGLPLSTKRVMLYQSGCFGGTTALRVAKDIAESNRDARVLVVTSEVMSLIIRGPSESHVGNLVAQAVFGDAAGAAVVGCCRHPSSTGERPVFQLVRASQDVIPGTDDAVVVKVQQEGVVITLHRDLPLHVSNAIGGVVESAFRGVGTTVTSYDEAFWLLHAGGRAVVDGVEERLGLGEGKLAVTREVMRQYGNTRSTTIFLAMEEMRRRSEERGMATAGEGLEWGMLMAFGPGLTVETMLLRAMPRN

SEQ ID NO: 178413 - protein, 113 aa, Oryza sativa
  Clone ID: PAT_MRT4530_75971C.1.pep
VLFSGSPRVRPASEKKKKKKKKTNKKKRKKKTYACMQTKKNIKGCRYLGFSVPSFCILPSGSSLAPPNFWGVAVIPLLWACVIAALPDLIALAPFALPAWFLIRAVPLPFALA

SEQ ID NO: 178414 - protein, 240 aa, Oryza sativa
  Clone ID: PAT_MRT4530_75972C.1.pep
MPSFDRARGAWARRRGARLFYGVARSRRVAVPRRLARHVTGVRLGTCVHAGRIYPRWPLYRGLGIYNVIGERRVMRRTVAAAGASSLEIPPLPPPMAKASWADGCRDARWPHHGSIVVARADALIEPRPSYGGRQSDGTETAVSRDTFGGSSNWFRHESTAKFTKSDDATGFFKLVRNKLCRWMIIIIRYKWRNIGVLATCHYPLIIGDLTLLTYQVENKRPVETKITLINRNVTLPKFN

SEQ ID NO: 178415 - protein, 60 aa, Oryza sativa
  unsure (1)..(60): unsure at all Xaa locations
  Clone ID: PAT_MRT4530_75973C.1.pep
MIFPQDKINTIPLEYSRVKCYNGISVRLRMNSVTIIYQKYFCGIAENYISXNVVKKYQQL

SEQ ID NO: 178416 - protein, 58 aa, Oryza sativa
  Clone ID: PAT_MRT4530_75974C.1.pep
PRELLSSCRDIDDEDVQQRGQPESLAVIPVLEFEPHVSPDHVDQPLDIEGRMATTSSG

SEQ ID NO: 178417 - protein, 340 aa, Oryza sativa
  Clone ID: PAT_MRT4530_75975C.1.pep
MAKLRERRQLRLSVPASPPPFPHLDHPFAALPSTPPGSPVLAELEMLSVVGRGAGGTVYRARHRRTGAALAVKEMRDDGAALREAGAHLRVAAAAPDHPSVVRLHGVCVGHPVAGNRFVYLVLEYLPEGSLSDVLVRGALPEPAIAGVTRCVLRGLSHLHRLGVAHGDVKPSNLLVGHRGEIKIADFGASRVVTGRDEAHHQSPGTWAYMSPEKLHPEGFGGGGGADFSGDVWSLGVVLLECHAGRFPLVAAGERPDWPALVLAVCFAAAPEVPVAASPEFGGFVRRCLEKDWRRRATVEELLGHPFVAGKPSRCERQNEWRTTFQDKTGQVNTSIYGEE

SEQ ID NO: 178418 - protein, 59 aa, Oryza sativa
  Clone ID: PAT_MRT4530_75976C.1.pep
SAGNKSEARFFIANFLLHQLPILLLFFFLFHSSPFKPLRHRKEASVQIPNMYNQLYINL

SEQ ID NO: 178419 - protein, 198 aa, Oryza sativa
  Clone ID: PAT_MRT4530_75977C.1.pep
RANKRTVQAFCARGEEKSGINNGKWGHGLRHPHEGRPELFERSGPSGGPGFCFPDSGKFRGLGVVSFESNKVAMKSLELDGFQIGNRFMKVERCRLAAGSKRKRTVEFQTDPKKADGCLSAYVGNLKWDVTETDLRDFFKSLKISSIRFAINKRTGDSRGFCHVDFEDDESLEKAVGMNQSELRGRPIKISYAVSNRG

SEQ ID NO: 178420 - protein, 93 aa, Oryza sativa
  unsure (1)..(93): unsure at all Xaa locations
  Clone ID: PAT_MRT4530_75978C.1.pep
LKKKTCILSSFSPTCYGLCLKWSNRSGLXKKKKKKKKKKKKKKKKKKKKKKKKKKKKKKKXKNKKKKXXGGGVLKNQIFGPRLCKFIFFLKWP

SEQ ID NO: 178421 - protein, 84 aa, Oryza sativa
  Clone ID: PAT_MRT4530_75979C.1.pep
MPRERPKHRVAVTQSDCAVFGPGQIANWAGREAGEWRRRPPTVSATNHKSAPTMPLLARLRLLLLHHRGRLLLHLLQGPPPPPV

SEQ ID NO: 178422 - protein, 63 aa, Oryza sativa
  Clone ID: PAT_MRT4530_7597C.1.pep
MCHSSRNRSSSLRGCSGEPQASRSHSTSIRDAEVDPKSACDLHWCSTSLFASMFAIVEDSRTA

SEQ ID NO: 178423 - protein, 43 aa, Oryza sativa
  Clone ID: PAT_MRT4530_75980C.1.pep
TLKQSLLPSYSSKFRKIFVQCTKFRFYHQIIQHAKNGHSVEQT

SEQ ID NO: 178424 - protein, 378 aa, Oryza sativa
  Clone ID: PAT_MRT4530_75981C.1.pep
MEPAGCSTDEVTGDRSTLLHIAAWKGHSDLIAQLCRWGNGSLITSVNSSGYTPLHCAAGAGHAGAVEAIIRALAAGANVEEGRLQEILRGRNEAGDTPLHLAARHGHGEAAEALVRVDPGLAAELNGAGVSSLYLAVMSGSVRAVRAILWCRNASAVGPKSQNALHAAVLQSSGDYFVDNLAFYICTGQRQEEHTGLPERRGREYPQPLEEPPALGLLPSPTLPLVVIVGDHSQRCHGAAIPIDLLSPHRNTATSLFVHIANLGQCQRLGMKRMPLPTASSVATMPRASNECRCHLSTSEVGAIGFDEATATVASSTIGTVSSTAMGERREITVAVVSSGLEPPLCRRANPAAGVASAAISLTAACLPSPLVHPAVEE

SEQ ID NO: 178425 - protein, 345 aa, Oryza sativa
  Clone ID: PAT_MRT4530_75982C.1.pep
MPPAMVLVPPPFTFPAAAARTRYLDDPNTFMDLHLSTPKPMVQLRSCAYYPKYRIGAFGTFPLLKANRDCSEGDYGIMGLRYGSENLSIGASFLPFALSGQVPYGAWLVGRKGNISAGIQYKPLCESMHPVPLTDLKNWNCAISYGMGSTSPLSPSFNFSLELVRNTQLVASFYQHFVVQRRVMNPREEEHIIGTTNFVDFGLELATSLDKDKAKENASNPSFQVAASWQASKNFLVKGKLGPSKSSMALAMKSWWRPFFTFSFTAMYDHLKGTGSYGFGISIEDLKEPSYQMAYSNYVIVTQNKEDVEPRFLKKLGKKYIFQPDIDSGNYDNLPTGLKPIDKIL

SEQ ID NO: 178426 - protein, 82 aa, Oryza sativa
  Clone ID: PAT_MRT4530_75983C.1.pep
APSSSWRERSSEESARSRQGHLRWHCASGGARRSWRAHSSWRWGRPHTPRTRLVPPCGARRAGLLMGTKGRARRDPHAPGQD

SEQ ID NO: 178427 - protein, 449 aa, Oryza sativa
  unsure (1)..(449): unsure at all Xaa locations
  Clone ID: PAT_MRT4530_75984C.1.pep
MKITVHSSNAVKPAYGPGEFPTTTGDVVPLKVFDKANFDTYISVIYAYRPPAPANAALEAGLAKALIEYREWAGRLXVDGDGNRAILLNDGGARFVEATADVTLDSVMPLKPTAEVLSLHPSGXRLTAGGSSDGVSPRVNSRFQRGRLTSVRGACTNSKHNHGQDXPRTTKQLLACAWEPGHHAAPHSSLCTVHDRVSFFAPRDTPKPYDAAADVHASGGGGDDDEVVINKVHLSREFISKLKSQASAGAHRPYSTLQCVVAHLWRCMTKARGLDGRESTSVCIAVDGRARMSPPVPDGYTGNVVLWARPTATAGELVTRPLKHAVELINREVIRINDGYFKSFIDFANSGAVEEERLVASADAAEMVLSPNIEVDSWLRIPFYDLDFGGGRPFFFMPSYLPVEGLLILLPSFFGDGSVDAYVPLFSRDMDVFKNCCYSFDKDQTTSLA

SEQ ID NO: 178428 - protein, 38 aa, Oryza sativa
  Clone ID: PAT_MRT4530_75985C.1.pep
RFFKRLHIRVWHRHVRPKRGVLFLLQARAKGVCRIGRA

SEQ ID NO: 178429 - protein, 446 aa, Oryza sativa
  Clone ID: PAT_MRT4530_75986C.1.pep
MKITVHSSKAVKPAYGPGEFPTTTGDVVPLKVFDKANFDTYISVIYAYRPPAPANAALEAGLAKALIEYREWAGRLGVDGDGNRAILLNDGGARFVEATADVTLDSVMPLKPTAEVLSLHPSGDDAVELMLIQVTRFACGSLVVGFTTQHIVADGRATNNFFLAWSQATRGAAFHPVPVHDRVSFFAPRDTPKVEFEHRGVEFKPYDDDEDVHASGGGGDDDEVVINKVHLSREFISKLKSQASAGAHRPYSTLQCVVAHLWRCMTKARGLDGRESTSVCIAVDGRARMSPPVPDGYTGNVVLWARPTATAGELVTRPLKHAVELINREVIRINDGYFKSFIDFANSGAVEEERLVASADAAEMVLSPNIEVDSWLRIPFYDLDFGGGRPFFFMPSYLPVEGLLILLPSFFGDGSVDAYVPLFSRDMDVFKNCCYSFDKDQTTSLA

SEQ ID NO: 178430 - protein, 90 aa, Oryza sativa
  Clone ID: PAT_MRT4530_75987C.1.pep
KITKICRPLQLTKIRNILFFMIEPLVARYSYSHVILFSSLFFLYVVYEIWFFWGYSRWFSLSSISTAKLDMRVSSHPAPRESNEKVCKFL

SEQ ID NO: 178431 - protein, 38 aa, Oryza sativa
  Clone ID: PAT_MRT4530_75988C.1.pep
MSIFRLFREPKSEGMKKMVTVIAVRWNQIGSPGLWPRA

SEQ ID NO: 178432 - protein, 157 aa, Oryza sativa
  Clone ID: PAT_MRT4530_75989C.1.pep
MDKLVQFGRKAWFVVRVLSGYEERRIRAHRLQMQQRIARAQAKKEELRKQPEQIILSEVRQMVQQMQALNQQLEEAETAIDEYFKPIDKNAKIIMDMQLEKEEKQIKEMTKVMQDQIAMQREIASKRAQATAIESKDAQTQTSDKIAEGPPKEETMK

SEQ ID NO: 178433 - protein, 116 aa, Oryza sativa
  Clone ID: PAT_MRT4530_7598C.1.pep
PDRRPSSPDAGSPLRRFSLQRFCSVACRVCHGRFVGAGRRDQRFLFLFGVQTPELQQRAGGRHVAVMPCGCGRLHKKDEDIAGCFHSLSGMFFFKVNEENIMDTFMATVRSRPYKK

SEQ ID NO: 178434 - protein, 202 aa, Oryza sativa
  Clone ID: PAT_MRT4530_75990C.1.pep
MATKTESGSPKICELRCYPTSNPTASHFHEWSSPKGIHITEQRTGEEEVALPRTPRVSIGGGLWACGRPGLLLFAAAIELASRCGHAGVAQRLHFVAVRRRMTWGTRMPGITGCCRLNTADSRANQVTQCHRECHGGMSPNPNPVMDLFHGANIIDAVVQYYGTNDIDIIPLISPCTLSHLYERDGDKFVDTEGLFVQRFLK

SEQ ID NO: 178435 - protein, 971 aa, Oryza sativa
  unsure (1)..(971): unsure at all Xaa locations
  Clone ID: PAT_MRT4530_75991C.1.pep
IAPRKPDPASVTGPNPGKIDDDTTAYLGTSLVDEDELAKLVDSGVLTEKQVSALGKAVVPKPADNRTMVFAVFFEAGLRFPCNVLLPEILRLFEPSAELFGAIFYATVNLKTKKTAFGSVNFNVRPERSDLWPVNASMSKWDRHWMSKWFYHSIPFEARSDATKALRXRRKAIAPIRKPKVAGIMEARFSLLRKVCLRLSCRDLVEEFCVLQIFLLSQSLQIEVDRDEEADGLSKLVMPKGGAMLTLVQAEAEARKVIGDVSITEYSQLLTRQAAGRANHMCDGDLPSRAAPRKRKAPASTDSDANDEDTVDDXDSEEEGEDEVETDVAIEMAANELADNRIEMRGYTPTPSPDHVETGVESNSSPLGRKDLEGAKPLVSIAAAKVAKGGKVKKTSKKKGLVDVACVFSDDESSDETPTSPARRSHGLSTALGATADVGEARGSAAAGTSASADRVVNAAARLFGSPPRDPVASLPAIQKGKKAAIETSASEYSLAAPRFAPGDLETQAGLIPFVEGVSHLVSPAGXPSLFTELNEFDEGCTAIKSLAIRILVAHCSTERTVRARFDGFKNHLRAKDDELGRKSLQMESLANTLKEAKAENRRLQAELEKGSEAKAEIERLKAELKKEQDQSAALTEEYNLTEPKMEALRLEARKAKATAEKDAQRFTREMAKATESVKTTCHTLCLALTEMGEKVRVIPGEGASAFDFSEWTQQAGGAVSDSATAYANCCACVSVAFTMGLLQQNECEHIAEFPKLTKGDWEVSSQDVSPALRAWRKQFWQKEGRSTVKARLLEHLAKVEAAEQGKEPATEEGGADTGAGADVDQYHLEGFRRSXCDRPLFWDRWNKNEKFVAVKGLPKIKYSCREMIINGNSYKVLKVAGWMRAHPGRTLDDYDRIHVEHREDMARFWRNHRRTDRQEAIAQRRYGLVCVSPPSPLRVVYNISSDDEPSSPNHTLGSGGCFGGEDVIFF

SEQ ID NO: 178436 - protein, 98 aa, Oryza sativa
  Clone ID: PAT_MRT4530_75992C.1.pep
RVSVCFGHVGFSAFIVRFCQKWSDPFFCLEGPDQGTVPAHPRHPPVSTRGQLNIIRSLLAAMAEINLFRETNHRAGGASRSVTCFQSSSNKVACLLLS

SEQ ID NO: 178437 - protein, 60 aa, Oryza sativa
  Clone ID: PAT_MRT4530_75993C.1.pep
QEFLNGEAGCPTCHEGSSTDGHWWARWPVHFPAYGEIYMYVGNRKASTGAIVADNAECIY

SEQ ID NO: 178438 - protein, 245 aa, Oryza sativa
  Clone ID: PAT_MRT4530_75994C.1.pep
IVRKLVEMMCSVFVASWTGVIKYHGPRPSTRPHQVFVANHTSMIDFIILEQMTAFAVIMQKHPGWVGFIQKTILESVGCIWFNRNDLKDREVVAKKLRDHVQHPDSNPLLIFPEGTCVNNQYTVMFKKGAFELGCAVCPIAIKYNKIFVDAFWNSKKQSFTMHLVRLMTSWAVVCDVWYLEPQYLRDGETAIEFAERVRDMIAARAGLKKVPWDGYLKHNRPSPKHTEEKQRIFADSVLRRLEES

SEQ ID NO: 178439 - protein, 96 aa, Oryza sativa
  Clone ID: PAT_MRT4530_75995C.1.pep
MQRLRRCAVRGMWQASEQLNRASPTGAVPATRPPGPVGGGHVTWPQLKYVRVEHLTPTRLLLPPLGRAAHNAPWWARTLRLRPPGPVALGPSRMPA

SEQ ID NO: 178440 - protein, 37 aa, Oryza sativa
  Clone ID: PAT_MRT4530_75996C.1.pep
LTGLPSASLHANKNFECLILPLKLRGHSSKHETAYIK

SEQ ID NO: 178441 - protein, 532 aa, Oryza sativa
  Clone ID: PAT_MRT4530_75997C.1.pep
MLKIKSLGLAVLERLRLRQRSRLTWLKQAELEDFSESDLKEAINDLPSEKAPGPDGFIGAFYIRAWDIIKLDLMDAVNSFTQLHSLRLEDLNSAHICLIPTKADASKVEDYRPISLMHSIAKIVAKMLANRLAPKLGEMISQNQSAFIRKRTLHDNFLFIHNMIKFYHRNKKATLFIKVDISKAFDAVNWSYLLEVLEGFGFGIKWRNWISNLLGTSSSMALLNGIPGLPINHARGLRQGYPLSPMLFVILAMEPLHKLIEKAEEAALLTKLQRQRRFRCSLYADDVALFVTPKQEERLTLRKILSVFAEISGLHTNMDKTEIFPISCNNLDLDACLSIFPGRISTFPCKYLGIPLHTKRLRKVDLQPLMDKVGSRIPGWKGRFFTSAGREILVKTTLSSIPIHHLTVLHQNKWLYKRIDRLRRAFLWKGEGPENVSSGSSLVNWQNVCKPKILGGLGILNLDKFFRALLLRWLWFGWKDENRPWQEMELPCNDLDRQLFKAGTEIILGDGRKCSFWNDNWLSGQSPKDIAP

SEQ ID NO: 178442 - protein, 99 aa, Oryza sativa
  Clone ID: PAT_MRT4530_75998C.1.pep
MTTNTTENLQSPPPVDRGGERQDADLRVITLEVESSDTIDNVKAKIQDKEGIPPDQQRLIFAGKQLEDGCTLADYNIQKESTLHLVLRLRGGGRGGYPP

SEQ ID NO: 178443 - protein, 116 aa, Oryza sativa
  Clone ID: PAT_MRT4530_75999C.1.pep
GVSPHPFKKRVEGLFPPPAGDCFFLPPFFSAQPKKIWEKKGLFWFFRSPPSFFVNPGGGLWGSKFGFWAGFLELREISPGWGAESGKKNVFVIKISAEDFPAAPLGFPKIGASSPF

SEQ ID NO: 178444 - protein, 67 aa, Oryza sativa
  Clone ID: PAT_MRT4530_7599C.1.pep
MAVTGVGVLGDGGGWRWWQCASRTMNRISGGGDTLLLWSRWVVEVAGLLPDLLRHGGGGGGGPNGGG

SEQ ID NO: 178445 - protein, 285 aa, Oryza sativa
  Clone ID: PAT_MRT4530_759C.1.pep
MELGGGGHESVERRRRHQHHFVLVHGLCHGAWCWYKAAAALRRAGHRATALDMAASGAHPARVDEVRTFEDYSRPLLDALAALPPAGGDGDDEERVVLVGHSQGGFSVALAAERFPERVAAVVFLTAAMPPVGRPMSATTVEHVNYVGVEFFLDSMELEQQNADIPGNPVIFGPNFMAQILYHLSPQEDLTLGLSLIRPTNKFTGDALMRDPGLLTKERYGSTRRVFVVVEDDRGIPVEFQRRMIAENPGVEVVDFAGADHMAMISSPAKLAELLVRIADKAHEP

SEQ ID NO: 178446 - protein, 141 aa, Oryza sativa
  Clone ID: PAT_MRT4530_75C.1.pep
MVVGGGGSVAPSGAKLTCLTIDHRWRAREPLQTVLDAICGGMSLELSPPPSSMPSAQEGSRAAAAVLDLRRECSGAAAFVAVVLFAVAPDGRKDGEMELTCGMGMETARERRRKKGQEWHDSNFRNFQWRVANMTNSSDIF

SEQ ID NO: 178447 - protein, 65 aa, Oryza sativa
  Clone ID: PAT_MRT4530_76000C.1.pep
NLFGHCPSSLIFQSSGLVFCSSHIVHPLNPLFKFVCIKYRFALTISPHPFFKRPWLNPFFLPCTI

SEQ ID NO: 178448 - protein, 107 aa, Oryza sativa
  Clone ID: PAT_MRT4530_76001C.1.pep
DRVGNSTTSKGLCRSICQVEVEIDSQKQDREHVSTLSIEATLYDNYGPADVLTSDMSAASVANLKLKPASRPKHCYGFHGYVLGGKVENPKLWSSEHVRDLIQGKYH

SEQ ID NO: 178449 - protein, 379 aa, Oryza sativa
  Clone ID: PAT_MRT4530_76002C.1.pep
MKSRRTVREGFKVPRAEEQFVKVPRTTTRGRGTRKEFFRKATSYGECIVLDHKRKLKDFDGSLLDLSEAEYAIGPLHSKCLVKYFDKVDRKKANAYSLLKNIRHHNIVFLKNFFDGSGQPRFVFNWVDGSMSAWVKTEGAKVLLKRTGTGTCRNSTIRQLVRYGLECLFEHGIYPIQITAKDIYVKKVGKNALAQLLIEEAEALPKSDARKRQIQANLWHEMRDAVKKIFADHVDSPKDMPLVRFLDYIAEGNVKTLQRYPLDWDETEKGKYLLKVLCMNPHKVEQEVNNLIQWPPVTYLGNLPSPLQEMISYDQTRSHPSGYDDKKPYHYLKLCKNIIKHWWLLPESVKVECKTWQRLIQKMETWDPKIWCKLYETFG

SEQ ID NO: 178450 - protein, 86 aa, Oryza sativa
  Clone ID: PAT_MRT4530_76003C.1.pep
QLAACLHGYFCRYIDSAANTVFLGSLRWSSVDILTLYALFSVQDRFRKFSWFCTSICMCVCAFAMVFQLINYSLLFTVFTHFSIPN

SEQ ID NO: 178451 - protein, 639 aa, Oryza sativa
  unsure (1)..(639): unsure at all Xaa locations
  Clone ID: PAT_MRT4530_76004C.1.pep
SKRLSNLHSLLSNCNEILLLLDKLVEQRPLALXEWNFRLILKEHILSLFKYKNEFWKKVCTIRWXKFGDENTKFFQASTPDSHRRNKISHLKLEDXKTERGVSSHEEKAHALYTTYKNRMGIDGHSDMVLTLANLFQPVDILHFQSSMPSKEEMDNIIKNMPTDRGPGPHGFNGMFLTKCWPIICNDFYEIASQFFTKIMANRIQSIIHELIHENRFIRNRTIQDCLVWSFEYVHQCHLSKNELAILKVDFXKAFDLVEHEAILQILQANGFDQAWIAXTKNVLSSATTFVLLNGVLGKDFKCKRGVRQGDPLSPLXFVLAADLLQSIINRPYEMGLLSFPIPQDRGKFPIIQYVDDTLLIMKADXRELFCHRTLMNTYTLCTGLKINYHKSCMIPISTNVENXQVLVGTFGCMVGTMPFTYLGLPMGTTEPKIINFXPLIEXVERRLLSITTFLNHGQRLTMVNFVLSSLPTYYMSALKLPKKVTQHINCARGGGGGAWSHQSVIAWDLVCKPNKXGGLGVINLXIPKHSLLLKHLXFFNKKDLPLVHLIWNKYYXHSDLPPHAXQRKKGSFRWRDIFKLIPLFRAFTKVTIGIGDSTMLWKDNWNDNLLELEYPIVFSNTRLEDISVQAFLSLTEFE

SEQ ID NO: 178452 - protein, 151 aa, Oryza sativa
  Clone ID: PAT_MRT4530_76005C.1.pep
MTTGLLAQVPAETEKEKCESSRMRRRRLRRSGTGYGASCARAGRGQGGAEVATSILTHDSVGVRGGGDDVAKAALVMKLGETCYGITTGEDATERVALVQVRCSHVDKQSSVPVPPATLFLAACFLGDRGTRGVAGDLGRKVVHQGIPLGL

SEQ ID NO: 178453 - protein, 66 aa, Oryza sativa
  Clone ID: PAT_MRT4530_76006C.1.pep
ETCLILSPFQVIKCFDFGQSQTASNLTKFVEKIIAFSTQEKLIMTIYSIIDFIKLIRYYKYYYIYL

SEQ ID NO: 178454 - protein, 334 aa, Oryza sativa
  Clone ID: PAT_MRT4530_76007C.1.pep
MAAQGVTSVLAVVLVIGAFVSIPTVQSIGVCYGVKGNNLPPRSEVVQLYKSKGINGMRIYYPDKEALNALRNSGIALILDVGGFDTVSYLAASSSNAAAWVRDNVRPYYPAVNIRYIAGGNKGQGGATNSILPAIRNVNSALASSGLGAIKASTAVKFDVISNSYPPSAGVFRDAYMKDIARYLASTGAPLLANVYPYFAYRGNPRDISLNYATFRPGTTVRDPNNGLTYTNLFDAMVDAVYAALEKAGAGNVKVVVSESGWPSAGGFGASVDNARAYNQGLIDHVGRGTPKRPGPLEAYIFAMFNENQKNGDPTEKNFGLSYPNKSPVYPIRF

SEQ ID NO: 178455 - protein, 109 aa, Oryza sativa
  Clone ID: PAT_MRT4530_76008C.1.pep
VMVHVGEVLDHRALEALSGDDLLAVRQRERRLVRRRPLLGRANAGAAEQLLLLLPLLLRHPAAGTHLAELALVALAGSEEWTVGDSSGCGAGAPLPLIPPFLCRKRVDR

SEQ ID NO: 178456 - protein, 124 aa, Oryza sativa
  Clone ID: PAT_MRT4530_76009C.1.pep
SITRLERAAATAISAAAVKAKLLADHEEEQVRQLAALMIDKLYRKVEAKVSFLTEVEHLVQRTREYTEKTRKKLLMERNAIIAARMGSLPSRPNQPGAAGNRLPAGYGGPIVRPPPNAMPRPSS

SEQ ID NO: 178457 - protein, 118 aa, Oryza sativa
  Clone ID: PAT_MRT4530_7600C.1.pep
ITKGINYSSARHMSHDVLEHPIFFFGKTTDQMNVAIGRRRREKNFTGNYKASKIRHRSIHHTYLSTSTSPRTSGARAWISSSSCDAGGNLSSASCNSFLNLHMFILMFCLDRYAVLSA

SEQ ID NO: 178458 - protein, 704 aa, Oryza sativa
  Clone ID: PAT_MRT4530_76010C.1.pep
MAILISFNPILWLHLLPHQISHSYLSPLSDLPSSCILEDVQHRAWAGLRIRLQYLQDCNRCVVHGPCVESDVYSFGVVLLEIAPRAGDRPLVSVPRRDTSALTSRKLWKLCVRSTGSCRGESASAIFVNPYATVNVKTHIPITLEFKHPNFNKWKAFFTAMCGKFGLLPHIDGTAPPRPDESAWAQADCCVRGWLFGSVSDAILDVAMEPDQTARDLWVAIDELFQANKEPRAIYLSHEFHSHTQGNLSIADYCQKVKTAADALRDVGHPVTESQLVLNLLSGLNPHFSSTADNIAGAPVLPSFASARNTLLLKELRIANDTKVQNETAMVAAASPANNSTSGTCAASSSQPRGGSGGGGGSNNGGRRNQRRNSGRNNGGGGNGGRQNYGGGGYGNSGGGGGYGNSGGGYPPHQARPRPGGPWVCFNPWPVQQQAPWRPTGTGAGLLGPYPQAHTAFTGPYVSPPTLGWPPVQSVQPTWDQQGLVAALNQLSVNSPNPWVLDTGATSHMSSTDGTTKFALKNILVAPSLGSPTAVAPSSLDVEHPCPLPAPILKSPATDDLADPDLYQLVRHRRPMPSSCALDPVVSVEHVSSGADAGLSELNKHKISSDTLCALADPNWRAAMVDEYKALVDNNTWRLVPRPPASRSWPIHQLDVKNAFLHGNLEETMYCQQPSGFVDPSTPNATLLSLFIKMEKILHIVAIR

SEQ ID NO: 178459 - protein, 334 aa, Oryza sativa
  Clone ID: PAT_MRT4530_76011C.1.pep
MARRQGVASMLTIALIIGAFASAPTTVQSIGVCYGVLGNNLPSRSEVVQLYKSKGINGMRIYYPDKEALNALRNSGIALILDVGDQLSNLAASSSNAAAWVRDNVRPYYPAVNIKYIAVGNEVEGGATSSILPAIRNVNSALASSGLGAIKASTAVKFDVISNSYPPSAGVFRDAYMKDIARYLASTGAPLLANVYPYFAYRGNPRDISLNYATFRPGTTVRDPNNGLTYTNLFDAMMDAVYAALEKAGAGNVRVVVSESGWPSAGGFGASVDNARAYNQGLIDHVGRGTPKRPGALEAYIFAMFNENQKNGDPTERNFGLFYPNKSPVYPIRF

SEQ ID NO: 178460 - protein, 960 aa, Oryza sativa
  Clone ID: PAT_MRT4530_76012C.1.pep
MVGATVSASAGVMNSLLGKLSTLLDKEYTKHKNVEKDVMFLQRELPSMEAVLQKHAMQDELDVQLKAWVSELRELAYDIEDSIDAFMVRIEHYSDESAGIKGFMNELVGIKGPRDCIIKLLTYEADSGPSRQQLKVVSIVGCGGLGKTTLANQVYKEINGQFDCKAFVSMSQKPDMRKILMDLLSQILGNGSPMCFDEQRLIDKLREFLKDKRYLIVIDDIWSTSAWEIVKSAFPDNNLRSRIITTTRIMDVAKSCSANLQEYVYTIKPLNHQDSSKLFVKKIFPSGCGVPQHLKEVSNAILKKCGGLPLAILIIAGLLASKYDRKDEWEAVHNSIGSELGKNHTLEGFRRILMLSFYDLPHDLKTCFLYLSIFPEDDLIVRKQLVWKWVAEGFIRKVRGKRPDQVAESYFYDLINRNMIQAVGVQYKGNIYGCRVHDLVLDLIRSLSAQINFVIAIDDKGYESSPRKIRRLSLQASNLEDQEMQKLVSNQSHIRSLIMFRAFKKAPDLFKFHALRILDLSECNCLEDHHITCIVNMFQLRYLSLPCRITELPEQTGNLQHLEVLNIRRCMIKTLPEPIVKLGKLMCLHVKSGVKLPDEIGRMQALQELESISIPCNSVRLIEEIGRLTRLRRLTVETTSTTEKMGDQEVRFREMLVSSLTELGRNGLESLCISYPHGQNFILDSLFGSGCSLPKFHELDIKNYLCWVPRWITMLSSLVHLCLSMYDIDEEDMRVLNGISTLLFLHLELRNPPEERLVIGCDGLRHLNELHVFCQHSTMPLTFAPGAMPELHRLRLEFGARETLRMYGDFDFGIEHLSGLRDIRVDINYYSGGTDMDAEAVAAKDAITTASIIHPNRPLHDVRMHVTMMFTLKEAAQSKTLIIQKFCENYSSYYHLSLRHGTSSLGLEETTYVSSGNLAIKIRCEYGKLIEIRIKIQEIRNVNVRKCDILVQLGYGMCDP

SEQ ID NO: 178461 - protein, 68 aa, Oryza sativa
  unsure (1)..(68): unsure at all Xaa locations
  Clone ID: PAT_MRT4530_76013C.1.pep
HGMNRTFEVAQNVRTXTFLYMTENMGSFEGILLKPSMVTPXAQCKDRATPEQVSDYILKLLHRRIPRA

SEQ ID NO: 178462 - protein, 250 aa, Oryza sativa
  unsure (1)..(250): unsure at all Xaa locations
  Clone ID: PAT_MRT4530_76014C.1.pep
MAWKDSYLDLVLIPAGIVFPIVYHVWLWHVVRRRPLSSTVGINTATRRLWVLGMMKDNEKKAVLVVQSMRNVIMGSTLMATTAILFCTGVAAILSSTYTVKKPLSDAVFGAHGEYMMALKYVTLLLAFLLSFLSHTTAICTLNQATFLLNTLSSSSSFAADIAGLPVTKDYVADVLERGFLLNLVGNRLFYAGVPLLLWIFGPVLXCLCSVVMIPILHSIDVVYVDGSSKGEANARVEMVYESDESVMQV

SEQ ID NO: 178463 - protein, 75 aa, Oryza sativa
  unsure (1)..(75): unsure at all Xaa locations
  Clone ID: PAT_MRT4530_76015C.1.pep
WSVVLIIYCGLAATVSIGDQRIQQVMYTLGERYETGMRYPMYLLALCLSVVKRLRAGHRTLCGTXDDQLRQDSCE

SEQ ID NO: 178464 - protein, 63 aa, Oryza sativa
  Clone ID: PAT_MRT4530_76016C.1.pep
PQLPYLGDLCNYDLSQNTCHIALKLNRSERRTGRIPGDPRAKEATNWHRPSNVDTIDPWVLSF

SEQ ID NO: 178465 - protein, 263 aa, Oryza sativa
  Clone ID: PAT_MRT4530_76017C.1.pep
MGAPSVEARRGAAKRWEARRRRGRRGDGGAGGGGAAGRGEDGGAGGGGESVCGEEAMGATAVEARRRCAAKRRWGRRRWRRGEEVGGAAAKRTARRGAAKMGAPAVEARRQVKSEIDQSRDGGGDTSTLAIGHGRVGDELLQTVMSCCNPILSYSNDGPQNPEALTIQTIFVANEIEALYELFKRIDGAIIEDGKINKVFDLFDMKHEQALGFEELAVALSIFHPDAPIHDKINFSFQMYDIKNQGFIEREALKQMMVATLAE

SEQ ID NO: 178466 - protein, 126 aa, Oryza sativa
  Clone ID: PAT_MRT4530_76018C.1.pep
MAAKQLELDAGGGGGVPSCANCCGGVVATTTARSKNLCARCYRDHLNAVDGTAEAARTRALLASLACDLNVGTFGDAHGGASGFGFKNADRDSARGGHHQVVEVGDDGEGAAVTRLRRRRMVRTCE

SEQ ID NO: 178467 - protein, 426 aa, Oryza sativa
  Clone ID: PAT_MRT4530_76019C.1.pep
MAAGFGILVLSLSVVLLIRKQRSDILKQQRKKYFRKNQGLLLQQLISSDERASDNTKIFSLEELKQATNNFDPTRVLGSGGHGMVYKGILSDQRVVAIKKPNIIREEEITQFINEVAILSQINHRHIVKLFGCCLETEVPLLVYDFVPNGSLNQIIHGATNFGASRLIPNDQTHVFTNIQGTFGYLDPEYYHTGHLNEKSDVYSFGVVLLELLLRRQPIFECESGTKKNLSIYFLYEIKGRPITEIVAPEVLEEATEDEINTVASIAQACLRLRGEERPTMKQVEMSLQSVRNKGFSSAGTSPESNHGMQPALSETYVNLHQPLGVHTIGIINLASSNCNSLQQEFMLSASFASPYTLCAGPGLLAHRAGPAQRAGGEAQAWPGGQAGLTQARPKSGRAVLAPGQNAVPWAGPWGLGPYGHLYSIH

SEQ ID NO: 178468 - protein, 272 aa, Oryza sativa
  Clone ID: PAT_MRT4530_7601C.1.pep
MDLILMALSVSLFSLLYRERERERLPKLRTCTRFNACVSEKSTALAMQNLLGMWNSSGRSFSGSSYSNSSTDTYGSGGRQQQQQQQQYEAAAAGDKTSAKRQPPPPSRLKKTSGRNDDAATAAVVGYAASGGGYGGSTKANAGANYGGGGGYGYNGGYNAGSVTLYGAGVGTPYYGGGGGGGYTGGGSVPYGGGGGVPAGYWTPQNGARSPLYINTREVHVYGGPHGPYDGGDGYGGGGGSGERRRSGGFFRPAFEAVGHFFDRRFGFHSSD

SEQ ID NO: 178469 - protein, 212 aa, Oryza sativa
  Clone ID: PAT_MRT4530_76020C.1.pep
EGRQHQITSHAIAIAEGRERRGIESNPVEEEEGPSGRSDREEEGSELNDSTQGSRDLARVEPYRSLCLPTDGSLMESAHGGSDRPGSMDSQEPRVDAEQKPVLSDNPEEQTIPSKDEKVLEPTISHDSNGINLPSEGQAQAGTSNIGGGHNAAYPQTMYSSQAQPFYYQGPGYDNPSNEWDGYPPYVSVEGLEAGPAVVYNDDPQLMYHGGY

SEQ ID NO: 178470 - protein, 77 aa, Oryza sativa
  Clone ID: PAT_MRT4530_76021C.1.pep
NNDAISLISNNLPILWAEGWSAGSVEAWSSQEQEKAGGGQTETGQRGERGEGGRRQQESQSLRRRRLSAAPAWTRLV

SEQ ID NO: 178471 - protein, 267 aa, Oryza sativa
  Clone ID: PAT_MRT4530_76022C.1.pep
MASSPSTVFLVLSLTLATVSVVVVSGAGEAPSPAPTGPLNLTEILTKAGHYNTFVRLLKDTEVTSQVSSLLNNDRNGDGLTVLAPTDAAFGRLRPGTLNQMDAQAQAELVLYHVLPRYYGFVTFETTTNPVRTQASGQRGVCTVNVTTAGEDRVRVSSGVVEAELGRPLRDGHPLAVYSLDAVLLPPDMFGPGAKKDYGAADAPAAAGKHGKPQTASSSSVAAAPDEAPSKEVDATATRRSRVSLEGPSYAYPAFLYKVSQYDLYSS

SEQ ID NO: 178472 - protein, 71 aa, Oryza sativa
  Clone ID: PAT_MRT4530_76023C.1.pep
MLDGEKVILEQKIAAATARMNELRRTNREMEVKLVIYDAIAGSRKNLDDLSPNFIDDLQKEVAKRREEVNT

SEQ ID NO: 178473 - protein, 67 aa, Oryza sativa
  Clone ID: PAT_MRT4530_76024C.1.pep
AFSHSQLPLPLLLLFGKMINGPSYLTGNCIQACQSPHTNHISLCESTEHQTALITVLAFFKNLIFMF

SEQ ID NO: 178474 - protein, 99 aa, Oryza sativa
  Clone ID: PAT_MRT4530_76025C.1.pep
RIAYFYDGDVGNVYFGPNHPMKPHRLCMTHHLVLSYDLHKKMEIYRPHKAYPTELAQFHSADYVEFLHRITPDTQHLYENELRRYNLGEDCPVFDNLFE

SEQ ID NO: 178475 - protein, 108 aa, Oryza sativa
  unsure (1)..(108): unsure at all Xaa locations
  Clone ID: PAT_MRT4530_76026C.1.pep
LQYRPGSRSARASAHASDRTTRRPASAAGGGGYAAXAVPAGVFXVLVGPEKERFAVRARCANHPLGGALLDQAETEYGFTGCEGPLELPCDFYAFMDIMWEIDHAYPA

SEQ ID NO: 178476 - protein, 361 aa, Oryza sativa
  Clone ID: PAT_MRT4530_76027C.1.pep
MYHPQCELLMPLESLEMDVGQSHLAAAVAAAMPGELNFHLLHSLDAAAAAASSTAASASSQPTVDYFFGGADQQPPPPAAMQYDQLAAPHHHQTVAMLRDYYGGHYPPAAAAAAATEAYFRGGPRTAGSSSLVFGPADDESAFMVGPFESSPTPRSGGGRKRSRATAGFHGGGPANGVEKKEKQRRLRLTEKYNALMLLIPNRTKEDRATVISDAIEYIQELGRTVEELTLLVEKKRRRREMQGDVVDAATSSVVAGMDQAAESSEGEVMAAAAMGAVAPPPRQAPIRSTYIQRRSKETFVDVRIVEDDVNIKLTKRRRDGCLAAASRALDDLRLDLVHLSGGKIGDCHIYMFNTKVTTTN

SEQ ID NO: 178477 - protein, 122 aa, Oryza sativa
  Clone ID: PAT_MRT4530_76028C.1.pep
MSQQIAKRNNDNRANNTFWTIGSMLRFVHRPLSSNSGGLPFFSGASDTPTPAEGWPWAAEDRRWAVDSGGRRGGGGAAEAAGMEEGAGEAGGGPVGRWWRGIAGEDRRRSGGGDSVTGRRRS

SEQ ID NO: 178478 - protein, 192 aa, Oryza sativa
  Clone ID: PAT_MRT4530_76029C.1.pep
MEIQLNTISAKDLARLVAPAQVPAKHFQMPARDVEAAAAGDEELGAASPLPLGGGDGRGHRAAAALPPDAEAAAAGDEELGVAFTPPSLSVACTRGGRGHQPPEREAEADADADERRFRRKISNRESACRSRARKQWHLDELRARAGWLRHCNCELAARGHAARGRAGLVHLTNVQLRAKAATPASPSPACR

SEQ ID NO: 178479 - protein, 138 aa, Oryza sativa
  unsure (1)..(138): unsure at all Xaa locations
  Clone ID: PAT_MRT4530_7602C.1.pep
IYWDGARMLGVLCMSXPYXDGCLTSLVTLHPKVTETELSDDDECLILPSDWLWDVLTNEMAXEVVRAXCFHRNGSVTPDARPSGVHFLDEAXETENGGTAYVKGISKAESLDMACSDAAMLVTKLELALQRPDIVSVL

SEQ ID NO: 178480 - protein, 102 aa, Oryza sativa
  unsure (1)..(102): unsure at all Xaa locations
  Clone ID: PAT_MRT4530_76030C.1.pep
TSGSPGLQVPTALGTALDINLSNASLVFISVTFATMXXESPSLQLLGRGVVISTGVLLTVSKETEFDFWGFIFVXXAAVMSGFRWSMTQILLPKDSYGMLPT

SEQ ID NO: 178481 - protein, 112 aa, Oryza sativa
  Clone ID: PAT_MRT4530_76031C.1.pep
MVGGMWEHRSHTSGMRESCRAHPAAGPSRYRGTASPASETGWFILAPVQPFRGLGNLHRCFTTRRPGTCRTSSSSSAPSPSSSPPTSPTTPLSTFISSPPLFVAIGGQIRLP

SEQ ID NO: 178482 - protein, 87 aa, Oryza sativa
  Clone ID: PAT_MRT4530_76032C.1.pep
MPGPSDGAGGRRSKRAPAVAAATGVVERRHVAASSPWKPIVGPHLLLPAPPHSDSSAPPPPKPAVFPYPRSNAISILPTSRALLLPS

SEQ ID NO: 178483 - protein, 160 aa, Oryza sativa
  unsure (1)..(160): unsure at all Xaa locations
  Clone ID: PAT_MRT4530_76033C.1.pep
MAATTTGRVVALGAVTMEVALTFLAGGSGRRXYDLCLKDCMARENNMVHYCSYTCDKTCQPDKPTLNLSSTWSRLTGDMECQLSCALSSWHRLLTDRKGVLEACLGQCYDCCKTTAAARLPRPLRAGHYVLSSPADDEHHETDHRYGCSSPHDDAHHDPD

SEQ ID NO: 178484 - protein, 376 aa, Oryza sativa
  Clone ID: PAT_MRT4530_76034C.1.pep
MTAMDLGASNTDTAVMKKLQVEGALHGCEHLEREEGGTDPQPVLGRMVVVEDFVQCGFLPPPSEFLLLILNFYNISLLHLNPNSMAFLSIFAHLCEAYVRVVSFLDLFRFYYKLEWMESNRISGCCGFRLRDGMKAIYIPFQCPSSWSQWRSKWFYLEIKDLDHVLIVPEDKPERLSSKMVTQCVGQVLVSAASEADQPPTPVCEFADAEKSAVINQKKTLRSRRNSREVARVDVEEVVDRTGSTFSSSCVLLAVLPRRSAPQTSGASTGIHTAYQQLALQLALEISKFLDIAGTTFLTDNSTIADTAKRRNFLEEPCHWSLRPLWTQIISATSIDLIQFVKKNFQSTYKRHTTLTTENDCTLCVRSVVYRNCFTN

SEQ ID NO: 178485 - protein, 308 aa, Oryza sativa
  unsure (1)..(308): unsure at all Xaa locations
  Clone ID: PAT_MRT4530_76035C.1.pep
GGFPPPPFFFWGGXKKPPFFXRGXKPPGGGXKKNPRGPPPPGAPPPXXXKXPPPPXWGXFXXGGNPPPXKXXXXXGGPXFFWGXXKKXPXKKRGGGGGFXXXXKKKTPPQXFXGXKXPPKGXPGXXKXGPQKKGXXGPRGXKNPRGXXGAPKGGXGEXFPQKXPPQNPPPPGKGAPNFXRGPKFGXPKPXKXFXXPXGEKGPQIFPKTPNFPPXWKGGPFGGPQRGKKPPFPKPKVWGKGPGKGGPKPLNKPLFPPNKGRGRGGGPIGPRLGGGGKGKPKTRIFFFTPPRGGGPTRPVFLRKKKGPPK

SEQ ID NO: 178486 - protein, 316 aa, Oryza sativa
  unsure (1)..(316): unsure at all Xaa locations
  Clone ID: PAT_MRT4530_76036C.1.pep
MSALVRSVASLYCQGLRRTVRLGGGATAGTPAARAPALDQRRPFLSRVDRXRPPPAAAAAARRTREDHRAGMAKKEQPLSSPGXIGRRPRRHGAVLAVQVGDASPNPKRGGDGEGRGGDGGGGGGGGGRGGGEGVGGGGGGGAAAGARGAAAGGGAGGARVQGGRRGGSSRPRHHPQEHDGGGGQRTGDSDEAEGGGDGAGGALPGRGGRECGRGHAAGRGRRGAGVGGARRRSRRVGGRRGRGHRRGRRRGRRHRRRRRGGGGLGRRGRRQGRHLRRRRPRGHLRGSARALRCHRHGGEDGDERGGGGGDGEAGH

SEQ ID NO: 178487 - protein, 67 aa, Oryza sativa
  Clone ID: PAT_MRT4530_76037C.1.pep
VAEIEIVNDFSILIYMPTNLVHHNMRRNKRNKIREQVQLRIESDQSPRELIILKSLCILIWSDRSLS

SEQ ID NO: 178488 - protein, 505 aa, Oryza sativa
  Clone ID: PAT_MRT4530_76038C.1.pep
MEREAWLLCAALAAAMVYYYYYYLACTTRRAQRRLPPGPTPLPVIGNVLSLSGDMHHELARLAREQYGPVMTLKLGLFTAVVVSSPDAAREAFTKHDRRLAARTVPDISRARGLTGRSMIWLPSSDPRWKTLRSAVATHFFSPRSLAAARGVRERKVRDIVNYFAGHAAEVIDVGEAVYGGVINIVSNAFFSADVVDVGKESAHGLRETLEDIILAIAKPNVSDLFPFLRRLDLQGWRRWAEKRYDKVFGILDDKINSRLADADADASTKKHGDFLDSLLELMSAGKIACDDVTTVMFDAFGAGTDTISNTVVWAMAELLRNPSIMAKVRAEMEDVLAGKKTIEENDTEKLPYLRAVIKEAMRLHPVAPILLPHRAAEDGVEIGGYAVPKGSTVIFNVWTIMRDPAAWERPEEFMPERFLQRAEVDFRGKDFEFIPFGAGRRLCPGLPMTERVVPFILASLLHAFEWRLPVGVAAETLDLSEKFTTVNVLVTPLKAIPILASHQI

SEQ ID NO: 178489 - protein, 79 aa, Oryza sativa
  unsure (1)..(79): unsure at all Xaa locations
  Clone ID: PAT_MRT4530_76039C.1.pep
FICVQIYNSSGHKYIIHHTINSSGHKYISPEQSMKDIAHVRTQEHHRCQGQGQGRPASIRVGHXSSTYQARQRRWRLAT

SEQ ID NO: 178490 - protein, 155 aa, Oryza sativa
  Clone ID: PAT_MRT4530_7603C.1.pep
GSRQQDISLNEETPLGTIVFDLNTLSSSTITYQLLESSSLLAFNSSTNQITIAKRIDRDTLCPNDDNCSNCYLHMKFYDMFYYDILQLNFRIIDINDNLPLFSSNSYSISLTENNIPGIKIRLSKAEDIDCSINGVQLYELTYVRHGHVMISSIN

SEQ ID NO: 178491 - protein, 158 aa, Oryza sativa
  Clone ID: PAT_MRT4530_76040C.1.pep
MGLFGGKSASSKQTAKLKSLIKLAAARVAVARRPRLGRRSIARGDVAQLLSIGHLDRALLRAEQVIDEDNMLEVLDIVELYCKILIEQATQLDKPKECGEEIKEAAAGLMFASARCGDLPELLDARAILADKFGRDFAAAAKDGATASSIPRWCGSCP

SEQ ID NO: 178492 - protein, 99 aa, Oryza sativa
  Clone ID: PAT_MRT4530_76041C.1.pep
RAAPDRSGNRFALPSRLQASASTAQLEKRQPMRRTATRPRSQRCSPRAHDLAQLPKHSLYTMYTILLGICRVIFLLLFPVFVAVGSAPRFVPGMGWTWS

SEQ ID NO: 178493 - protein, 568 aa, Oryza sativa
  Clone ID: PAT_MRT4530_76042C.1.pep
MGLFGGKSASSKQTAKLKSLIKLAAARVAVARRPRLGRRSIARGDVAQLLSIGHLDRALLRVCPCHAFALPDTRRDSSANSSRRVLFLQAEQVIDEDNMLEVLDIVELYCKILIEQATQLDKPKECGEEIKEAAAGLMFASARCGDLPELLDARAILADKFGRDFAAAAKDGAHGVVDPTLVRKLSGAPASTEQKQRLTKVIAAENDILLEFPENTGDTDQGKQNEQARNVRAEQFVEQNEVKREHHEVQGRQRFVDEEVNPILARLSVQEQYADARMAAEAAFKSASFAAMAARAAVELSRSESQGKGSRGGGGGGYEKVHPVQNSVAGEKEAPPSWKPHKPPSPSTSPSWSDRSTATSVWSEGTQKGKGVVFDGSDEEVDDVAWTPQLRRPPYRRASTMGIGGGAWNGEAGRVGADPQPFQDGVYNNSQHPRPPHRRHASELGAGAGAPREPLVSLAPQRGQYRDPPYRRDPAAYRDINAGAAQRRQPDGAGARPYESSDHVHPPYARIVSALERSNEHIARHEEVRRIGTGERVLQERVYGAGGAPGRAPLNQEQGRLNSVRTRR

SEQ ID NO: 178494 - protein, 88 aa, Oryza sativa
  unsure (1)..(88): unsure at all Xaa locations
  Clone ID: PAT_MRT4530_76043C.1.pep
DFDFARRKTIHQVSWPMYFMISRIKSCVVXRYFGVAIVPSLSHRASLVQIGGNMLNSEYSFSVGAEYSIDEEHQIKFIITGSIYPPAS

SEQ ID NO: 178495 - protein, 98 aa, Oryza sativa
  unsure (1)..(98): unsure at all Xaa locations
  Clone ID: PAT_MRT4530_76044C.1.pep
PGEGPPPQIVIVPQHYEVVKKAQREPRAFFAFKTPPNAMVSLIAGESSIPRTXPADVLENTYRVSKKEAHRKKHNTFDEYGAFTPIQAKKNKGVQMCR

SEQ ID NO: 178496 - protein, 102 aa, Oryza sativa
  unsure (1)..(102): unsure at all Xaa locations
  Clone ID: PAT_MRT4530_76045C.1.pep
MAEEHESXPYYTXRPXXXFRGRADDADQREEGEIAXHDSGHAPSQANPGAPHPFEHAWTLWVDNXPHGTSQRRQRCGSSIRPIHXXCTXQDLWSPYNNMHHP

SEQ ID NO: 178497 - protein, 128 aa, Oryza sativa
  Clone ID: PAT_MRT4530_76046C.1.pep
PRVRPASVVNSSCLVFLFLQEAYASPGRKKYSMIVVDNWLFVINISPLAPFVHHVVVSVGCVPIGHSPDMPMAMRSLPRVWLFLHLGFVQQCTGCRRTLLCAISTATGVVHLISMVLFVCTAADRDRD

SEQ ID NO: 178498 - protein, 42 aa, Oryza sativa
  Clone ID: PAT_MRT4530_76047C.1.pep
SIAGGGGLNRSSWRGQLPPQELLDDLCSRFVLNVPKEDLESI

SEQ ID NO: 178499 - protein, 87 aa, Oryza sativa
  Clone ID: PAT_MRT4530_76048C.1.pep
PPSRRHARRRRRAMESSKPPPSAFVDNHMMTNPTIKLGADLRRIKHFVAASRIYVRILGVGGGGGQSEGFMGARQSLLDFDAIQESS

SEQ ID NO: 178500 - protein, 271 aa, Oryza sativa
  Clone ID: PAT_MRT4530_76049C.1.pep
MDLPLMAAKAYKYKAELLVKDYLLADSYVPYASVLGGILMCKLSYDFTRFISSFYFKGYGSLTKMQKVEWNNRGMSTVHAIFITLMSAYLVFFSGLFSDQQDGPVTFRSSSLSNFTLGVSVGYFIADLAMILWFYPSLGGMEYLVHHVLSLTAVTYTMLSGEGQLYTYMSLISETTTPGINLRWFLDVAGMKRSKRYVVNGVAMFLTWLVARIILFMYLFYQIFLHYDQIKQMETFGYLLVCVVPAILFVMNMIWFSKILRGLKKTLAKRH

SEQ ID NO: 178501 - protein, 524 aa, Oryza sativa
  Clone ID: PAT_MRT4530_76050C.1.pep
MPYYNNSVPSGGNGRFYITQNHQDAHYASSDDGSQKIGSSPQAFEAPYCTLESSSANGAHPAHSSASSHSISPISGSPLSHHDSHSDHTYNSPPSASCVTEITDLQIKLRELENAILGPELDIAYDSPESALQPNIMATPENWRQLLGINTGDLKQVIIACGKAVAENDVRLTELLISELGQMVSVSGDPLQRLGAYMLEGLVARLSSSGSKIYKSLKCKEPTSSELMSYMHLLYEICPFFKFGYMSANGAIAEAIKGENFVHIIDFQIAQGSQWMTLIQALAARPGGPPFLRITGIDDSNSAYARGGGLDIVGMRLYKVAQSFGLPFEFNAVPAASHEVYLEHLDIRVGEVIVVNFAYQLHHTPDESVSTENHRDRILRMVKSLSPRLVTLVEQESNTNTRPFFPRYLETLDYYTAMFESIDVALPRDDKRRMSAEQHCVARDIVNLIACEGAERVERHEVFGKWKARLTMAGFRPYPLSSVVNSTIKTLLHTYNSFYRLEERDGVLYLGWKNRVLVVSSAWC

SEQ ID NO: 178502 - protein, 107 aa, Oryza sativa
  Clone ID: PAT_MRT4530_76051C.1.pep
MDLPLMAAKAYKYKAELLVKDYLLADSYVPYASVLGGILMCKLSYDFTRFISSFYFKGYGSLTKMQKVEWNNRGMSTVHAIFITLMSAYLVFFSGLFSDPADGPVPF

SEQ ID NO: 178503 - protein, 60 aa, Oryza sativa
  Clone ID: PAT_MRT4530_76052C.1.pep
GASRRHWPRGIEWGKGYACTATTNHLSVNSLSRPAAYSFSLVTMANPGNISLAIKIQIYD

SEQ ID NO: 178504 - protein, 56 aa, Oryza sativa
  Clone ID: PAT_MRT4530_76053C.1.pep
ERVLEYIVLDGIKHLQIHHQVWKQRAVDPPVPLFTNVRGGVGSHGSPVGAHASADV

SEQ ID NO: 178505 - protein, 56 aa, Oryza sativa
  Clone ID: PAT_MRT4530_76054C.1.pep
RDGAERPQGREDWHWRCPRITINQDALQPHVRYAHRCERVLIDAPIEPDRYEGHCG

SEQ ID NO: 178506 - protein, 105 aa, Oryza sativa
  unsure (1)..(105): unsure at all Xaa locations
  Clone ID: PAT_MRT4530_76055C.1.pep
MEIQYELNSDRDPNRSPTGLGEPSHRSYIFVRGVTGGGIASPWEYGEENAXGGEGRAGAIDYFFNIDARYIARVPSPFXHFLPLRSASSGNCTLKQNTTSAAPVR

SEQ ID NO: 178507 - protein, 64 aa, Oryza sativa
  Clone ID: PAT_MRT4530_76056C.1.pep
NYTTHNKNQKNTFPRGVYKQKHTPFKPHAKNSFFLFQALQIKHNPLFFFIKFSETPTNRPQHYK

SEQ ID NO: 178508 - protein, 1783 aa, Oryza sativa
  unsure (1)..(1783): unsure at all Xaa locations
  Clone ID: PAT_MRT4530_76057C.1.pep
MKLVQAQLKAIKAXAGEPGDKGGSFQEGMVEDLGPDGSGLQQQFYNFQDRIDYVVQHALINQLGVLVNTLTNMVKTVVDGTIAEHQATRPVCLPGGVFPNYRPLVTGNQQGSSNPPSTQPMAQAIASAPTAPAVTSSGQRQMINPRLLTWEQPQHSGQNINRLIQEQSLLNTSSRLRTPDNQQRHHVATQVVPEHLVHNVQPDQSVIPQIIPEHLVRNIQPNTQNYHGGHLNYHYXPPSPHVHQGGSPQPQFAPXFNHFELIQQQTHGAPQQRQWADMITDVMREQFGLKPKDTGNLYRHPYPEWFERVPLPARYKVPDFSKFSGGIHEMKLSDLTAIRQRHDESVQDYIQRFRETRNRCYSLALTDSQLADLAFQSLIAPIKEKFSSQEFESLSHLAQKVTLHEQRFAEAKKNFKKINHVYPYMYGSDKEDDTEVAAAEWVRSKKVVPCPWVRSSGKDERFDFDITKAXRFSTCYFGRNRFNFLPVAIEGGKIKFDDSKKPMKRKYDKQQQERYCEEDDGGFNPHWDCEFFRFCWNEGMRLPSIADCPGCNDVAESSSRSYNRSNRPRQTRIPVHQRLGLVNXDRDQEDDEDRKTQWCPYGIFTKNQKRRVQRLRNRECFREVEQEINHRLKKAKPRQEWRVKRQDPTADEAKANEAKRLAKGKSVVTASVNMVFTLPAEFGAKQADVDEVEEASAKLVLSPEQAVFEKPEGTENRHLKPLYINGYVNGKPMSKMMVDGGAAVNLMPYTTFRKLGRSAEDLIKTNMVLKDFGGNPSETKGVLNVELTIGSKTVPTTFFVIDGKGSYSLLLGRDWIHANCCIPSTMHQCLIQWQGDKIEIVPADRSVNNANVDLALWEMDGIDCLSGKGVVEGSSVYTKDTVDDLDDKQGQGFMSADDLKEIDIGPGDRPRPTFISKNLSPRFRTKLIELLKEYRDCFAWEYYEMPGLSRSIVEHRLPIKPGARPYQQPPRRSKANMLEPVKAEVKHLYDAGVIRPCRYAEWVSNIVPVIKKNGKARVCIDFRDLNKATPKDEYPMPIAGQLVDATSGHKILSFMDGNAGYNQIFMAEEDIYKTAFRCPGAIGLFEWVVMTFGLKSAGATYXRAMNYIFHDLIGWLVEVYIDDVVVKSKEIENHIADLRKVFERTRKYGLKMNPTKCAFSVSAGQFLGFLVHERGIEITQRSVNAIKKIQPPEDKTELQELIGKINFVRRYISNLSGRLEPVTPLLILKADQEFTWGAEQQKTLDNIKKYLSSPPVLIPPQKGIPFRLYLSAETRYSPMEKLCLCLYFSCTRLRHYLLSNECTVICKADVVKYMLPAPILKGRVGKWIFALIEFDLRYXSPKAIKGQAIADFIVDHRDDSIGSVEIVPWTLFFDGSVCTHGCGIGLVIISPRGASFEFAYTINPYATNNQVEYEAVLKGLQLLKEVEADAIKIMGDSLXVISQLAGEYECKNDTLIVYNEKCRELMKGFQLVTLKHVFQEQNIKANDLAQGALGYNPMMKDVKIEVATITADDWRYDVYHYLQNPSQSASQKLRCKALKYTLLDDELHYRTIDGVLLKCLSADQAKVAIGEVHEGICGTHQSAHKMKWLLRRAGYFWLTMLEDCFKYYKGCQDCQKFGAIQSRGHSEVGESIXSLVFLKQLQPMKARSLCXDEFVQFADSMGITFLNSSSYYTQANGQAEASNKSLIKLIKRKIFDYPRQWHTRLAKALWSYRMACHGSIQVPPFKLVYEHEAVLPWEVRIGSRRIDLQNELTADEYYNLMADEREDLVQSRLRALAEVTKDK

SEQ ID NO: 178509 - protein, 474 aa, Oryza sativa
  Clone ID: PAT_MRT4530_76058C.1.pep
MDMLKEINIMVEDNKNEDGVRSYKIEDPFEWRNRMREIDSKEKFQQVRALAKFLQDLYAMSHSIGISCGHETSSTQEGFPEALGRDLETPGLCKPGFQEALEITSMHPRRDSSAYTTRPPPPPPTADGGGNGGRISPAVLFIIVILAVIFFISGLLHLLVRLLMKKQHRRGGAENAAPSPHSRHVGRDAAMDRQLQQLFHLHDSGLDQAFIDALPVFAYRDIVGGDKEPFDCAVCLCEFDGEDRLRLLPVCGHAFHLHCIDTWLLSNSTCPLCRGTLYVPGLTIESLMFDFDERLEEGRLSEECEDGFQSSRQKKPMDEEQTVTEKRVFPVRLGKFKNVGNTGVGGVDNGNAAGIVSREPGESSSSSLDTRRCFSMGTYQYVLGASELRVALQPGRNKNGVGSRLKGRATGISSVNAEIMEGKRICAKSKGESFSMSKIWQWSNVKGKLPAVLVVEFLNYSYSFGLISHVYVFH

SEQ ID NO: 178510 - protein, 117 aa, Oryza sativa
  Clone ID: PAT_MRT4530_76059C.1.pep
MKGGGQCGRLSAPLLGRCHRCLLARAEPLTATGSSFLHALTVIGSTYFDAAAASLRAEPPTAAGSSSSLCTRTAVSSSISSAAAASLRVLSRQLLLAHTCFEEMERDRPVGRVNKDK

SEQ ID NO: 178511 - protein, 108 aa, Oryza sativa
  Clone ID: PAT_MRT4530_7605C.1.pep
SIIIVSVVNNGSINQSGSQIYSYSQSNRQAASLRCRNGRRRRKTAGCRSGDPAAYGSLEHLSASLPPYLSFAERFSTYSSPSLCKFPAPSDSFSSNHTHALPQRERDA

SEQ ID NO: 178512 - protein, 143 aa, Oryza sativa
  unsure (1)..(143): unsure at all Xaa locations
  Clone ID: PAT_MRT4530_76060C.1.pep
EKHSWGPRDQREXDQMRSKLARGKHGHSRLRCHVRRPAQTDGAGGLKTLLLEMGSAPDESTLVVRMAATGQVAKRRGPNPRRIQMVISRHWLLGCRMKGTPPKGSLGWGWMPKYPVNGGMGGPGWDPGKPPQKTKLVRWGQGI

SEQ ID NO: 178513 - protein, 476 aa, Oryza sativa
  Clone ID: PAT_MRT4530_76061C.1.pep
MAEKKGVGSLLPGLAVVLVGFVVGGAGSDDRFVYAGFTGAPLALDGTAAITASGLLELTNGTAQLKAHAVHPAALRFHGGGGGGGAVRSFSTSFVFGIIPPYSDLSGHGIVFFVGKNNFTAALPSQYLGLLNSTNNGNTTNHIFGVELDTIVSSEFQDPNDNHVGIDINSLKSVAVNTAGYYDDKTGAFHDLSLISGKAMQVWVDYDGATTQISVFMAPLKMSKPTRPLVSAVYNLSQVLVDPVYVGFSSATGTVRSRHYVLGWSFAMDGPAPAIDIAMLPKLPFYGTKARSKVLDIVLPIATAVFVLGVVVVVVLLVRRRLKYAELREDWEVEFGPHRFTYKDLFRATEGFKAKMLLGIGGFGRVYKGVLPKSNMEVAIKKVSHESRQGIKEFIAEVVSIGRLRHRNLVQLLGYCRRKGELILVYDYMPNGSLDKYLYDDKNKPTLDWTQRFRIIKGVASGLLYIHEDWEQVVIH

SEQ ID NO: 178514 - protein, 109 aa, Oryza sativa
  Clone ID: PAT_MRT4530_76062C.1.pep
MGPDRTEKAGRKFRSLDLELPDPALDEICLSVGRKFRGSGTSGLPPVQKCVARELPKSCGCPGKVCEGFPHPCKETRFFCCPEVPVLRTPEVPDCLSRPEVLVFYTRRF

SEQ ID NO: 178515 - protein, 94 aa, Oryza sativa
  Clone ID: PAT_MRT4530_76063C.1.pep
MTTAAAMMHGSAAMRTHSSRGWSFSPHPSPLILIPSRLSSKPLTPSCLPLTTMPMPSPLPELTWRPPTSPQPAAPSPSPAAAPALLRRPPEEER

SEQ ID NO: 178516 - protein, 94 aa, Oryza sativa
  Clone ID: PAT_MRT4530_76064C.1.pep
MPFLAWADGVGLPEQLRDRTAIERRLGAMQLDVEVKLLGRDGGSAPRPTWISCRLRMDEAQPPDTAPCTVLALQNWFSQLLPAVLNKSEVECQH

SEQ ID NO: 178517 - protein, 605 aa, Oryza sativa
  Clone ID: PAT_MRT4530_76065C.1.pep
MRRPDPATGLRFAAVSLILCTANICAVARRSSYALLLDDEEDGGGGGDGSASFSFFPQTQPRGLVYGFYDESCPDAEGIVSSTVRELYLANPNVAAALVRLFFHDCFIHGCDASVLLDRINGDKSEREAAPNQSLRGFGAVDKIKARLEAACPRTVSCADILVLAARDSLVLAGGPSYPVLTGRSDSARAFYDEVGARIPSPNATYTVTLDAFARRGFTERETVALLGAHSIGKVHCRFFKDRIDNFAGTGEPDDTIDADMVEEMRAVCDGDGAAPMEMGYYRQGREVGFGAHYYAKLLGGRGILRSDQQLTAGSTVRWVRVYAAGERGEEVFREDFAHAMSYSYSNWENQFCKASTVHGAVSGGCASSILSLQDIHVGLGAEPPSRPNSFTSTSSCMAPSRRSMAVRSRSCSGRPTPSAHARNGIFRTPFPGTQKPGARPDATVKPAAVASLRAVPVVGVQCDVEDRGDGGRATSGGGRRGETAHSHCSLVSYLRKSLYAGAHVLRDQLCAVWWRLSYAGIPLAYGSTPSFRLGARKALTVAVNAMGEGAGVPDDLLRLMSAERRLGVAQARSLRSTCGWAGPVGSCTAGSVDFDGPRVGSFAV

SEQ ID NO: 178518 - protein, 246 aa, Oryza sativa
  Clone ID: PAT_MRT4530_76066C.1.pep
MSNTGDNGNTGYKKKEAPVNTNGGNTTSNSSGGPFLGLRWMNYLRPDLKKEPISDREAETILSLQKLLGNRWSVIAAKMPGRTDNEIKNYWNSRIRKRQSAAAGAKGEPAPATVMEKEPTANAATVAAAPEAASPPPPPIPARLPMFSCQLLDGGGSGGATATTQSPPNAGSSDISEVSACGGNGGGEDSSRDYCFSGGDVDGDGDMVHLLALDDLDLLVDVPGLLDVDAWDCELYRADYSTSRAR

SEQ ID NO: 178519 - protein, 308 aa, Oryza sativa
  Clone ID: PAT_MRT4530_76067C.1.pep
VNTRLAGLHFPLSHRRGRPPLPLRFTAMSTRVSVWINVSSGLDSGRQRGRRREGALVAWGGAQRTSPVEAAARMESGGWHRRTSMIVREELEVAGDGRRASGVEAPGGSGPGGERTMAPANIDDSRRGAGGGLHCAPARLPARHDPTGDGGGQGWQAGAGLHGTPGSAAVFELTAKFCYGVSVDGGVRTKGFRIQKQSYRLSLKFRHPYQAKFDSNQSKTSKWLRPCLREAIPITPLPIGGTQLPCGVAVRSLQCRAIHRGADFMVELCWSYGVVADYAASASPFSLLEAMLDRVTHGAGLCYLGWVA

SEQ ID NO: 178520 - protein, 105 aa, Oryza sativa
  unsure (1)..(105): unsure at all Xaa locations
  Clone ID: PAT_MRT4530_76068C.1.pep
KQEGFMKGFNERGTMNEXGCLYQIAPSDEEXRQMAKGEKLAISTSNIINLILFIRKVVASVESLXLAVMASTLDCLLDLFYRFFIFWFTAHATRKPNKYSYPYVS

SEQ ID NO: 178521 - protein, 192 aa, Oryza sativa
  Clone ID: PAT_MRT4530_76069C.1.pep
MEVAAAEDALEESGVAVYLPRLLAGVISGALTGLFALAGALTGAVTGALAGRASDSGVLRGAGLGAFAGAVLSIEVLEASRAYWCSDRLGSHGTSSMVSISDFGHDDLYDIFGDCSSKGLSRESLNKLPHYVVTDQTRNSFGEDLSCTICLQDIVTGETARRLPNCSHTFHQPCVDKWLVGHGSCPVCRQCV

SEQ ID NO: 178522 - protein, 109 aa, Oryza sativa
  Clone ID: PAT_MRT4530_7606C.1.pep
RFHEEQQNVLEVIDLCAFKEFPSSGLRLVFQEELCPFSFLCAREGGRRGTPVYLLYVLTVSGVALLCHLRSPFSYISGSIFPQDDIVEFNLQTQVQSAKVTAVTAMGIL

SEQ ID NO: 178523 - protein, 171 aa, Oryza sativa
  Clone ID: PAT_MRT4530_76070C.1.pep
MDAVGGGGYSPRFQRQASCSCAPSISMSRRYVRGGFDLAGDYDDDDEEEYGYLGAGVFDGVHHADGKPGAASRGAGAPASASASSGRGCGTRLKGLWRRILRENKKRILLCATGCVPASSSAAAAARVPYDAYSYAQNFDDGAAWVEPENLSRSFSARFAVPSRVLQRVAV

SEQ ID NO: 178524 - protein, 713 aa, Oryza sativa
  Clone ID: PAT_MRT4530_76071C.1.pep
MEAKLSFSQDSPPISIISAAKVAGVSLSIDPSLAAGSAPVLCFSSGESLRGINPILEYIAQSSPSLHGRDAIESGHVVEWLEYAPTFLLGSEFEVACSFVDGYLMSRTFLVGHVLTIADITVWSNLAGIGQRWESLRKSKKYQNLVRWFNGIDSDYKDTLNEVIAAYVGKRGIGKSPAPNLKEKVNDSKDPSAPEVDLPGAKFGEVCVRFAPEPSGYLHIGHAKAALLNKYFAERYQGRLIVRFDDTNPSKESNEFVENLLKDIETLGIKYDAVTYTSDYFPKLMEMAEKLIKQGKAYVDDTPKEQMRSERMDGVESKCRNNTVEENLSLWKEMINGSERGMQCCVRGKLDMQDPNKSLRDPVYYRCNTDPHHRIGSKYKVYPTYDFACPFVDALEGVTHALRSSEYHDRNAQYYRILQDMGMRRVEIYEFSRLNMVYTLLSKRKLLWFVQNKKVEDWTDPRFPTVQGIVRRGLKVEALIQFILQQGASKNLNLMEWDKLWTINKKIIDPVCARHTAVLKDQRVIFRLTNGPEKSFVQILPRHKKFDGAGKKATTFTNRIWLDYADASAISKGEEVTLMDWGNAIIKEIKMENGVITELIGELHLEGSVKTTKLKVTWLPDIDDLVPLSLVEFDYLISKKKLEEDENFLDNLNPCTRKETLALGDANMRNLLRGEVIQLERKGYYRCDAPFVRSSKPVVLFAIPDGRQQASLN

SEQ ID NO: 178525 - protein, 183 aa, Oryza sativa
  Clone ID: PAT_MRT4530_76072C.1.pep
MNKHEKFEELHSPGVSFSPGLKRTAGFAIPGARSNSRRESNDSNFSCIITMSLACLVCHGMSSPSHSFRSYSVSSSEEENRCGAVVACLTRRVMPAGTANTVGTSKALKALLDFNEAVLFQGILSGTGTLKRLLSGTRRSGVIPVGAVLSQLEYFSQVLDVVYELALPILYIVAVPGWLLAEI

SEQ ID NO: 178526 - protein, 156 aa, Oryza sativa
  Clone ID: PAT_MRT4530_76073C.1.pep
RPGLSLSLSPFLPRSLSLSLSQLHSPGVSFSPGLKRTAGFAIPGARSNSRRESNDSNFSCIITMSLACLVCHGMSSPSHSFRSYSVSSSEEENRCGAVVACLTRRVMPAGTANTVGTSKALKALLDFNEAVLFQGILSGTGTLKRLLSGTRVSRVC

SEQ ID NO: 178527 - protein, 947 aa, Oryza sativa
  unsure (1)..(947): unsure at all Xaa locations
  Clone ID: PAT_MRT4530_76074C.1.pep
MSVNIWGPSDLDFLASAMRSFIPNRAMLHTHSFGVEQNVSSSQSKDATVIVDDEVVRISAMFVKPRYNKEASCLNDSNLKPGNTAIIYACELPELKGKFDPAKAAALGLKPGPKYRELQLGNSVQSDAFDKMVHPSDVLGPSIPGPTGVPRKFGVSGADDAVKSLKCIWISHIHADHHTGVARVLALRQTLKPSIEAFLSDNATESATSQLGSTIFAPGSKMENYSRKPASPRDTTALTNLKDVLHESGLEVLYSVPVLHCPQAFGVVLRAKEKVSSAGKAIPGWKVVYSGDTRPCPALVDASRDATVLIHEATFEDSMKDEAIARNHSTTKEAIAVGTSAGAYRIILTHFSQRYPKIPVFDEVDMQKTCIAFDLMSVNLADLPVLPKVLPHLKLLFKDEMVVDESDEIQEAVMRAVESYWRSRMVDGVTADDDKVAPVYKLEEICELLRASDASVVKEVADFVLKRLDNKSPVVKQKALRLIKYAVGKSGTDFKREMQRHSAAMRQLVHYKGHPDPLKGDSLNKAVRETANDAIAAIFSTEEPKPAVATEGLGKRIQGFGNTNFEPSRDDKKSFLSELSEVVGIGSASIKQGLSNFAASHSSMITNDNGGPYKSPNLRRSLTTEMDKYGRYDPSEIQGESRSSSGASKNVSSGSWGPSPSSSAPTDDTGSSQTGVKTREERLLDTIATSSGVRLQPTRDALQIFLTEAAKLDAVALSRALENKLNSPLWQVRMKAICVLEAIVRKQDTDPYSIITSYFCENSASVVRCWDQDDPGAQNSAQEGSERIMGNSMFTSSVDDLLGGEPIADISTTTSNGNGGDPFADVSFHETADTKDTNDLFSGMTVEEKATAALHDSSAIKLWXTMSVLLAQQQQLLPNLGNFNAXGLGHSSLNAMNSGNAXSVLPDIFNSSNQPQHVAVMSNSKKDETKAFDFVSDHLAAARGSKK

SEQ ID NO: 178528 - protein, 35 aa, Oryza sativa
  Clone ID: PAT_MRT4530_76075C.1.pep
LNSTALCSEHILMVGMGDTYGAHMHERNIRIKDTQ

SEQ ID NO: 178529 - protein, 144 aa, Oryza sativa
  unsure (1)..(144): unsure at all Xaa locations
  Clone ID: PAT_MRT4530_76076C.1.pep
MATDGVGGEETGSRRRSATEEKKEAARRLSRRRGGTAPRGRGQGRREGEVAPGAPCRAFTLAPTPPVLDDGRRRRERDEWQQGGDGGSAAMAWWAMSVWEEGASWCLAGGRERDRRFRGRHEXGDGVDVLGGEGGGSDGRIFES

SEQ ID NO: 178530 - protein, 505 aa, Oryza sativa
  Clone ID: PAT_MRT4530_76077C.1.pep
MDSSRDSEEERPQRKDNGEETENGEDGGNALSLKDVANELLGCVVHRQKMEAEWHIPSSPPNPKSASRLLPSLSITTPRPTPNQTPCGRDLAALAMPPPLSFLHLAANPTPLHASPLRRARLRHRLSLRTDHPSRRAVASASASAGENPSTPGGPIADVEMVRGKDGVWTARPPTVVVLWDLDNKPPRGPPFPAATALRDAASLLGRVVSVSAFANRHAFSHVPAWVADERRERRAMDRAERAGAASPPVPYSCAVCGRRFPTRPDLTRHFRQLHQRERNKKLSRLRSLKGKKRQKFRERFISGNTKYDDAARELLTPKVGYGLAAELRRAGVHVRTVSDKPQAADHALKRQVKHSVACGVDWLVLVSDDSDFTDTVRKARAADLRTVVVGDGCRALGSVADIWLPWDRVENGEVDEDMLRNGTHMGFRDEEEDEQDDDEFIVDWDTSDLDGVVDDIVATRTKLFGATTMSAFADEEIMDGILGVGINGGDMLWSSDDEDEDGYF

SEQ ID NO: 178531 - protein, 414 aa, Oryza sativa
  Clone ID: PAT_MRT4530_76078C.1.pep
MAELSGDEACPLCGGGGPPARVAMHKRRLPAEGALSVARVGAGDEAAALREAVARQQHGIAELQAELEAERGAAAGAACEAMSMILRLQQEKSEAMMEARQFRRYAEERFSHDAAEVAALRDAVEQRDATVRSLSAQLRACRFRLLHLGFNSPLPSLTSSAAEAHQYNDDDDDEHHPFDEDYPPINCDEQPASSDVGTPRTHHLLNRMPGRASAADKGVISSSSTNLFPDDSGIAMDDEFPLVVDREASDQEDDCHRVYTVDAVHVVPVAEPENPCYFGTPIGGEMSHRGTIGTRAEEEEIQKLSARLQALEADRESMRHAIMSMGSEKQQVVLLKEIAQKLCKEAAPLQVIPFKRQSFFAKFFVVAVPKYHIGTLCWRRKSYRVKYPIGLCGSNVGLMLLLNRFPKQRHRRLV

SEQ ID NO: 178532 - protein, 314 aa, Oryza sativa
  unsure (1)..(314): unsure at all Xaa locations
  Clone ID: PAT_MRT4530_76079C.1.pep
MVTGDARAAARGIDARGADDGGLRRRQSPESKRGKHDETTRVRFKGVGASPGFKESVSGVGLDGAAPRLAGDERRSSGAGGNGGEAVPGGDGAREWFGEVLGSSRTVVARGIGEGAHGGAQSGTAAAKQSNGGAARLGGRASNRTARGLSKMMQWQEFGRGAHRRERSNVGDAEGVVARWSRRRGGGEQLAAGNKGAGVSSEAEMKXRGGRGLYRRGXRGRFGGGKPTLAVKGARLVFTGGSGGIVGSAKAATAWMRWAAKAVDRAAEIEPRERGLARSRRASWRGRSSGAEAVTPAVVGKGKKKGKKGLGPLP

SEQ ID NO: 178533 - protein, 188 aa, Oryza sativa
  Clone ID: PAT_MRT4530_7607C.1.pep
MCLGHREDGARPCQHIEEEEALGRATQEGVKALVCNAWGGSSRAHLHLEEEALQDVARSRSSISSAHGEGKCSRKRGCCGKPKVYLAGRWKRHLGRRSLTSPVGRCHISRKTTTYGRLAGIHGDIYASPRDHICASLRNWALPIADPLFKTSLQFAEDAYALVLQWRCMHKWTCRLEIGVGLSLFKWL

SEQ ID NO: 178534 - protein, 101 aa, Oryza sativa
  Clone ID: PAT_MRT4530_76080C.1.pep
SMRHAIMSMGSEKQQVVLLKEIAQKLCKEAAPLQVIPFKRQSFFAKFFVVAVIKWIASVFSWRRKSYRVKYPIGLCGSNVGLMLLLNRFPKQRHRRYLKRS

SEQ ID NO: 178535 - protein, 648 aa, Oryza sativa
  unsure (1)..(648): unsure at all Xaa locations
  Clone ID: PAT_MRT4530_76081C.1.pep
MRVFGRGDLITDPKEIAWQYLRSDFVVDAVAALPLPQALPADLRRDIKRHLCLGLVRRVPFFSQMDNQLLDAICERLVSSLCTQGTYIVREGDPVTEMLFIIRGKLESSTTNGGRTGFFNSTTLKSGDFCGEELLGWALVPKPTVNLPSSTRTVKALIEVEAFALQAEDLKFVANQFRRLHSKRLQHTFRYYSHHWRTWASCFIQAAWRRYKRRKMARDLSMRESFCSMRSDDSNGEDDSPPKQNLAMKIMSGSRKGPQNMKELPKLRKPDEPDFSAEPSSFSFLHYQEPGLAPTDPVPAFPTIGMRGAIDQRVDVASSWTATLARAREEAGRLIGRPTARGGIRRTAASRKGRLALAAGGGEGELIPRLGSGRGRATTAGGGGQSRRHADVAAREKSEGCAGSGLAEPVWCCDAHAVTRDPMVTGGARTAALCGGGSGDTARRQGRRPTALGQPGGGQGDPRERGGERXSTREEPTTVDCGGGNHRRAKRGKHDETTRVRFKGXEHLRGSRNPFPASDWTERHRDWLATRGGLRDRARARGELWRAAAGAAHRAAGGGLWWGAHQRRGGSVGGAVGVAARWSRRRGGTAPRGRGRGRREGEVVPGAPRHASTHAPAPPVLGNGRQQRERDEQQQGGDGGSAAMARWV

SEQ ID NO: 178536 - protein, 65 aa, Oryza sativa
  unsure (1)..(65): unsure at all Xaa locations
  Clone ID: PAT_MRT4530_76082C.1.pep
PNYXHPTISPTSHLFPSLPQLLLPLPLTYLCSPAFPFHFPPSPPLSXFFPKXAPPPPPVHLFRLE

SEQ ID NO: 178537 - protein, 143 aa, Oryza sativa
  Clone ID: PAT_MRT4530_76083C.1.pep
MAMTGRLGPSNSDGGAPMPHLTRGARQIYGSPSLSVEHGEQWPPSLSPPPREQRRRWTSNNVSASDPAETLNPAPEALRSTPKPLVLGAPSTAPINIFLALNDNSLSRSHHIPARHRDAGSHLGSGAGGHRFPCTSGKIGTKR

SEQ ID NO: 178538 - protein, 265 aa, Oryza sativa
  Clone ID: PAT_MRT4530_76084C.1.pep
MEATAAATRLLLPPLRAPPPSLAGGAAAAAGGGGRWRGAVPRRARARRAVVPPRASLVDSSGGAAAAAVLLDAAVAGATGYSQASYYTSLGLFVLSVPGLWSLIKRSVKSKVVQKTFVKEEGQTMAPNQVAGEILSFFTRNNFTISDRGEVITFEGTMVPSRGQAALLTFCTCISLGSVGLVLSIAVPEGGNNWFWLMTLSPLAGVYYWTKASRKEEIKVKMILSDDGNVSEILVRGDDVQVEQMRKELKFSEKGMIYVKGIFET

SEQ ID NO: 178539 - protein, 180 aa, Oryza sativa
  Clone ID: PAT_MRT4530_76085C.1.pep
MEEFTFFPAATSPRRDHRLGLVGSPPPLLFAAVIEVDDGDDGEEEEKMDLLWEDFNEELARAPPVCPLSPLNIKGGGLTATTAMAKDDGGGGEKQARRMYSGSVYYMFDVSVTGQSNPRSCIWFVVTNLVDADALPSKPTEMRELLNVKEQAKFSGEFTRNLYVRQCQMIPSLQLHKCCN

SEQ ID NO: 178540 - protein, 387 aa, Oryza sativa
  Clone ID: PAT_MRT4530_76086C.1.pep
MKIERDFHMTNDGDDEFSYAKNSMMQRKAILAAKPTVKEAISKVCTDLHPQSMVIADLGCSFGANTLLFVSDAITTIGENPNNTIGERPKEIQFFLNDLPGNDFNNIFQSLEQFEQSTTKNCTSRGLQSPPHYVVGLPGSFYTRLFPCNSVHLFHSSMSLMWLSQVPENLDGIMNEANIHIGLTTPPLVIKLYQNQFKKDFSRFLQMRCKEIVPGGRMVLTMLGRNSTDVFSAGGTTMAFELLSQGLQTLVAEDCVEKEKLDSFNLPLYCPSVDELKELVWQNELLDITDIRLFEINGNPNGGSDQSAEDAAAAPVIIHGAAAAEAAGKTISTSLRAVKEPLIASHFGESILDKLFAVFARYFTNCIESEVEKSPVPVITLSLQPKH

SEQ ID NO: 178541 - protein, 124 aa, Oryza sativa
  unsure (1)..(124): unsure at all Xaa locations
  Clone ID: PAT_MRT4530_76087C.1.pep
SEVYQVVEAMAPVYTVGXLRYRSVQWLKAFSXNEQRAGINHFVGLYAVPELILDMGSTTNLCKRNXRLIDADTLEKAGLLLGLMAXALWERSRARSAGSKAKDAVSXALHRAMTCFFVASVPHT

SEQ ID NO: 178542 - protein, 72 aa, Oryza sativa
  Clone ID: PAT_MRT4530_76088C.1.pep
LFFFSELRDALKWSHLKNFICDMHVSISLTAFNHGELDTIYLLYAYSPLIDMDQQNTVPILTVKIYENETSA

SEQ ID NO: 178543 - protein, 261 aa, Oryza sativa
  unsure (1)..(261): unsure at all Xaa locations
  Clone ID: PAT_MRT4530_76089C.1.pep
HRGWPARRKTMANSDGKPREDDVGGRTSFGXARKPWPKAAVEVVLTRVRGNEGSGDEPRRRRGGRGGSRPREPDGGDGAAWRRPXRRLAAAGVAEKAAARGCTARERWEARESVAKWGKSERGRRRCLKRGRGNRTGRERRESPADVGSGGGERGGIRKSNPGDLGRRRERERERSGRGRRGARAGVVDVARRRRRRGRGGGCGRDGASEIGGRWGKXPTGGPHLSATPXERRRQGGLAGPRPAAGPARRRGGRREWAGGP

SEQ ID NO: 178544 - protein, 167 aa, Oryza sativa
  Clone ID: PAT_MRT4530_7608C.1.pep
DATVSIIEMAFSFTAALVGAMACGIMRTAFEAALKFAKEDNRGGSVPIIQRQSVADLLINCKIKADTSRLLVRNALDAFDKGRGDAISRLEACLQAKIYSGEAAVQAVWEVMQAVGMRSYLEGTGFGRLLNDATVLSLFDGGNVGVRRRQYERLLQSPDYSGWNASF

SEQ ID NO: 178545 - protein, 61 aa, Oryza sativa
  Clone ID: PAT_MRT4530_76090C.1.pep
VCNNNPTIYITENGTDEANNSTIPISEALKDETRIGFHYKHLQFVHKAIQEGVKVKGYFTW

SEQ ID NO: 178546 - protein, 209 aa, Oryza sativa
  unsure (1)..(209): unsure at all Xaa locations
  Clone ID: PAT_MRT4530_76091C.1.pep
RRRHAADDGGNRRHGRRRRQSKVTARDTKRRGRGKRREXVPHRGWPARRKTMANGDGKPREDDVGERTSFGVPRARGGEGSGDEPRRRRGGRGGSRPRESDGGDGAAGRGRERRESPADVREWGRERGGIRFSNPGHLGRGREREREGSGRGRRGARAGVVDVARGRRRRGRGGGCGXGGASEIGGRWETGPTGGPHLSAXPERRAAGG

SEQ ID NO: 178547 - protein, 178 aa, Oryza sativa
  unsure (1)..(178): unsure at all Xaa locations
  Clone ID: PAT_MRT4530_76092C.1.pep
MATARVRTRCRRRQPAAGRRRKRRCGGGGGTGGGGGSRRRRRATRSGGVALGGEEGEKKGGDASHEGGRRGGRRWRTAXQPREDDVGGRTSFGVPRARGDEGSGDEXDGGGVDEVDARAWSTWPGGGGDVGAATVAGAAARRDRREEGDGPDRWAPPVGDPERGGSGAAWLPGWASAC

SEQ ID NO: 178548 - protein, 40 aa, Oryza sativa
  Clone ID: PAT_MRT4530_76093C.1.pep
MNRGKGTSRPCKTWKDKGNWVKNFGPFGSIGLLPSAAVKS

SEQ ID NO: 178549 - protein, 67 aa, Oryza sativa
  Clone ID: PAT_MRT4530_76094C.1.pep
LRTPRRSAGPSRSEGNPRAPARAKLTDRGTSADKVEAAGRRLTQVRRSPPISSGGGEWCATECRTRG

SEQ ID NO: 178550 - protein, 188 aa, Oryza sativa
  unsure (1)..(188): unsure at all Xaa locations
  Clone ID: PAT_MRT4530_76095C.1.pep
PPLGSPPHRAVAAVGFARLSSTPAAPSPSSFVAGIRIPSRSGHPESRPPVAVVLPWLAVAVRHRLPPRRPPSPSXLAPPPVGAAFAPPSPSPVAVAGNACARAVAVAVAAWPVLSXEPGRHRPSDRPRGRSGPSVPWTGGGPPAWSRSTVDWPXLCCCQWGPLARAPSPSPCALTSGAHLSAQPPPLG

SEQ ID NO: 178551 - protein, 101 aa, Oryza sativa
  Clone ID: PAT_MRT4530_76096C.1.pep
MRGPPVSGSGEGGKGRRHARPTGQRLKGEGGSPRTGTTRVVHRRSTGPTAQIALGGLNSPEREGMRIPATKLDGEGAAGVELSLANPTAATAWRGGDPSGG

SEQ ID NO: 178552 - protein, 224 aa, Oryza sativa
  Clone ID: PAT_MRT4530_76097C.1.pep
MRAPATNLDGGGVDEVDLGRAKLTAATAWAPPVGDPERREAGGRLSGWASACGRPKNPKEATGTPRLGPSFVGRTKRDSTKAVELSSFSSSSNTTSCSSPLSAPAGYVSVADDLSAEVVASDSSPIDRSGAERRARRMPPPALGSPSSSQLTSHEACRRQPHQRRSLSSSHWCRSRMVRLRLNCPLTVSASVESAAAFTAHGCDGASLPRREGERGRKKGSKRD

SEQ ID NO: 178553 - protein, 192 aa, Oryza sativa
  Clone ID: PAT_MRT4530_76098C.1.pep
MSQTPDADPGRDTFTCGTLFMCLNLRGLFKKKPEEVGKSRRQSQEQDQDQAAAVDAETEQEPQYVPAPAPIRAASFEKLERSPPYSGSNIAFDLLVEPELGEDRGARQVLAYCPSPCFDLPAGLMMRAGERCDAPGTAGFVLDGCPTKGALKKVASCLPPDVAGGDGEARPPHLVRFLSTSGSTAPANGGLP

SEQ ID NO: 178554 - protein, 114 aa, Oryza sativa
  unsure (1)..(114): unsure at all Xaa locations
  Clone ID: PAT_MRT4530_76099C.1.pep
SPWTGTTRVVHRRSTGPTAQIALGADRTGGGDPARLKTGQAATATATAHVRERVAGDGNRWRRRRRKRRREGGXREEMRIPATKLDGEGAAGVELSLANPTAATARCGGDPSGV

SEQ ID NO: 178555 - protein, 50 aa, Oryza sativa
  Clone ID: PAT_MRT4530_7609C.1.pep
AKGKEDIYSIFYKGQNGTAQAGTAGRTFLFLGAIKDTVAKMEHNNKHNYI

SEQ ID NO: 178556 - protein, 128 aa, Oryza sativa
  Clone ID: PAT_MRT4530_760C.1.pep
MRRVGQPRHARAFTPLLWCHSLTTVALCFGRRRSDWCQSSATVPNPPRYHQSASGPLLPPPSPPVGGNGSPDVEGVALADFFFGPKLDDLMQWLGDGDAGQKGTLPASSSSSSYAQRGGAERAGGRRP

SEQ ID NO: 178557 - protein, 60 aa, Oryza sativa
  Clone ID: PAT_MRT4530_76100C.1.pep
STHVFVFFFLTSLNPLLSTDTVYNRLPVSYVWCFILLYDDTSSQFHYYQVSLSHSFHTHI

SEQ ID NO: 178558 - protein, 378 aa, Oryza sativa
  unsure (1)..(378): unsure at all Xaa locations
  Clone ID: PAT_MRT4530_76101C.1.pep
KRGPHVSGARVAGLPWTGTTRVIHRRSTGSTARIGPGPIGRCGGDQARLGSAQSRPTGHGDGARTRTRVADDGNRRRRRRRKAAPKGAAARREREGKRKGRGASPRVAGAEEDDGXRRRQATGGRRRRADELRGALRKEKRGIREREMDHGDRKPWPKAAVEVVLTRVRGNEGSGDELRRRRGGRGGSRPREPDGGDGAAWRRPXRRLAAAGAAEKAAARGCTARERWEAREREEGTGRGRERRESPADVGSGGGERGGIRKSNPGHLGRGRERERERSGRGRRGARAGVVDVARRRRRRGRGGGCEIGGRWGKDPTGGPHLSATPERRAAGRPGWASACGRPSREXGRRKEGMGQRPIRKKRGKRXKRKRKRKKDFP

SEQ ID NO: 178559 - protein, 104 aa, Oryza sativa
  Clone ID: PAT_MRT4530_76102C.1.pep
TGGFKPRIKGGQTQGVSLKKTSGRSPPRAQDSRNAPIALKRFQNPNTLIAPNPYIGAQVEKNYFRGPPSTKCKTFKNLRPPIGDVKKGNPAPGGKILDGQLWKT

SEQ ID NO: 178560 - protein, 192 aa, Oryza sativa
  unsure (1)..(192): unsure at all Xaa locations
  Clone ID: PAT_MRT4530_76103C.1.pep
GASIVRKKKPDQKTKSVRKKNWTKKRKKNKXSDKKGRKNEKPGEKTKSIQSRKNRVKKKTXTRLIKKKAKKEKKKGDNKDRKVHKKKKKSRKKNKGKKKNNNNNKSLQKKSEKKQKEKMHEKXKRFKKTHEKKVKKKRKKKKKQKRXRKYKKKTREKIIVRKNRQKHTRKKKAKREKIWFSSSVKKAKRKTC

SEQ ID NO: 178561 - protein, 188 aa, Oryza sativa
  Clone ID: PAT_MRT4530_76104C.1.pep
MAGIRKSNPASLSSPFPHVGRRFPPLPATSGSLFPFLSTAVAPSHFFPISPHSLEPPIAPASCNLRSRHFPLLRPPLAAVRVAARPRRHRRRIRVAEIHPVHLSSVKGTPKLVRSPTSSSRGLPSPFAIVFLRAGHPRAAPPLQVARCRLRPPPPRVPPVAAVVGRMRCRQCVRARVVAVAAVGRPAL

SEQ ID NO: 178562 - protein, 98 aa, Oryza sativa
  Clone ID: PAT_MRT4530_76105C.1.pep
VRAQVLLRPPARLQVKRDPSHVYVSEQVINTQGFSAPPAAHRLDQFLLEEALHYTAGTTCFAPLFVFPNISLGHQAPKKKEPNHNKRGERDVREKKPN

SEQ ID NO: 178563 - protein, 115 aa, Oryza sativa
  Clone ID: PAT_MRT4530_76106C.1.pep
MPMLPHISRCIYVVVFVVITGSRPRKMSHLLLQAAEGLPVLSEHRRPPPTFGWPTTTFWFCSYGRWKWGVSYCTYILPPPMSSAAAAILLLLYLWFMANSYVCLCFDPKITRFDM

SEQ ID NO: 178564 - protein, 83 aa, Oryza sativa
  unsure (1)..(83): unsure at all Xaa locations
  Clone ID: PAT_MRT4530_76107C.1.pep
ASAAPRAATVFGILLXSWTPSSSPPQGPSSETSAAAVEENLFHPDSQASAAPLSFVAIFTIATKGTGHTQRNPPWRCQLPSSG

SEQ ID NO: 178565 - protein, 180 aa, Oryza sativa
  Clone ID: PAT_MRT4530_76108C.1.pep
GASVGHVGAAGPPPFPNRRRPTRRRRSSRPSLIDAVPALPQQTPVNATPAPLPPFPDRRLLLPTPPPLRSSAMEVGDEGGEVADSGGVTTASSSWRHRSSPPCVLFVAEPPLPLLLAETPLPPLRPTTPPLPYPSLPLLLFQRVYDMWGSLSAGLVISKATAIEPNELFQKPPYIFPSYF

SEQ ID NO: 178566 - protein, 525 aa, Oryza sativa
  Clone ID: PAT_MRT4530_76109C.1.pep
MAPVSLHLLSLTRLSLPFRDTVTNPSTPRIPPWRRQWISPTDARRRRLSMPVSAVAAEAPLPRAVDEKETPAAGEERFDWLDQWYPVAPVRDLDKRKPHGKMVMGISVVVWFDGGGGEWRVVDDACPHRLAPLSEGRVDGKGCLQCAYHGWCFDGHGSCQFIPQAPALGPPVHKNSKACVASYPSVVQNNILWFYPRSEPEYKEILQRKRPPYIRELDDPSSVINSGVRDLLYGYRNYLQAIHKQLDASMYVCVFEFDQEGGLPIKMNIEELNIAGFHSNPEENWGYFKFIAPVTLIGSPFRAKPVVDQDNNNTNNKKQPEVTTVFFCIPVSPGRCRVIWANGYNLDGWFDKMIPRWWLHIKTNQVLDSDSSVLHIEERNYAAFGLDNWHKACYVPTSSDNLIIAFRNWFKKYCNNQVGWLTPMVNQLPPASTRVEVYERYWSHVMQCTSCSAALKWMRALEVALQVASVAVVGFLAAGKGTVVTSGVQRAAVVAAAVLCFAASRWLAGFIEKTFYFEDYVLADK

SEQ ID NO: 178567 - protein, 186 aa, Oryza sativa
  Clone ID: PAT_MRT4530_7610C.1.pep
MSAQIVPAPEHVCYVHCNFCNTIFAVSVPSNSMLNIVTVRCGHCTSLLSVNLRGLVQALPAEDHLQDNLKMHNMSFRENYSEYGSSSRYGRVPMMFSKNDTEHMLHVRPPEKRQRVPSAYNRFIKEEIRRIKANNPDISHREAFSTAAKNWAHFPNIHFGLGSHESSKKLDEAIGAPSPQKVQRLY

SEQ ID NO: 178568 - protein, 616 aa, Oryza sativa
  unsure (1)..(616): unsure at all Xaa locations
  Clone ID: PAT_MRT4530_76110C.1.pep
MADMRRHSVDVPLSRTLVQLKRVRSLRDPATNSLSKYASPSDNMIWETASSNGVAMDLGRSAHHQLIEEDGDLEAEATLGSERSFRAPNARTASYRKSSVVKIRGLNPPRNKQAHRARQDGHRKSVDSSHSNHSSIRQLANTMVNNVAEEKEEEEEVNSYERSVPTPPAKTDEEVKMPGFSKFRNKSSAAMSRVGSPCMSASEARSVRSRRTEETQVRSNDVVGSNFSGCGISYCWSGASKYRELYYDSDGPEQPLLSPEGTDAAFQENVPYTETPRCLSQKFRPRSFSELIGLNVVAQSLLYSSCKGKVAPMYLFHGPRGTGKTSTARIFAAALNCLSLEEQRPCGFCKECVILFSGRSRDVKELDAAKMDRLGRVKALLKSASLVPYSSRFKVFIVDECHLLPEDAWSAILKSLDEPYRHAVYIMITSDIDSLPRTSITHCQKFHFPRXVADMSXRLERICIEEGLEFDHDGLYFISAKSNGSLRDAEIMLDQLSLLGKKITISLVHELVGSVSDDELIELLDLAWSPRAAGTVRRARELMASAIDPLQLVSQLANLIMDILSGRCQSAVTEVSKSFLGRYALAEVGIKKLRHALKILSETEKQLRTSRNQATG

SEQ ID NO: 178569 - protein, 572 aa, Oryza sativa
  Clone ID: PAT_MRT4530_76111C.1.pep
MPRRRLRRGDLACSVAVAVAVAAVAVAAVGAVGGGDGGADFDYRKLSGIIIPGFASTQLRAWSVLDCPYSPFDFNPLDSVWLDTAKLLSAVNCWLKCMLLDPYNQTDHPECKSRPDSGLSAITELDPGYITGPLSSVWKEWVKWLTFETALKLRGGPSLVFAHSMGNNVFRYFLEWLKLEIAPKHYIRWLDEHIHAYFAVGAPLLGSTEAVKAALSGATFGLPVSEGTARLMFNAFGSSLWLMPFSEYCKADNIYWKHFFEGKGGCHHRQQCDEMEYKSEYSGWPTNLVSIEVPTVRDTEAYPSIMDTTENITSSMECGKPTLLSFSAREVSDGTLFKTIKDWDPQSIGLIHQLEKYYQGDPVLNPLTPWERPPIKNVFCIYGLDSKTEVGYYFAPSGKPYPDNWIITDIIYEFEGSLLSRQNKIVTQFILSRSGNSVTGKPNNSSGDGTVSYNSLSWCKNWLGPKVNITRAPQAEHDGSDLQTKMNVDHHVGQGILPNMTRTPHVKYITYFEDAESIPGWRTAVWELDKANHRNIVRMPVLMRELWLEMWHDMHPDAKSKFVTKDKLMDTD

SEQ ID NO: 178570 - protein, 86 aa, Oryza sativa
  unsure (1)..(86): unsure at all Xaa locations
  Clone ID: PAT_MRT4530_76112C.1.pep
IGSKVISCTFRICITINXDXEYPFVVNPLCKPTCKLKTDALVQLHLELSSTCLYHAEEEFHKSSPRYPKTCSRWPTCNLCILFFFF

SEQ ID NO: 178571 - protein, 455 aa, Oryza sativa
  unsure (1)..(455): unsure at all Xaa locations
  Clone ID: PAT_MRT4530_76113C.1.pep
MPPRKKTSRKSKRSRDRSPTPSPSYHEDSDRDWSGGGEEETGPQVANVPRGSSLPPRRSTHGDQGSSRQLCAFSGEGSPRXAHTTAPPPAGLIGPLMLHAPSRNPRRAVRDWRQKSDIVAVERNQDPRSMPCSASDXVPMQWIDWEALATLDDPDLNAVIGACEEMGGSWYSISYDQLANLWGFDENWMRYMTHLHDIVIPHNHDLRPLYLPGGKLGTTEGLKPYHIYLNRILRRTLTPKDGDAKNINHFSLSMLLRFNPPSRPFHVFLFVWQEIRMASLQYKRGLPYAPHIMRMIEHVTHLRFVCEEPHTALSLRLPKRGSVPRDIPSTSSQPPSAPERPSSVARREPSPLFRILRTLFGLCSAEAKKNRRLRNPAKKTAHDVKYLKARYHEDHHIDIPPFPPGFEAEPDEPEEEELEDPFAGVPPDFDFFGYGHGYGYPPPPPPEDPPRAPLA

SEQ ID NO: 178572 - protein, 380 aa, Oryza sativa
  Clone ID: PAT_MRT4530_76114C.1.pep
PLASSGEGSSRQAHTTAPPPAGLIGPLMLHAPSRNPHRPVRDWHQKSDIVAVERNQDPRCMPRIASDDRYWTSFQQDFYETVILPPSNPTLPMQWIDWEALATLDDPDLNAVIGACEEMGVRNFTTLQQAWCKEIIAQFYAIVYFNGDRDIHWMTQGSWYSISYDQLANLWGFDENWMRYMTHLHDIVIPHNHDLHPLYLPGGKLGTTEGLKPYHIYLNHILRRTMTPKDGDASNINHFSRSMLLRSVPRDIPSTSSQPPSASERPSSMARHEPSPLFRILRTIFSLCSAEAKKNRRLRNLVKKTASDVKYLKARYHEDHHIDIPPSPPGFEAEPDEPEEEELEDPFAGVLPDFDFFCYGHGYGYPPQPPPEDPPQAPLA

SEQ ID NO: 178573 - protein, 100 aa, Oryza sativa
  Clone ID: PAT_MRT4530_76115C.1.pep
NHKNEVQQTGQPDGQAWPKSLAGWLDLASQNASPNRPAATVLLARSSGRRRRRRGRRREPPPPSPSPPRAPPPRPSNHCRRRRLPPPSAGAIVSSPRAPP

SEQ ID NO: 178574 - protein, 200 aa, Oryza sativa
  unsure (1)..(200): unsure at all Xaa locations
  Clone ID: PAT_MRT4530_76116C.1.pep
LRPLTTGVGPLPACPTTPGAPDPQDGPEATVGRPPLSSSDPEVVGTEDECAPRGRLGEEHPRDAAPSEEDRPHRKVQRPIYFVIEALRDAKTRYPQAQKMLYAILMTSRKLRHYFQAHRVTVVTSYPLGQILHNREGTGRVVKWAIELSEFDLHFEPSHAIKSXALADFVVEWTPAPKLVSAPEASSSPSQLPHTALWVM

SEQ ID NO: 178575 - protein, 73 aa, Oryza sativa
  unsure (1)..(73): unsure at all Xaa locations
  Clone ID: PAT_MRT4530_76117C.1.pep
RPGLINSQVMQQQCCQQLRLVAQQSRLGRRISSVQXALFSVPQLQQVGVVSFDQSXAQAQPLFGVSLVRPMFV

SEQ ID NO: 178576 - protein, 176 aa, Oryza sativa
  Clone ID: PAT_MRT4530_76118C.1.pep
LRPPTTGAGPPPACPTVPGAPDPQDGPEATAGRPRLSPSDPEVVGTEAECAPRGLSDGERPGDVAPDEEDRPRRKVQRPVYFVSEALRDAETRYLQAQKMLYAILITSRKLRHYFQAHRVTVVTSYPLGQILYNREGSLAPSRQDESLQALVPSRSRRVSSWRWHVGSGQIYTRLH

SEQ ID NO: 178577 - protein, 126 aa, Oryza sativa
  Clone ID: PAT_MRT4530_76119C.1.pep
MTERGAPHWETAQAPLCQFGRGLRVRAAEKRNTLLLCFGRSVYEGATKCDVESWLSADDMTGVRPVTSVILVHHVMKPGIYLTRTNVPSLGGNTLAPAGDERLEALVLTGWGEACVRSPVATKPAI

SEQ ID NO: 178578 - protein, 59 aa, Oryza sativa
  Clone ID: PAT_MRT4530_7611C.1.pep
MGAMSDFVVGGAGELKKMVAARTGLHPDDQKVMYMDRESDSNALLYMAGDKDSYTLVVF

SEQ ID NO: 178579 - protein, 108 aa, Oryza sativa
  unsure (1)..(108): unsure at all Xaa locations
  Clone ID: PAT_MRT4530_76120C.1.pep
RSVGLLTGRPRRPPFAGSAGGPGFGPLRSPIPTSTSAGSRRXVGTWLSADDMISVRPVTNRMKPGIYLTGTNVPSPGVNTPAPARDECLEALILTGWGEACVRPPVAT

SEQ ID NO: 178580 - protein, 116 aa, Oryza sativa
  unsure (1)..(116): unsure at all Xaa locations
  Clone ID: PAT_MRT4530_76121C.1.pep
MLCEEGQTCTLLSXHAVDKNDRFVTGLTLLRSSAHSHVPATRLPPAEVEIHKNTGVGYYASERPEPVYIAXVSCVLRASNLSTHSESLRSHPKPPAEPAKGGLRGLPVRSHELRHT

SEQ ID NO: 178581 - protein, 371 aa, Oryza sativa
  Clone ID: PAT_MRT4530_76122C.1.pep
MAIPRISPRKTLPLFAALALALAWAFAAPAFADGDDVVALTESTFEKEVGQDRGALVEFYAPWCGHCKKLAPEYEKLGASFKKAKSVFIAKVDCDEHKSVCSKYGVSGYPTIQWFPKGSLEPKKYEGQRSAEALAEFVNTEGGTNVKLATIPSSVVVLGPDNFDSIVLDENKDILVEFYAPWCGHCKHLAPIYEKLASVYKLDDGVVIANLDADKHKDLAEKYGVSGYPTLKFFPKGNKAGEDYDGGRELDDFVKFINEKCGTSRDTKGQLTSEAGRIASLDALAKEFLGAANDKRKEILSNMEEEVVKLSGSAAKHGKVYIAIAKKILDKGHDYTKKETERLERMLEKSISPSKADEFIIKKNVLSTFSS

SEQ ID NO: 178582 - protein, 157 aa, Oryza sativa
  Clone ID: PAT_MRT4530_76123C.1.pep
PLKYLGNARTPLAAVNNTFRAYEDISLTERGAPHRETAQAPLCRFGRGLRVRAAEKHGDLHRRRPNDLLTGRPIPTSTSTGGRHDVESWLSADDMTGVRPVTSVILVHHVMKPGIYLTRTNVPSLGGNTLAPAGDERLEALVLTGWGEVCVRSPVAI

SEQ ID NO: 178583 - protein, 48 aa, Oryza sativa
  Clone ID: PAT_MRT4530_76124C.1.pep
LLDYLTSSFHCPHDDADFIFNILNHYTITIQYPEPQGGNAPGSHVVLG

SEQ ID NO: 178584 - protein, 450 aa, Oryza sativa
  Clone ID: PAT_MRT4530_76125C.1.pep
MVTTHHLCLLRSTVLSVPVRLRAPRAPPHPRLPTASASASSYHGPTHLRRLRPLRAAAAAAGGASPDGADGAKRPAPAAASSSLGAALVGFARSNFLPLALIAGIALALMDPTLGCLAHKYSLSKYSTFGIFLISAIQDRVAYHIHATDYSIYFLAFNYLAEASILLFTPFLAQFIMQIKFFPHEFITGLAMFCCMPTTLSSGVTLTQLVGGNTALALAMTAISNLLGIMIVPLSLAKYIGVGAGVSLPTEKLFKSLVTTLLIPIILGKFSDEIIPGLVLHHIYATTLHYKQVARETSKGIAGFVDGNKQGFSVTSAILLSLVPWIQVSRSRSLLLSVQPKAFAVAVTVGVLLHFALLAFNAAALHILSRLEQRGVSVFARNEYARAVILVASQKTLPVLVAVVEQLGGALGESGLLVIPCVAAHINQIIIDSIIVNWWRQRDQQFANAK

SEQ ID NO: 178585 - protein, 673 aa, Oryza sativa
  Clone ID: PAT_MRT4530_76126C.1.pep
MLACIACSSKEGGEDGSRGAATPHGRDAVKSLTSQLKDMVLKFSGSNKHQHYKAATAGSPSFRSRSYRRPYPGFIDDSAFMTTTRPGGEAYMYTRAAPPPPVRAASTSMATWDMTRSKSNRGWQQDAGRSPGGTTWIQSIEEEAGADDVTVVEDAVPREWTAQVEPGVQITFVTLPGGGNDLKRIRFSREIFNKWEAQRWWGENYDRIVELYNVQTFSGRQQGVSTPTSSVDDSILRESSFCSRGGSTRESPVVTPATSSSLAKEPIARSMSCKAMAASASNYAAAAASTRAACYPSVAVPDPSDHVWAHHFNMLNSAAAGPSAAGGGVPSLYDPSRGTTSSRDEASVSISNASDMEATEWIEQDEPGVCLTIRELGDGTRELRRIRFSRERFGEDRAKCKEEPAPQVAAAEGAEPRRRRPGAAVRGALGVAAPFAASFLFSFVVGLAGLVLGGLSSTASVSMPSTCRILSTGVDLRSSKVCELGLLNYRAKHVFYPSSNRKFRCHDDYYWASVFEVEYTEYFSGQTSYAVAEAPKEALPLNCRPDFGVAWSTTLKFKVNESYSCRYTLGSSKADIYSDRLFNCTSEEPSTIEMLKRIFVLLSKSYMLEDFNSIGMLGYVMAGVVAGILSALLITILLRSLRGLVLAVVGSSYSKMIGLKELLLDYEIMERFL

SEQ ID NO: 178586 - protein, 123 aa, Oryza sativa
  unsure (1)..(123): unsure at all Xaa locations
  Clone ID: PAT_MRT4530_76127C.1.pep
MDGDLHGCRSSHLLMGRPAPTSTFAGSRRDAESWLSADDMTSVRLVTNRSFLSTTRHLSNLHVGPSSHNILPVMVRMKPGIYLTRTNVSSLGGNTLIXAGDECLEALVLTGWGEACVRSPVAT

SEQ ID NO: 178587 - protein, 109 aa, Oryza sativa
  Clone ID: PAT_MRT4530_76128C.1.pep
MGRPIPTSTSAGDRRDVGAWPSADDMTIVRPVTNRSFLSTTCQFNNLHVPPSSYNILPVMVRMKTGIHLTGTNVPSLGGNTLAPAGDERLEALVLTGWGETCVRSPVAT

SEQ ID NO: 178588 - protein, 65 aa, Oryza sativa
  Clone ID: PAT_MRT4530_76129C.1.pep
PPFPGGVLFLTRFHFKRELVFFRTWGAPRAQSFIKSPLTNSGNTFLHLYVGVQKSSFLVTFYPLL

SEQ ID NO: 178589 - protein, 155 aa, Oryza sativa
  unsure (1)..(155): unsure at all Xaa locations
  Clone ID: PAT_MRT4530_7612C.1.pep
KFPLFNFVQMRAVKVIFYQNALXLSPFWTXTPQRVGDITQGGARVQVVPPNGKPVFYGKLPRGPLFFFPQPPCCLXKAQREGCSFFAFKTPPAPLVSPLAGKNSFFRALPGDVVANAFCFSKKKVWGLQPPRGDELGGFPPSHAPKSSPDIFVGA

SEQ ID NO: 178590 - protein, 123 aa, Oryza sativa
  Clone ID: PAT_MRT4530_76130C.1.pep
MDGDLHGCRSSHLLMGRPAPTSTFAGSRCDVESWLSAGDMTGVRMVTNRSFLSTTCQLSNLHVGPPSHYILPVMVRMKPGIYLIRTNVSSLGGNTLAPAGDERLEALVLTGWGEACVKPPVAT

SEQ ID NO: 178591 - protein, 80 aa, Oryza sativa
  Clone ID: PAT_MRT4530_76131C.1.pep
RPIRSTGEHRVIVLCSPSYHIPQCLIHVAHTPLCCSISQCASLAPCRLSVSHLVSGALTGLLRCESCCVLSRWSHYGVMR

SEQ ID NO: 178592 - protein, 821 aa, Oryza sativa
  unsure (1)..(821): unsure at all Xaa locations
  Clone ID: PAT_MRT4530_76132C.1.pep
MPTSVSPSAVPSTEYAERISASKQTHWDEIGIGQALALTIDNSAKDEPLMAAATYFWSNAINAFLFNQGPMTPTLIDITMITGLDVTSSANPMRVNTKNQYDFRTKSIGGWSGYVAAYMGQGSVTPREHVAFLLMWLKKFLFCGSSCGPTTNWQFVADALESKRQFPLGKILLSYLYQTLDNASAKIAVGSVVGAGGPAMKAVNRPSVTEAEFPRLKPITDDDGEECTHRRCMSYGEYASTPANAGAKLSAEPLKDWFCIFYEGFQKDAHVWFFYENSADLDLPSDFRFEDINHERYQKSREVFSASISPCILPIGIHQGRNIQVSYEFYHPMSSARQFGMGQLPIGLLFADKIQCQGEISSTLMMDRLLNIPGPPFGSIENIELAKFRSRAFDRWWGEWKLHLFHQSASMYMTDLFPDVIPQSNSGRDIEYAPGLIPNGGGPSPPVIGYHAPKTSSLLQGLIREPTDVSKNRKTRASAIDPSALVPKKKTRKNKPKPIDDLPTLDPSIEQALDEEEIEEDVDKAAGEVSDTERTPLASPKKTPPTPSTPAHFSRPPPPPSSPVQQSSSDQTPSAAGSHRVEEEEQLAAPAIPALANMFFFDIKDYFYETEEDTTTKALAPLSDDVKKTLEDIHHRLEASSLESLVVDCGSIRTWLHEVQALVPEELADVLTPTAYFEQHQFKLEKAKLRLAERRERKDIEATIQANWQLVHKEKIXKLDQLSEGPIKANIDQLEARKIELLAQLQECNAELDMEHKKLADLPQVVEEQKARLKSAIKNVADLTKSLKVILGTDAQDAQAIEEVEQIRQRAISALQRYLSQ

SEQ ID NO: 178593 - protein, 190 aa, Oryza sativa
  Clone ID: PAT_MRT4530_76133C.1.pep
MADRAWMYRERYRASYTEGVDIFMKAAKKNAASKKTKEIRCPCVHCKNQKIWINPSVIEQHLVTHGFGARYTTWSHHGEIPSKQVPNQATVWDEVFNLDEDFMVVVVVVEEEEEEEEEEEEEEEEEEEEEEEPVDDDDVGDNGQHSTVDDVDEGNVSVNDGNFDSEEILRHAEPEVVAGSARGLENFDAL

SEQ ID NO: 178594 - protein, 99 aa, Oryza sativa
  Clone ID: PAT_MRT4530_76134C.1.pep
LPKVCNYKGYPSTGLCKSIKALLVQYQPRYKSMVCRCTPGCICLHPIRQVPFWYMDVLHVRELGFHHPNVKLIKRSDPVTLRSLVCWRKHACYGCREIW

SEQ ID NO: 178595 - protein, 78 aa, Oryza sativa
  unsure (1)..(78): unsure at all Xaa locations
  Clone ID: PAT_MRT4530_76135C.1.pep
MQSCNLRHLKMEIKEALQMNRAVPVIVPRESIKVXQLDGNSYPCQXRVIINTXARGRDPTYWDKTDESMPERLEDGTL

SEQ ID NO: 178596 - protein, 47 aa, Oryza sativa
  Clone ID: PAT_MRT4530_76136C.1.pep
MWDLILRKNDIIVTNQNYCTKIESSHNKLATKSRLGSGLNSLMLNVR

SEQ ID NO: 178597 - protein, 211 aa, Oryza sativa
  Clone ID: PAT_MRT4530_76137C.1.pep
MGHTYLHSARYRGDVGAQAPVQSDVTGNRPVTDWSRPIDVAWVPSLLAPPTTWQLGEGLGARQHEGPRGTTWHPEAPRPFLRLVRCGSRARLWSHAAGWEGKIKSTLSYFEENYDPRANIDWELVVDREFKEHDLSEKHMEVHNHENEESDMKELPFPLFTLKFDGSPSSEERITCNLHGAAINQVNEHAIPIGNSYCADFKHVIHIANEE

SEQ ID NO: 178598 - protein, 71 aa, Oryza sativa
  Clone ID: PAT_MRT4530_76138C.1.pep
NSTDKIHLQSIGIELSKQVSLQRLPRCVWNLMVISRVVRSLLHHDGSPSFTGSKKAELNFQRATLAASSCS

SEQ ID NO: 178599 - protein, 160 aa, Oryza sativa
  Clone ID: PAT_MRT4530_76139C.1.pep
YDACYDAYTLINLLALCRLEPEDYIAAIHVMVAMFTLPILSRCLQTYIYIINRLYSLRLSNYIASASHKHTAPCTYNAIRNMCLPFKVIQSGPVMYYKYKLLPTACYPPLSVVEVQIKICSLYDLCFLLSFSFSAFSFDSFKWIDKFFNSSAFTICSTIL

SEQ ID NO: 178600 - protein, 82 aa, Oryza sativa
  Clone ID: PAT_MRT4530_7613C.1.pep
NVEGPRHVELESFKTGAPFFFFYTAITNSYTHRVWCLLKGEKNRGEHGLKLMRNTHRKNIRFLEYDTNLERARTQSLTHTPL

SEQ ID NO: 178601 - protein, 975 aa, Oryza sativa
  Clone ID: PAT_MRT4530_76140C.1.pep
MEATAVSLARSVLDGVLNRAGSAVADEAALLLGVRREVEFIRDELDMMRSFLKVATANPDADDTVRTWVKQVRDLAYDVEDSLLDFALFADTLSSSSSSSWWLPWRIAERHRVAARIRELKASVEELNQRFLRYRIVVEHPRASRGGGASDDQQQLHDHDGQYYSAELAFQESDIIGRAREKAEVTALVLSGCGGGDVVGGGALGVVSVWGMGGMGKSSLVRMVYNDPELLDAFDCDAWVTVPHPLDSADEFVRRLRRHLAVGKDQDVHAYLREKRYVIIVDDLHSREEWEHIWPVLHVDGGKGSRVVVTTRREDVARHCAGLVREGHGHVYELRPLGREESKDLFCQKVYKSTEYILEKEMEDLAGPILKRCRGLPLAISTIGGLLANRPKTGIEWIKLDEHLGAELESSDLRNITKVIVSSYDGLPYYLKSIFLYLSIFPENHEIRCTRLLRRWMAEGFIAKNRDMPVEEVGQRFYNELINRSMIQPSKKRISPSVSVDRCRVHSMVLQIILSKSIEENQLFIIKKHCNEVPQSKIRHLVVSRWKRRDERLENINFSYVRSLTVFGDCPASLISPKMRLLRVLDLEDSLNLKNEDLRHVGELHHLRYLCLRGTEISKLPSFQNLRYLETLDIQDTKVTQLPDGIAKLEKLRYLLAGVNFSKELLHKVEQPETDNRKANQLGNMLSCLYCNSSDYCGISSLDRVSVRAPEGVEKLRDLHMLGVINVGHGNGVVGKIKKLTNLRRLGVSGVLKEEGQDLCKSIEKLSRLQRLELRSDSLKFLAESEFAAPKHLLSLRLYGNLVRLPKWIGSLNDLAKLKLLGTQLKQGEIMHLGKLRNLAFLGLWDNSYVGYSLHFGPGTFPKLKFLDIDGLKNIETVAIENGAMPELEQLWVNDCKGLLDSKDGLSGVPHLTNLNELLVKKCGEKENLMEILQTQVSEHSKRPKFLIEYFVWLVTEESKYPTVKNNNRQAKAKI

SEQ ID NO: 178602 - protein, 415 aa, Oryza sativa
  Clone ID: PAT_MRT4530_76141C.1.pep
MCDKKLSILDSLPDASEGGQDSLKRHEEIRKIVCGALNKTMDVAFCFFSWEYEFPKVPRQQNSYDGGFFVFNFMRLWDGHRLIRWFSTETMDMRKSFLACILSSKNNDATMPTNVSELIKTLPGEAMMTPELVQATRQGNTNAFRELRCPARREGSYGGHTSISINRAACCSCVFFESTSSRRSCFRLDCKSSCRSDEQENQIMRSPLRLDATSTVTSDRGPPEPYSIRGVTVDGDGVLHIAASFCHFELAKSILEGQEDKALIVMLLQQENKRGDRPLHCAAATESKEMVQLIVERAKCITEPSNFTTNLLRARNLEGQTCLHKAILLGHTEIVKYLVSQDEGLAQIVDNEDISPLYLAIALRRGDIVQELTIKASCGPAGAVSYCGPAGKTVLHAAVLFSEGTDAISSFVVKF

SEQ ID NO: 178603 - protein, 211 aa, Oryza sativa
  unsure (1)..(211): unsure at all Xaa locations
  Clone ID: PAT_MRT4530_76142C.1.pep
MDQMALATIVQAVPEAMVMVISEKEMAREAWDALKQMNMGEERVKKARVQTLKRVLDXRSLGTKVEETTVVERLLHSVPDKFQSLISTIEQWXDVSEMTVTETIGCLRAFEVSSKGRRRENAGEEQLLIAGAEQRLTRAEWEAIVAEEKKSYEASGSVTKKFRSKFDKSKIECCRCGKFGHFADECDEPRKMTKAVAQLAIADADDEPTLL

SEQ ID NO: 178604 - protein, 564 aa, Oryza sativa
  Clone ID: PAT_MRT4530_76143C.1.pep
MATKAALRSLWSAFDKQASSIIDKLVWPWLMPADDTEEGAKRRAEEITEELAQLEKTRMTTWARSVVESFDTAPPPSPPPLSATTPHPPPPSPATSSSRTATATATATPTSPTPTPPPTSATLLWPRPRPTKEEEGEGLQRRTDAVLVKRLRRARFAAWTSAALHKFDFDDAAPTVPPPPPATMIPPPTVTATITPLWPPPPPTKKEEHEGLQRRTDAVVVLVRMQRRARFAAWTNAALHKFDFGAAPPTAPPPPQPLPVGNSPTLKWYQSSGAMSGDGVYTPPPPPPIRRSSGGGGSSSGNGDGVYTPPPIRRGSGGGGSSSGNGGDGSLGGHELVVQQVKEAGVTLRYPMLGENNYGVWAVKMKIFMRAQGVWAAVEGNAADEKMDQMALAAIVQAVPEAMVTTIVNEIHSLGTKVEETTVVEKLLHSVPDKFQSLISTIEQWGDVSEMTVTETIRRLRAFEESSKGRRRENAGEEQLLIAGAEQRLTRTEWEAIVAKEKKSDEASGNGEKKFRGKFNKSKIECRRCGKFGHFADECDEPRKMAKAVTQLVIADADDEPTLL

SEQ ID NO: 178605 - protein, 1195 aa, Oryza sativa
  Clone ID: PAT_MRT4530_76144C.1.pep
MAGRSGENGGAGGGDLSEPLLGKEAPRRYSELYGAGVLSRLSFSWLNPLLRLGRSKALDLADVPLIASEDGAARASERFAEAWSLHGHGKDGGGGGRLVGVLLSSHKAEEEERRDLAAAGASAAVALVGSLLAIKLAQSLAARHWFFSSRRTGMRVRSALMAAVFRKQLRLSARARRRHSAGEVVGYVAVDAYRLGDAVSWLHTSWSSPLQLALAVATLLWALRLGALPGLVPLVAFGFLNVPFARALQGYQSRFMAAQDGRLRSTSEALAGMRAIKLQSWEGAFRRAVESRLGGEFAWLREAQLKKAYGAVLYWAAPTVVSAVMFAATAAAGSAPLDAGTVFTALAALRAMSEPVRMLPEAMTMMIQYKVSLERIGRFLAEEEIKQDDVTRAATTTTTTKNSDAGIIHVQDGSFSWSGSEAELTLKNAHLSIRRGEKVAVCGPVGSGKSSLLCALLGEIPRTSGMSGTVRDNILFGKPFENFDHGDLTEIGQRGINMSGGQKQRIQLARAVYSDADVYLLDDPFSAVDAHTAAVLFYVRALSEKTVVLVTHQVEFLTETDRILVMEDGYVKQQGVYAELMESGTAFEKLVSAHKSSITALDDSSQQSQVQEQNVTDENTSGQPSAKYISDIDSISAKGQPSATQLTEEEEKEIGDLGWKPYKDYINVSKGITHLCVMGVTQVLFTSFQMMATFWLAVAVQMNVSSALLVGAYSGLSILSCCFAYIRTLYAAKLGLKASKAFFTGLMDSVFKAPMSFFDSTPVGRILTRASSDLSILDFDIPYSVAYVVVGATRDLARINGTTKAPVMNYAAESILAVVTIRSFGETDRFIRNNLLLIDTDATLFFHTVAAQEWVLIRVEALQSLTLLTAALLLVLAPPGAVSPGFAGLSLSFALSLTAVQVFLTKFYSYMENYIISVERIKQYMHLPPEPPAIIPENRAPSSWPQEGQIDLQDLKVRYRPNMPLVLKGITCTFPAGNKIGVVGRTGSGKSTLISSLFRLVDPAGGRILIDNLDISSIGLKDLRTKLSIIPQEPTLFRGTVRNNLDPLGLHSDEEIWEALEKCQLQTAIRSTPALLDTVVSDDGSNWSVGQRQLFCLGRVLLRRNKILVLDEATASIDSATDAIIQRVIRQQFSSCTVVTIAHRVPTVTDSDKVMVLSYGKLIEYDTPAKLLEDKQTAFAKLVAEYWANSKRNAT

SEQ ID NO: 178606 - protein, 183 aa, Oryza sativa
  Clone ID: PAT_MRT4530_76145C.1.pep
RSRPLLVGDAATAAGPEAEAIAALAAPCSSRTKTPPLPLLRRHWMASLLLLAEDEDATAPATRRRTRTPPLPLLVHGETVAPATRRGVGEWRKRAAVAGADAALPLRPDLGGREGGRGGSAASATIAPSSSRILELGREECHLRRLRWRPPPSLPSYSLIQERGERKGRGAPPPRRCPPLIQS

SEQ ID NO: 178607 - protein, 620 aa, Oryza sativa
  Clone ID: PAT_MRT4530_76146C.1.pep
MATKAALRSLWSAFDKQASSIIDKLVWPWLMPADDTEEGAKRRAEEITEELAQLEKTRMTTWARSVVESFDTAPPPSPPPLSATTPHPPPPSPATSSSRTATATATATPTSPTPTPPPTSATLLWPRPRPTKEEEGEGLQRRTDAVLVKRLRRARFAAWTSAALHKFDFDDAAPTVPPPPPATMIPPPTVTATITPLWPPPPPTKKEEHEGLQRRTDAVVVLVRMQRRARFAAWTNAALHKFDFGAAPPTAPPPRQPLPVGNSPTLKWYQSSGAMSGDGVYTPPPPPPIRRSSGGGGSSSGNGDGVYTPPPIRRGSGGGGSSSGNGGDGSLGGHELVVQQVKEAGVTLRYPMLGENNYGVWAVKMKIFMRAQGVWAAVEGNAADEKMDQMALAAIVQAVPEAMVMAISEKETAREAWDALKQMNMGEERVKKARVQTLKRVLHGMYMGNSEKINDFALKVTTIVNEIHSLGTKVEETTVVEKLLHSVPDKFQSLISTIEQWGDVSEMTVTETIRRLRAFEESSKGRRRENAGEEQLLIAGAEQRLTRTEWEAIVAKEKKSDEASGNGEKKFRGKFNKSKIECRRCGKFGHFADECDEPRKMAKAVTQLVIADADDEPTLL

SEQ ID NO: 178608 - protein, 40 aa, Oryza sativa
  Clone ID: PAT_MRT4530_76147C.1.pep
FFFFFKFKMKQKVQGMVAILSSYVHQRSLVLGLIDEKFDG

SEQ ID NO: 178609 - protein, 90 aa, Oryza sativa
  Clone ID: PAT_MRT4530_76148C.1.pep
MAPRKGRPPRAMRKVAPVGRNNGEEIDQLAPYSAWWPAPASSSPLPPDLLLSLLAPPTFSRPTGLLPTRQPACAESCHVGQNQGKNHLRI

SEQ ID NO: 178610 - protein, 542 aa, Oryza sativa
  Clone ID: PAT_MRT4530_76149C.1.pep
MATKAALRSLWSAFDKQASSIIDKLVWPWLMPADDTEEGAKRRAEEITEELAQLEKTRMTTWARSVVESFDTAPPPFPPPLSATTPHPPPPSPATSSSRTATATATATPTSPTPTPPPSSVTMLWARSRPTKEDEGEGLQRRTDAVVVLVRMQRRARFAAWTNAALHNFWGVERLSPGWANVYRFWANKWYQSSGAMSGDGVYTPPPPPPIRRSSGGGGSSSGNGDGVYTPPPIRRGSGGGGSSSGNGGDGSLGGHELVVQQVKEAGVTLRYPMLGENNYGVWAVKMKIFMRAQGVWAAVEGNAADEKMDQMALAAIVQAVPEAMVMAISEKETAREAWDALKQMNMGEERVKKARVQTLKRVLHGMYMGNSEKINDFALKVTTIVNEIHSLGTKVEETTVVEKLLHSVPDKFQSLISTIEQWGDVSEMTVTETIRRLRAFEESSKGRRRENAGEEQLLIAGAEQRLTRTEWEAIVAKEKKSDEASGNGEKKFRGKFNKSKIECRRCGKFGHFADECDEPRKMAKAVTQLVIADADDEPTLL

SEQ ID NO: 178611 - protein, 276 aa, Oryza sativa
  Clone ID: PAT_MRT4530_7614C.1.pep
MRAGSRGRLFGLPRQQLGETGVRGDRRAAASMRAGRAAQMESAATRRGSLVVVEAGRSPNRPGSRRMAGGRSATGANTRLWRRGPPGRAPVGDGRSSPWSPANGVFLSDQSAPSFHKMAGSSQTRKQHCITGEIPRHLQLDDIDTGTRPILRVQQSDKRVVIPLSNLPRSYIWQQRSTSSSGHGRHGSWSPGQAMAEQGAEGSMAALRRGDALGAEDAVGATRRRGPDDAGRGPRRRGRRRSGGDRIREGDQIREKGERKERGGREREEEEGEEKG

SEQ ID NO: 178612 - protein, 68 aa, Oryza sativa
  Clone ID: PAT_MRT4530_76150C.1.pep
MEAARVEGVRGEGREERCEGGVREECLRTEAGEVGGDVCGGDVVMVAGVGQEETMVCHRDGELTVRTH

SEQ ID NO: 178613 - protein, 70 aa, Oryza sativa
  Clone ID: PAT_MRT4530_76151C.1.pep
MASVTGSEIGGTHRDTRTRETECRQPLREPKDNKQRHGNHDHTPIREDPTRITTNSRVDGLDLSPSLPGR

SEQ ID NO: 178614 - protein, 109 aa, Oryza sativa
  unsure (1)..(109): unsure at all Xaa locations
  Clone ID: PAT_MRT4530_76152C.1.pep
LAIASAVAAPLLCRHWPREIEARLVHPARPAVRRLSSPSAVVFSHAXESLVRTPSPSFTPPSPCAPPPLGASPPPVRAAASAVCHRLLAGHRRLSHRRSPLSMAARRCR

SEQ ID NO: 178615 - protein, 439 aa, Oryza sativa
  Clone ID: PAT_MRT4530_76153C.1.pep
MGAREEVREEEGEEGEGVGGKEEEKAAAAAAAVSCSICLDAVVAAGGERSTARLQCGHEFHLDCIGSAFNAKGVMQCPNCRKIEKGNWLYANGSRPTQDVNMDEWAHDEDLYDVSYSEMPFRFHWCPFGRLAQLPSFFEEGESSPPVTFHDFMGQHMFTEHVAAVSSAPGAAHPCPYVAYLHPLPSLASSSSSHVPERTMDGPAYHDPWHPLAGPSDGRPLQSVQPADFHHNHWAHVPNSYPQPNNNNGVAEQQGVPFGTTRAARVDGDTQRRGSSISPSYFSNGSGSRSRAPNVPPMVPQFMRAHGSISEQYQQSSSSSLFAGAHRSGGMRTAPPPPLPENPAFCLFPPGSSGHNSMETDDAGGNRFYAWERDRFAPYPLMPVDCETNWWSSQQSHGTSEPAPAPRRLFGQWIGVGRSSPENRSPEGSSYRQMHTPRM

SEQ ID NO: 178616 - protein, 86 aa, Oryza sativa
  unsure (1)..(86): unsure at all Xaa locations
  Clone ID: PAT_MRT4530_76154C.1.pep
HEEKERERDRRTPSSSSSLCSTFASPRAASLGRRLAXSSPRKAYRVRASSRXYDKYSKNDIIRSTPIPFYSANFSKLWRAGKKLWR

SEQ ID NO: 178617 - protein, 123 aa, Oryza sativa
  Clone ID: PAT_MRT4530_76155C.1.pep
TDGDLYGCRPNDLLMGRPIPTSTSAGSRRDVGTWLFADDMASVRPVTNRSFLSTTRQFINLHVRPSSYNILPVMVRMKPGIYLTRTNVPSLGGNTLAPAGDERLEALVLTGWGEACVRSPVAT

SEQ ID NO: 178618 - protein, 206 aa, Oryza sativa
  unsure (1)..(206): unsure at all Xaa locations
  Clone ID: PAT_MRT4530_76156C.1.pep
NTLDFSLSLCKIKGVFDYYSVMNNWAXRLLVVLFGIYSRSGFEDDWIYRXELQVLSFYXPVRPGCVCRLELMHVVDGDSIWHTMELLCAYGMRTRIWKESKFGMIGYVKFVSCTRGFPKVFRTPSMSLVRGFRLPTSCINRGGASDRRHTGGQTGGNAVXRPAATAXRGRRLRRFDRSXSTSVRPMFIRRSDRRNIFGQTAIHRFR

SEQ ID NO: 178619 - protein, 123 aa, Oryza sativa
  Clone ID: PAT_MRT4530_76157C.1.pep
MDGDLHGCPPNDLLTGRPIPTSTSAEGRRVVGTWLSADDMISVRPVTSRSFLSTMRQLSNMHVCPSSHNILLVMVRMKPGIYPTGANVPSLGGNTLAPAGDECLEALVLTGWGEACVRPPVAT

SEQ ID NO: 178620 - protein, 655 aa, Oryza sativa
  unsure (1)..(655): unsure at all Xaa locations
  Clone ID: PAT_MRT4530_76158C.1.pep
YQEYFERVSLPNRYKVPYFSKILGQDNVTTYEHVSRFMAQCGEASATDALXVRLFPLSLSGSAFTWFSALPHNSVHTWADLEKQFHKYIYSGIHEMKFSNLTSIRQKHDESVQDYIQRFRDMRNRCFSLALTDSQLADLAFQGLLAPIREKFAAQEFKSLAHLAQKVTTHEQRFLEARKPYKKVNNVNTYLSEIEEEEDPEVATADWARNKRVVTCQWVKDSGKEEKYDFDITKADKIFNPLLREKQIHLPTSHVIPSATELGKRKYYKWHNTESCKVFRKQIQSAIEQGRINFDDPKKSMEINGNPFPVNMVYTSKGAADRRGYRPNAAMIISKYQRKLERQKEESYEDSDEGMRLPSKQNCPGXSEIDEDHNGSPSGFHPRKXNRLMQRKLPVHQRFGPLHQDLVQREGKEDESRKQQXCPLGIFTKNQKRRVQRTKQEWRGKSKVAPADEVEADKAKRVAKGKTVESSSVNMVFVLLAKYCAEPAGAEIMEESLAKLVMSPEQAVFEKPEETEHRHLKPLYVKGFVNGKPMSKMLVNGGATVNLMPYATFRKLAKNAKDLIKTNMVLKDFGGNPSEAKDVLNVELTVGSKTIPTTFFVIDGKGSYSLLLGRDWIHANCCIHXTMHQSLIQWISEDIQSYIQPIGSEEPQLLL

SEQ ID NO: 178621 - protein, 109 aa, Oryza sativa
  Clone ID: PAT_MRT4530_76159C.1.pep
MWKARETGNTQDTGDVYRFGPLRSPIPTSTSAGSRRDVELWLSADDMTGIRPVTSVILVHHAMKPGIYLTRTNVPSLGGNTLAPAGDERLEALVLTGWGEACVRSPVAT

SEQ ID NO: 178622 - protein, 259 aa, Oryza sativa
  Clone ID: PAT_MRT4530_7615C.1.pep
MAIGLLAWVIKAIDKKHRAFLWTGTDSAHGHPYWDSLKAPAERAVSDMFEASTFFVPGDANNAWISDIRGALIVPVISQFLLVWDARCWTADLLQKRGIDSHSACPFCAQELETANHILLDCVFAHQKESTHYGGPSSDLDEDLLPHQYDEGDRQWLRLKGDDGNKLREINDVAEARQTESPKDVADSGEAVRKGSPRGSLPSWMLRRPPEVAHNKNPLMVAKLLEPTKECVQECILPFAPSAKPSGCQQMNWMDDAAA

SEQ ID NO: 178623 - protein, 106 aa, Oryza sativa
  unsure (1)..(106): unsure at all Xaa locations
  Clone ID: PAT_MRT4530_76160C.1.pep
PIPTSTXAGSRCNVGTWLSADDMTSVRPVTNRSFLSTTCQSSNLHVRPSSYNILLVMVGMKPGIYLTGTNVPSPGANTPASARDECSEALILTGWGEACVRPPVAT

SEQ ID NO: 178624 - protein, 49 aa, Oryza sativa
  Clone ID: PAT_MRT4530_76161C.1.pep
MVERLRRRRPSVFPSDAHPGNAAGCGGAPVCRLAAPGIPVCSGLGEARD

SEQ ID NO: 178625 - protein, 671 aa, Oryza sativa
  unsure (1)..(671): unsure at all Xaa locations
  Clone ID: PAT_MRT4530_76162C.1.pep
MVHAKDSDEIFVDSTCSDSKSSENDDVISDSEDSKTSCDEISKEELLRSLKLKLNKKKVSVDCNLKRKRSETADVDFKNQLDSALLEIFRDNVLIXLALWIAQKVDVNSCDIIVRDKXTPRIKVWKGTMXKKFSKFDKISKEVYGKRPIKDFSESCYKMIETGTAKATFLQRLDSAIGVDLPQEIKKDINELLLHHLGPDENCIDDRVKNLLIDIFVLLSNASKPSVPDNTDFNPSEDDKNKLNDGSIINEANICETPKSPMLCKDTKTPERSCSEKDKNFDVDGIMRKLCKPGMISSPPKITKARFVGFNERKPIYFDHEKPQFQIWDSDDNLRSEVTPRHGLKSSKIVPDSYSPACPTELNKTKIIPLDLSQNLYDLSQNQENNSENKDQLIMVTLEDSETQSQHNEKENLPVQQQYTKSTENKKDSLEVVFLGERQSTENCLDITSKTNVLYNKINTFIVNPDKKLKMCTASPERVLLCNVDRNVGQCSSSQKPQHDLRRILQPARYSTDPYSLERQSFCVTAYDRQVYNVVCKISKSSFQDKVAVDIDGVHYKFFTFGDSFKPGGDLSNFVTSVFYRYMFRLSHPSKSKKHYFFSSIGDDLLKERSATNFSVVKKCFDGASLARPVHSCDLLFFPIVKNRHWFVFAIDLKAQRFDYGIFTLKFMEVC

SEQ ID NO: 178626 - protein, 113 aa, Oryza sativa
  Clone ID: PAT_MRT4530_76163C.1.pep
MWISPGTSPDPSHLRTRTWARAPQDGPEATAGRPRLSSSDPEVVGTEDECTPRGRLDKERPRDVAPSEEDRPHRKVQRPVYFVSEALRDAKTRYPQAQKMLYAILMASRKLRH

SEQ ID NO: 178627 - protein, 998 aa, Oryza sativa
  Clone ID: PAT_MRT4530_76164C.1.pep
MDDVRRLDGVDQDLLLCVEDDVVATTTSDDGAWADDLEERAENLERENAFRRGEQRATTISSSSTEGHFAAAAILAERCEGDSLMVHAKDSDEIFVDSTSSYSQSSENDDVISDSEDSKTSCDEISKEELLRSLKLKLNKKKVSVDCNLKRKRSETTEVDFKNQLDSALLEIFRDNVLIGMKRKLYCHKSKKKSVMTDATEETKLTRFSVKLALWIAQKVDVNSCDIIVRDKVIPLSKESVHIVLGLPVGGLPISSNSEIGKQKILDTFGLSSLPTVKFFGDKLIRNESMSDDQVLISFMMVSLNCFLCPNSSIQPSTKYLSAFADLTSIDKLDWSNLVFEWLMKHLSKLEKSKSFGGCLYYLVVNYLDFLNFGMRKVLQDTPRIKVWKGTMIKKFSKFDKISKGVYGKRPIKDFSESCYKMIETGTAKATFLQRLDSAIGVDLPQEIKKDINELLLHHLGPDENCIDDRVKNLLIDIFDLLSNASKPSVPDNTDFNPSEDDKNKLNDGSIINEANICETPKIHSTCDDNAILNEQSPMLCKDTKTPERSCSEKDKNSDVDGIMRKLCKPGMISSPPKITKARFVGFNERKPIYFDHEKPQFQIWDSDDDNINQEDNLRSEVTPRHGLKSSKIVPDSYSPACPTELNKTKIIPLDLSQNLYDLSQNQENNSENEDQLIMVTLEDSETQSQHNEKENLPVQQQYTKTTENKKDSPEVVFLGERQSTENCLDITSKTNVLYNKINTFIVNPDKKLKMCTASPERVLLCNVDRNVGQCSSSQKPQHDLRRILQPARYSTDPYSPEKQSFCVTAYDRQLYNAVCKISKSSFQDKVVVDIDGVHCKFFTFGDSFKPGGELSNFDDLLKERSATNFSVVKKCFDGASLARPVHSCDLLFFPIVKNRHWFVFAIDLKAQRFVFLDSMYDEDSIYHQQIRPKLISNFSLAWNLYVKDHPIDFNNYTVIYPPVPKQTNRFDYGIFTLKFTETFTNYWMITSEGVLKI

SEQ ID NO: 178628 - protein, 122 aa, Oryza sativa
  Clone ID: PAT_MRT4530_76165C.1.pep
MAGRRSRRRGKRDQLGAPHRETAQAPLCRFGRGPWVRAAEKRRPIPTSTSAGSRRDVGTWLSADDMTIVRPVTNRMKPGIYLTGTNVPSPGANTPAPARDECLEALVLTGWGEACVRPPVAT

SEQ ID NO: 178629 - protein, 959 aa, Oryza sativa
  Clone ID: PAT_MRT4530_76166C.1.pep
MVHTKDSDEIFVDSTSSDSKSSENDDVISDSEDSKTSCDEISKEELLRSLKLKLNKKKVSVDCNLKRKRSETAEVDFKNQLDSALLEIFRDNVLIGMKRKLHCHKSKKKSVMIDATEETKLTRFSVKYFSEVLEKLSKRHRDIIFKSCFKTLLLFEKCSVPYRLALWIAQKVDVNSCDIIVQDKVIPLSKESVHIVLGLPVGGLPISSNYEIGKQKILDTFGLSSLPTVNFFGDKLIKNESMSDDQVLISFMMVSSNCFLCPNSSLQPSTKYLSAFADLTSIDKLDWSNLVFEWLMKHLSKLEKSKSFGGCLYYLVVNYLDFLNFGMRKVLQDTPRIKVWKGTMIKKFSKFDKISKGVYGRRPIKDFSESCYKMIETGTAKATFLQRLDSAIGVDLPQEIKKDINELLLHHLGPDENCIDDRVKNLLIDIFVLLSNASKPSVPDNTDFNPSEDDKNKLNDGSIINEANICETPKIHSTCDDNAILNEQSPMLCKDTKTTERSCSEMDKNSDVDGIMRKLCKPGMISSPPKITKARFVGFNERKPIYFDHEKPQFQIWDSDDDNINQEDNLRFEVTPRHGLKSSKIVPDSYSPACPTELNKTKIIPLDLSQNLYDLSQNQENNSENEDQLIMVTLEDSKTQSQHNEKENLPVQQQYTKSTENKKDSPEVVFLGERQSTENCLDITSKTNVLYNKINTFIVNPDKKLKMCTASPERVLLCNVDRNVGQCCSSQKPQHDLRRILQPARYSTDPYSPERQSFCATAYDRQVYNAVCKISKISFQDKVAVDIDGVHCKFFTFGDSFKPGGELSNFVMSVFCRNMFRLSHPSKSKKHYFFSSIGERSATNFSVVKKCFDGASLARPVHSCDLLFFPIVKNRHWFVFAIDLKAQRFVFLDSMYDEDSICHQQIRPKLISNFSLAWNLYVKDHPIDFNNYTVIYPPVPKQTNRFDCGIFTLKFMEVC

SEQ ID NO: 178630 - protein, 83 aa, Oryza sativa
  unsure (1)..(83): unsure at all Xaa locations
  Clone ID: PAT_MRT4530_76167C.1.pep
MGRGVRQIACRHLTRDLTETHEGSGRLGPRGRGGCGPTPSGXTKRRANASPSGPTSXGVPGHVCDCVCLKPLVMILLIPCHRQ

SEQ ID NO: 178631 - protein, 60 aa, Oryza sativa
  Clone ID: PAT_MRT4530_76168C.1.pep
SISPSRYNRIYILFSKTSMVLVSGKSATTHHHYHVGPPNSEVDGLLSLPNLKPSNRKNFF

SEQ ID NO: 178632 - protein, 204 aa, Oryza sativa
  unsure (1)..(204): unsure at all Xaa locations
  Clone ID: PAT_MRT4530_76169C.1.pep
CKIKGVFXYYSVMNNWHWRLXVLLFGINSRSGFGDDWILQVNRMFCYFMXPVRPGSGSQLELMHVVDRDSIWHTMELLCAYGMRSRIWKESKFGMIGYVKFVSCTRGFPKVFRTPSMSLVRGFRLPTSGINRGGASNRRHTGGQTGGIAAVRPAGLRRSDRRRRQRAAADLGGQTGDSTPVRPAASTRSDRQINFSQTDFRRFR

SEQ ID NO: 178633 - protein, 203 aa, Oryza sativa
  Clone ID: PAT_MRT4530_76170C.1.pep
MRASLIYKIPLDLPEDTGSENHHRQMRKSQCDALSSMTSELEPRCAPPPQGKRDLRAKTDCNKEMRNLVHHLVHLARRCPAYHKPPPTPHCCRRCLTLEHARRMWVGGEDDQSANAHGPLDLTEVRETGSTQDAGDVYRFGPLRSTGHKSVILVHHVMKPGIHLTGTNVPSPGANTPAPARDECLEALVLTGWGEACVRPPTG

SEQ ID NO: 178634 - protein, 640 aa, Oryza sativa
  Clone ID: PAT_MRT4530_76171C.1.pep
MHGGASFAAAGEDAGDAVLLEITDASFIAGEADPSPPPPVSVDDLAGLDPLPYPTIWVRADRTRQALAAPSSPDSPANELLANRELLLLPRPPRRQLQGGLFLAAENLLTECERWFRTMSSQSSSLLAPLDFLIDTWYFAQEHGINYVQDICPGYLAQNFVQVISRRSFVKLPYDLLYSTIECPFLTVDRFKSIFLFKPVLQVRICLLPLEFAAGTKRNWAEFGSKVESRILNLLKDSLRTVLDAIADDNLESYRVRITEYSKIMHFVALLTDEDFVLQKIVLSGCPQITTEILYISVLPPTNVGASLNKSYGFGYKKSCNHSIQTLCNSNPLDSMDECRHVMAFRMQELHLDGCKGIGYAAMSQLMSNVNITNFLCLRETTLTDGALCNFVGSSLEFLDISETVVSMVSLAPVIRRNSNLRCLKAAGCRNLLFEHGEVEAMSGGNIYGDFLQEITSTCCLEDVEMGWAFCPIRVTTLIPSFSKVRKMTIGLGTTLPENILCALPDICPFLESLVLRFQMISDKVVRNLLKSSTKLRVLCLYSCLGNLTSFSFQIKAPLLRILRLEWITPWMTNDDLAVLIQNYNLVELSLSGCKLLDSNSQELISSGWPNLTCLHLEFLFKPKFQGFSAVISVATLLNK

SEQ ID NO: 178635 - protein, 472 aa, Oryza sativa
  Clone ID: PAT_MRT4530_76172C.1.pep
MEGRERRRSMSSSSSGRRTPELERERWAPWSPAPTWSRPLSVGGGGSRAASLKSLFRTIGLWFSSLSTSSSSSSSAAATSASGSNAKRRSRREPNDLIKKPPLPGPGSDQGKASMRGLYNSSRGRGIATQFQSSVFSMEEILRATNNFSPALKVGQGGFGAVYRGVLPDGTLVAVKRAKLRDQNPHVDVEFRSEVKAMARIEHQSLVRFYGYLECGQERVIVVEFVPNGTLREHLDRCNGRFLDMGARLEIAIDVAHAVTYLHMYADHPIIHRDIKSSNVLLTPSLRAKVGDFGFARLGVGEAGAADGVTHVTTQVKGTAGYLDPEYLKTCQLTDRSDVYSFGVLLLEIASGRRPIEARREMRERLTARWAMRKLAEGAAADVLDPHLPRTPATARAAEMVMELAFRCLAPVRQERPSMGECCRALWAVRKTYRDMVVAAAGDETPLSSISDRASSSSAGTGGDRSGELWRN

SEQ ID NO: 178636 - protein, 87 aa, Oryza sativa
  Clone ID: PAT_MRT4530_76173C.1.pep
FLTQQCHKILLIYIIIHGTKSIFYKKIPSLFFFPPSEPCHAITTLWPSFALSFFHPNFLGPPLPLPLLPSFNLNLTRIIYGDTFDIF

SEQ ID NO: 178637 - protein, 291 aa, Oryza sativa
  Clone ID: PAT_MRT4530_76174C.1.pep
MADFSPHHSLLLKATAAGAAIATTNDPNISSFFLYNHSHGSQAPQPANAAAAAIVEDASLESSVSAVLDTSPSVDRKRKAAEDSAHSKDSCKDGKSRRGKKASKEVEEKSTTEDEPPKGYIHVRARRGQATDSHSLAERVRRERISERMRMLQALVPGCDKVTGKALILDEIINYVQSLQNQVEFLSMRIASMSPVLYGFGMDSDGLHDQKIGGMFQEALAMPNPVLNQSSPAPSQAIMDTTSTTSYSLQSQHGAISFSQDNGSYLMQAVGEPRQQEMLNQLVFNNMCSFQ

SEQ ID NO: 178638 - protein, 139 aa, Oryza sativa
  unsure (1)..(139): unsure at all Xaa locations
  Clone ID: PAT_MRT4530_76175C.1.pep
GNXPXPGGHXAPXXPPXXKTKXXFXGQXXGPXXXXLKXGXXXSXGPPPPXKXXXLXXXPGXXXXQXHAPAPXXGXXCCCCRRCRRGXARRWPSXXXRLPWSPXQAXXPPXXGLFTKXTRESKCSILLLDKGYRSXGVXI

SEQ ID NO: 178639 - protein, 151 aa, Oryza sativa
  Clone ID: PAT_MRT4530_76176C.1.pep
MAISPVGSGSGVVSTLAGVRARAAIGPEERAGAASRRPGGARKPPATRPSPFFLHAAVSRAAERKRGPFQPNPPQTRPIAIPTWVSLRISNEGNAAVAVTAAAAAAAARFDTSTEKNTAATGSSSPSTVFDPDRMSKRRVRRGSDPIHNKC

SEQ ID NO: 178640 - protein, 109 aa, Oryza sativa
  unsure (1)..(109): unsure at all Xaa locations
  Clone ID: PAT_MRT4530_76177C.1.pep
TSKYSANFLSHRGQHASAPLHLALXSVPPALQSPSRLSPNPSCLHTVADGQHGKQRTSGGPSARRAACGRXASRRPGGARKPPATRPSPFFLHAAVSRAAERKRGEPAS

SEQ ID NO: 178641 - protein, 236 aa, Oryza sativa
  unsure (1)..(236): unsure at all Xaa locations
  Clone ID: PAT_MRT4530_76178C.1.pep
GSGRAKPARRHRQHIRRLAAGRATAKVGARGAGRRWLKAAGTKSVEGTCGGGGDVGGGEGVGXEARMATTRWLGIQQQRLRWWGGRLGVRGAGGGDEGRLGARGAADGGRLDWRERRVXWRRPAWRXERRGRRWRRRPRCEEELPMGVARSSAHEGWPAGDAGAGVPHIGKTCVVVEHXCVSRGFTGGERRVKTQSSLGRTDNDGXSLLLRALLXCLTPQGCLPGWACHRRATAYG

SEQ ID NO: 178642 - protein, 140 aa, Oryza sativa
  unsure (1)..(140): unsure at all Xaa locations
  Clone ID: PAT_MRT4530_76179C.1.pep
MSLPNPARTGAAFPQIRDRHLLTVKFACFLTVNKGFIGVSADELSGCCIGLQGLHPIGFYWTILLLXSYYHQPIVFILVFTSSVRLHIKHLVDSSKPYCYRLDQTDWHAHTSSIFGPALELSRSPRPVCVFCVNTIPSRC

SEQ ID NO: 178643 - protein, 270 aa, Oryza sativa
  unsure (1)..(270): unsure at all Xaa locations
  Clone ID: PAT_MRT4530_7617C.1.pep
SSLAWQNNAWISNIRGTLTVPVISQFLLVWDWVLHIQLTPGVGDRLVWHWTSDQRYSARSAYQAFFFDQHSFACADLLWHAKGPAKCKFFLWFAFQQRCWTADLLQKRGIDSHSACPFCAQELETANHILLDCMFARQVXLRVLSSPGWAALSPLRGSWLQDWWPSSRACLPDHLCNRGPSLILIVPEVRLAKPNHAPRAQPKTILGFLNRGGDDVTCLARFPKRRLQLPRRADLPKLQRLHDQRKRKGFYSTKLHITSRNKAQKWGLDF

SEQ ID NO: 178644 - protein, 87 aa, Oryza sativa
  Clone ID: PAT_MRT4530_76180C.1.pep
TLLSHRRTFHGGDKTLPRRGSGTGGRASTIPIPRHSKGTGDEKRLRIQIGSSSCGAAASLPRISPPTAAHRPERSGQTLKKPSSMLP

SEQ ID NO: 178645 - protein, 82 aa, Oryza sativa
  Clone ID: PAT_MRT4530_76181C.1.pep
MAELELGMRRYIGEETESMRIYRLGFGARVLRVTAGPVARHGLPLNGRFRLRAAGFLLLVPRTRRDRETLPYARASIAAAGW

SEQ ID NO: 178646 - protein, 626 aa, Oryza sativa
  unsure (1)..(626): unsure at all Xaa locations
  Clone ID: PAT_MRT4530_76182C.1.pep
MPPHLSSSLFSSSPLPTALLSSLTRRARALLPLPLPLPAASTRRRLPLRRGPLLTRGIMASAAAEAPAPSPSPTAAANSRPRRVLEELSWDDSFVREXPGDPRSDAIPREVLHACYTKVSPSAPVDNPKLVAWSQSVADILDLDHKEFERPDFPQLFSGANPLVGSSPYAQCYGGHQFGSWAGQLGDGRAITLGEVINSRGERWELQLKGCGKTPYSRFADGLAVLRSSIREFLCSEAMHGLGIPTTRALCLVETGKSVVRDMFYDGNSKEEPGAIVCRVAPSFLRFGSYQIHATRDKEDLEIVRHLADYTIRHHYPHLENIKKSEGLSFEAAIGDSPAIDLTSNKYAAWAVEVAERTAFLIARWQGVGFTHGVLNTDNMSVLGLTIDYGPFGFLDAFDPSYTPNTTDLPGKRYCFANQPDVGLWNIAQFTSPLTAAELISKDEANYVMERYGTKFMDEYQSIMTRKLGLPKYNKQLIGKLLNNLAVDKVDYTNFFRLLSNVKADHNIPEKELLVPLKAALLDIGPERKEAWISWVQTYIEELVSSGVPDEERKAAMNSVNPKYVLRNYLCQTAIDAAEQGDYDEVRRLLKVMEHPYDEQPGMEKYARLPPAWAYRPGVCMLSCSS

SEQ ID NO: 178647 - protein, 86 aa, Oryza sativa
  Clone ID: PAT_MRT4530_76183C.1.pep
MGPYKDTVDWLPTLLLYGKTAGRRSRAKPEQRALPTKFLGLAQAKSTARLAFQNGQIVLPGHGPRLGPTGSLRAPRAPMLLDGKSS

SEQ ID NO: 178648 - protein, 110 aa, Oryza sativa
  unsure (1)..(110): unsure at all Xaa locations
  Clone ID: PAT_MRT4530_76184C.1.pep
XXHXGVFXVGXALXKXTGAKRXPXXXYXTXGXXAMXMXXXVFGSXPXXXXHNXVSXKXGXXXDPXFRGDEIXXXXCRXEVXXESIPXSQSHLFRLTXLSLLXXGXNLYXL

SEQ ID NO: 178649 - protein, 82 aa, Oryza sativa
  Clone ID: PAT_MRT4530_76185C.1.pep
MPPGYKNFSEELLACFLVDRLDDYFARKNKIHDKRVKPILELRGFARSTRRKAMPSTGSPTTRTKQPLELRRRDGGGVDEGS

SEQ ID NO: 178650 - protein, 63 aa, Oryza sativa
  Clone ID: PAT_MRT4530_76186C.1.pep
AHASGRTILEVWVDFPSVQMPFDWLWHLTPPLKKGAFSISYSPLAKPIQFHWTVTLGSWRPPF

SEQ ID NO: 178651 - protein, 50 aa, Oryza sativa
  unsure (1)..(50): unsure at all Xaa locations
  Clone ID: PAT_MRT4530_76187C.1.pep
KXYIRGLGQDLLKGTSSGKKVQDNYWVGFRRESRGSVIPSSXXVTMASAA

SEQ ID NO: 178652 - protein, 71 aa, Oryza sativa
  Clone ID: PAT_MRT4530_76188C.1.pep
GTKVASPSEVNFKNVFPVVMSSFVFSLAVCIKAGLKSVKEVLYRVSLLICERDFSRILVIIKLKLYFHFFP

SEQ ID NO: 178653 - protein, 742 aa, Oryza sativa
  Clone ID: PAT_MRT4530_76189C.1.pep
MRAREMHPLCCLVSDCALGEGAGGGGGKGEGGDCSPTKPPVGEKKKVVPVAGVLYKWTNIGKGWRPRWFAIRGGVLAYSKIRRRVAAEPPPEAAAAAAANGVRLIGVPRGGVGDQPIGFVPLKISSFSESKSDDKRFYIITPTKTLQLRTGSAKDRVAWIEALVSARSEYSLNGGVPCDQNEGSFSTEKLRNRLHAEGVGEATIKDCEQIIHSEFSQYHTQMKQRCEDYLNFIGSLPRELEVVNSGDASAIEKPQSELFKHDCSSSGKCSEYSNTESSDDAGKQEVGQLSDEDEFHFYDTRQSFSDTAASPDLKMRCSNSGSGAHKFGELLAIDKTNEYLLSSSKRRSELPVPIEKEKGVSLWSMIKDNVGKDLTRVCLPVYFNEPLSSLQKCFEDLEYSNLLDRAYEYGSRGNGLMRILYVAAFAVSGYASTDSRPCKPFNPLLGETYEADYPEKGIRFFSEKVSHHPMVMACHCEGKGWKFWGDSNLKSKFWGQSIQLDPSGVLTLQFDDGETFQWSKVTTTINNLIIGRVYCHHHGTMNISGNRQYSCKLTFKEQSFLDRNPRQVQGLVTDANGTKVAFLMGKWDESMSCIIGDDASKVNSRNANQSTGATLLWEKNVPPANPTRYNLSSFAITLNELTPGLKEKLPPTDSRLRPDQRHLENGEYEKANSEKLRLETRQRMARKMQESGWKPRWFQRDTEDGTFRYVGGYWEAREQRKWVGCNDIFGNNVSTLCTSASI

SEQ ID NO: 178654 - protein, 60 aa, Oryza sativa
  Clone ID: PAT_MRT4530_7618C.1.pep
MDGRNMELCLQKKKKKKKKKKKKKKKKKKKKKKKKKKKKKKKKKKKKKKKKKKKKKGGPF

SEQ ID NO: 178655 - protein, 162 aa, Oryza sativa
  unsure (1)..(162): unsure at all Xaa locations
  Clone ID: PAT_MRT4530_76190C.1.pep
MKKLQSANLYRCHPNHLLTGRPIPTSTSTGSRRDVGXWLSADDMTIVRPVTNRMKPGIYLTGTNVSSPGGNTPAPARDECLEALVLTGRGEAGFGGNTAVRPIGDSEAPTSSITGAFVWPCGDGIDPGPCNDKMMMRAVQNWNIESSTIDAGKSFNSFFRFS

SEQ ID NO: 178656 - protein, 135 aa, Oryza sativa
  Clone ID: PAT_MRT4530_76191C.1.pep
AAAQRGAVGREARDGQARTGSLRWPGEEGGGARRPGERRGRSRRPGEQGGGARRPGKEGGSARRPGEEGGGTRRPGEEGGGAHRPGEEGGLRPGCDHRGRRRRRPGEEGGPALGDRARRGGAVLLGIAGGAADGV

SEQ ID NO: 178657 - protein, 59 aa, Oryza sativa
  Clone ID: PAT_MRT4530_76192C.1.pep
HGAPGGAVAEQLRQVCFRQLDTVNDSWYRCLTINHMVGGMTEELGAWYGMHPIDKVLRT

SEQ ID NO: 178658 - protein, 190 aa, Oryza sativa
  Clone ID: PAT_MRT4530_76193C.1.pep
MAGVAALQGAMASLSISAPGAASTSSFWGHPLSTFAAAPAGVKFMIKTCPIQMRLKRWERKKCKPNSLPVLHKMHVRIGDTVQVIAGREKGKVGEVTRLFKHNSTVIVKDLNLKSKHKKGTEDEPGEIVMIEGPIHSSNVMLYSKEKNVASRVGHKFLEDGTKVRYLVKTGEIIDSAENWVKVFKEGSSE

SEQ ID NO: 178659 - protein, 109 aa, Oryza sativa
  Clone ID: PAT_MRT4530_76194C.1.pep
MGRPAPTSTFAGSRRDAESWLSADDMTGVRLVTNRSFLSTTRQLSNLHVGPSSHNILPVMVRVKPGIYLTRTNVPSLGGNTLAPAGDERLEALVLTGWGEACVRPPVAT

SEQ ID NO: 178660 - protein, 141 aa, Oryza sativa
  unsure (1)..(141): unsure at all Xaa locations
  Clone ID: PAT_MRT4530_76195C.1.pep
GFSDNELLDDFSXGEIQPNQIGTIIVIDNLIYRDHPSLKLRGVPKDVRSHDIEQVRNKEQLSTRVGCGRVHHIIENDLDKCRVVEPNLPRKTDDLSHSTGHGWTTREKWSSYDYYLVLDQRKIIFDIDEGSMSLWFYTKID

SEQ ID NO: 178661 - protein, 101 aa, Oryza sativa
  Clone ID: PAT_MRT4530_76196C.1.pep
HASSGWRRVPRGSRLDGTGRGVRQTASRHLTLDLTDFFKGSGCLGPRGRGKRNPTPPSGEIRRRADTSPSGPTSPKVPGHVGDCVCLKPLVMILPVPYHRH

SEQ ID NO: 178662 - protein, 671 aa, Oryza sativa
  Clone ID: PAT_MRT4530_76197C.1.pep
MANYIWSLSVVRLGLRVKAYLSTNRSRGLTKENQVVLDYIEHEPPSSTGVRSCKGNYDPETMKEYIYLVDGKEVEKVEFGQQVKQVAYGVPETVDVEKVWQCKGKLLKLSDGRRDQGVARRRDLCLSFALFKMLRLRFAVDHVGRFALPFQEGKSWDFVVKGLLADDQDLDRAYRVVEAELGFLFDFFYARYPSIKNSLAPDLAVYVAILTTSLFTLFSPDLLRYRPLRPGPGDGGDASNIIIHGFNLDLLVTRLVIVWYIFLESYQFFTFIFSDWHKVKMMCRYVRNESWHRALMEVPLKVLCHFSTITRYWKGTIGQYFLLDNIHPHWIKTFLSWFSIEAKALDSWLMTRSIRLTPEVSHAVLRELKNCNGNITDGRMWLYQKGIIDMDLDRDVLLGNPYANYILKWHIATSICDYGLSMENGATTTDDEFARNHEVAMKLSGYCAYLLAFQPELVQDNTYRSTSTVQGTLQNARDFLGGCKSHGEKYKKLIELGRSKIVMDHEMAQKSKDIIYSYDSDEEKVKKMIELDNSTSNDTVNVLKILSQGASVAVYLVDRIEDTRERWKVLAAFWANLMLYISPSDRAVAHATRMATGGEFITILWALLTHAHVVDPLQSRGGNSGLHMQLEEEERRRPLIEEQEMELVTRRKLREEQERNMQMQGQPPIQP

SEQ ID NO: 178663 - protein, 81 aa, Oryza sativa
  unsure (1)..(81): unsure at all Xaa locations
  Clone ID: PAT_MRT4530_76198C.1.pep
RGTLTETAATWKHIRSMAAAVARIGGSTHQEGAEQEWRWTAMAELAATAXQRLGWLNRYPDEDRTAHIDLIPGSLSGLRLL

SEQ ID NO: 178664 - protein, 215 aa, Oryza sativa
  unsure (1)..(215): unsure at all Xaa locations
  Clone ID: PAT_MRT4530_76199C.1.pep
GLRQRREAARGGFQFGGSEKLVQPKPANRGGRKITDKSPALGCKIKVCFDSYSVMNNWHLXLLVLIFGDYRRSGFGDNQFSGDDXDSLLFYXPVRPGGVYRLELMHVVGEDSIWHTMEVLCAYGMRSRIWKESKFGTIGYVKFVSCTIGFPKMFRTLSMSLVRGFRLPTLCINRGGARGRQSSGGWTGGSTPVRPAARARSDWRINLSQTDLHRI

SEQ ID NO: 178665 - protein, 327 aa, Oryza sativa
  unsure (1)..(327): unsure at all Xaa locations
  Clone ID: PAT_MRT4530_7619C.1.pep
TFLLPGGFLPLNDRALRHRASXSLYVDDLVLFLSSVRQDLEFIQGILSVFGAASRFRTNFAECSVTPIRCSVEDLELVQSCFPYSISDFPCSYLGIPLSVRKLPKAALQPLVDKVIKAIDKKRRAFLWTGTDSAHGGQCRVSWMNRSGHPYWDGLKAPAERAVSNMFEEFTFFVPGDGESILFWSDQWICGHSVASLAPDLLFIVPPRLRGSRTVASGLANNAWISDICGALTVLVIFQFLLVWDAVLHIQLTPGVGDHLVWRWTSEXRYSARSAYQAFFFGXHSFACADLLWHAKGPAKCKFFLWFAFQXCYWTTDLLQKRGIDSH

SEQ ID NO: 178666 - protein, 111 aa, Oryza sativa
  Clone ID: PAT_MRT4530_761C.1.pep
ACCGLFAWVKRGIGVPQSEGMADYRHLDRSSACSHVSWIEPRQYLSLLPYFMYCVMLKHMSPLRSSYLVEFVGSVPKLKASRRGDRGGRGGGPAARQCGRRGNAVVAAATR

SEQ ID NO: 178667 - protein, 519 aa, Oryza sativa
  unsure (1)..(519): unsure at all Xaa locations
  Clone ID: PAT_MRT4530_76200C.1.pep
MAVPRSAGLGAVGGWLICKKMSSHGFSTKGGDAGSKLPSTVTTLNPNAAEFVPSTFRSPFGSRTVADVSKPDFRGLSGKTNLGRSESSKSNNSDDETHQFWHRQLPDDIIPDFSDMEKVEQQHGELSFSGLSLNAPPFFGTAASNLSREHHGLLSQAGKNLDLGHNDLYYDENSGSNSGKQNHADNLCYTNGKLDLLYDHDPLEYLASQFPGFSVESLAELYCANGCDFDLTVEILTQLEMQVDASSCQNLNLAPNTPNIGTGNFPVLPGTEDLNCLFEGNVGAHGITNRHNSSTMSRTGDFVSAIQRLALQDAGHMKFKNESPKYANGLLSIVARKQYGCDTRSSLGNKFLKASSNVHSAPVSLKTGDAMASMCSESRGEAGDFARIRNTCFEQATQAYMMGNKALAKELSMKGQLYNLQMKAAHETAREAIYQQRNPFSSEQGQDRLIDLHGLQVSEAIQVVKAELALLMGATRSXEKAQIMICIGTGHHTKGSREARLPDALEHFLLDEGLHHTQP

SEQ ID NO: 178668 - protein, 123 aa, Oryza sativa
  Clone ID: PAT_MRT4530_76201C.1.pep
MDGDLHGCRSSHLLMGRPAPTSTFAGSRRDVESWLSAGDMTGVRMVTNRSFLSTTRQLNNLHVGPPSHYILPVMVRMKPGIYLIRTNVPSLGGNTLAPAGDERLEALVLTGWGEACVRPPVAT

SEQ ID NO: 178669 - protein, 461 aa, Oryza sativa
  Clone ID: PAT_MRT4530_76202C.1.pep
MSRTGDFVSAIQRLALQDAGHMKFKNESPKYANGLLSIVARKQYGCDTRSSLGNKFLKASSNVHSAPVSLKTGDAMASMCSESRGEAGDFARIRNTCFEQATQAYMMGNKALAKELSMKGQLYNLQMKAAHETAREAIYQQRNPFSSEQGQDRLIDLHGLQVSEAIQVVKAELALLMGATRLTVVLSTNVYVLIGIATCVAHEFGVEVCDLYCDGGVDTDKWGDAQIGHYIGIGRIIHTSLSLSMFDRYPVELRLFDRYSIEPQMFDRTKYQKNVEASHNKGLKTVPNSIRSENYVITFEVEEEKFPFFGKKYQLKFANESMFENHCLVHFPSFMRTQFAPLLGGYGSSLVDPRGKLVARSFDILGDVAFSLQDSLKVPVYSLPDIISAGLYSTFVFQKPDPDAMPPIVTPELHDPENDQEEEWLWTQQASMDDGRVSRTDILPPADNEKGILGPGPADMR

SEQ ID NO: 178670 - protein, 92 aa, Oryza sativa
  Clone ID: PAT_MRT4530_76203C.1.pep
STGDVHRPRPTRAVQHRARRQSVTVKIFRHTAPPGCAGHHRHSRRRPSHHRQPRRQASSSSTTNRCNNSTVEVMKTARVSLYIIKCISKKKK

SEQ ID NO: 178671 - protein, 89 aa, Oryza sativa
  Clone ID: PAT_MRT4530_76204C.1.pep
QASSKDHGNRNRVCLDFSRKQMLMLEPVFHHCCLSKVSSLHFLPSMKYESPMCTLAIWEILFHSGLSYTPTFSSSSLQQQVISSFCRED

SEQ ID NO: 178672 - protein, 254 aa, Oryza sativa
  unsure (1)..(254): unsure at all Xaa locations
  Clone ID: PAT_MRT4530_76205C.1.pep
RQGRIRCEQNNGCRIPGNSLDDRDVPGIKEKNMSKKAQEKKKFKKFSDCKINGVFYYYSVMNNWAXKLLVLLFGIYXSRSGFGDDWISQVNIQILLXILCRPVRPGSGSRLELMHVVDGDSIWHTMEELCAYGMRSRIWKESKFGTIGYVKFLSCTSGFPKVFRTPNMSLVHGFRLPTSCINRGGASDRRQGGGQTGGSKAVGPAAAAGATGDFGGQTGKSIPVRPATFERSDRQINLGQTDFHRFRGIHILRL

SEQ ID NO: 178673 - protein, 167 aa, Oryza sativa
  unsure (1)..(167): unsure at all Xaa locations
  Clone ID: PAT_MRT4530_76206C.1.pep
RRCAGADWRRGCAGAXTVGGRRWRRGGDNRGGLGGAIRPPPRAVRPSARGREKRGRRRLHHPHLRHRRPPTVRPRAPAPPVRPRAPPLAASRAGRRSPPAPPRPPTRTRAARLPSCTAACRQLRGPPPPPRPPPRTAAHRQPRRPPLAVAAASAMRPPPSAAAPACR

SEQ ID NO: 178674 - protein, 153 aa, Oryza sativa
  Clone ID: PAT_MRT4530_76207C.1.pep
MDGGAEVFGREGEGERHSAVFDLAGCGFEEEGYHVVDYESTLQTAKSTTVRLATPNIVLTEDAIVTASVMALVFAGKAVATAAISFWINKAFTYLKEYKVEGIEDIKNRLLQSMPKIQVVLDIVNPRHAVEEAEDVIDVLEYYKLKEMAKDHK

SEQ ID NO: 178675 - protein, 198 aa, Oryza sativa
  unsure (1)..(198): unsure at all Xaa locations
  Clone ID: PAT_MRT4530_76208C.1.pep
KDCKIKCVFDYYSVMNNWHWRLLVLLFRIYLRSGFGDDWISQVXLQVPLFVGPVRSGRCCRLEXIHVVGEYSIWHTMEVLCAYEMRSQIWKESKFGMISYIKFVSCTRGFPRVIRTSSMSLVRGFRLPILGINREGASNRRRIGGQTGGHTAVRPTAATGSCRRFRRFDRSXSTSVRPTCSRRSDRRIYFSQTAIRRI

SEQ ID NO: 178676 - protein, 1281 aa, Oryza sativa
  Clone ID: PAT_MRT4530_76209C.1.pep
MALVFAGKAVATAAISFWINKAFTYLKEYKVEGIEDIKNRLLQSMPKIQVVLDIVNPRYVKEQSSALDAWLWQLRHAVEEAEDVIDVLEYYKLKEMAKDHKVSVWGSSFSKVKHKVIKSVKHVSILDKNLKQFTHRGTLKRLREAVEGLDKVASDIMSILTVTEHLKEVASCSQQQEYSTNDDRATGLTLTPPKFVGREKEKEKIVRWLTKASTDASGNLMSTNHIPILSLIGHGGMGKTTLAQRVCEEMVRKNFKVIWVCVSDRFDVTSVTSKILESATGAKPNANCLETLQQSLIHKLKYSTDFLLVLDDVWEDKKIDKWEKLFAPLRTGKSGSKILLTTRMQSVAVLATEAMGIETEFLSIEGLEEGENLELFSHSVFSGQNPQDFPNLKSVGKQIVKKLGGCPLVTKVVGGHLRSNMSFQHWNNFLQEGLQHFKGSEDDIMEVLRLSYYCLPTDLQICFRYCSIFPQDYAFKMKDLVLMWIGSGLISEAGNKPPKRLEDIGEQILAQLAGKSFFETNIKVDPYSQRKENYYIMHDLMHELARYVSSGECARIISPGMLENEKDTVRHLCISGIDHLSTEEVKKILHFKNVRTVIIEGSGLIDSNLFHAVENVMEQSKSLRLLQSNLENTFHLPKIAHLKHLCYIDLPRISPDTICGLVKLYHLLLVKCFNGSREEPKQVRYLGNIDHLRYVNYGKIGEFPIGRLTSLQELHNYRIQGGKGNKISAISNLSTLRELEVLGLENVESHEEADNVELNDKKYITLLSLAWSARAAVENRKDELLLNHLEPYANIETLRISGYGGVRSPIWIENLCIKNLVSLELARCLYWEKLPSLGELVSLKHLWLECLPSLQQIGQSSEASSSNCVDLSLPPNLDTMIVRRCKELRALPILPTTLVHFETSNVGLTKLPRIGKECNENLETKSSRLLVVVVEECKCLNSLEESLLVQGDYIKSIHVLRISDCEDLEAAPLVFEQMNELRELDIRNCPKLRTSRGVGDTFLPLALQKLNVNYCGELELPLIGALQGLTHLSELVLEKCKYLESLPSHDVFKSLKSLKSLEIIGCENLSSLGGLGSLQYLLELKISACSKLMAIGSSQTPDASSTSTLQIDYIEIDLPDILHLEPLKGLCHTKGLVIRGGTQLESLPEEWLLQNRGKLQSLKIYSASSLESLPLHMRDLCSLNLLLLSGARKLQSLPDFPSSLQKLDITCCCKELEEKVGVYESPEWNNISHIARVHIGTAFSDLLVLILSCKEIHTSWTAKNAVKRLWTDSSDEILVQA

SEQ ID NO: 178677 - protein, 837 aa, Oryza sativa
  Clone ID: PAT_MRT4530_7620C.1.pep
TAAMAGAAAAAFAAQVLRGRWFMAYGSFLIMSAAGATYIFAIYSKDIKSTLGYTQEQLNTVGFFKDVGANIGIHAGLIAEVTPPWFVLAIGAAMNLGGYLMLYLSVTGRVGARTPLWLVCLYIAVGANSQAFANTGALVTCVKNFPESRGVMLGLLKGFVGLSGAIFTQLYLSFYGGGGSNTKPLILLVGWLPAAISVAFLGTIRIIRAPRSPTAARREYRAFCGFLYVSLALAAYLLVVIVLQKRFKFTRAEYAVSAAVVFAALLAPFAIVLREEAALFRKTPPKEEADDVPALSAATKPSPAAAETPPATAMERVVRALRPPPRGEDYTILQALVSVDMVLLFTATVFGVGGTLTAIDNMGQIGESLGYPQRSIATLVSLISIWNYLGRVSAGFASDALLSRYGISRPVVVTGVLLLTVAGHLLVAFGVPGSLYAASVLIGFCFGAAYPMILAIISEVFGLKYYSTLYNVGNVACPVGSYILNVRVAGRMYDREARRQGAVAVAAGKKELTCIGVKCYKDSFLIVAGVTVAAAVVMAALAWRTRKFYAGDIYARFREEAAAGGGGAGNGTGAGEDEKVESKEEKAWKILLKPEKAHDLEMKTQAMQGVLPAATEGREDSPARRRQHPSSDLTSEHAVKEDVVRRLKLLSAKGAGRVAINAALLKEISRLTALLKCKPEEEFALSRALRVPEKIGTSKGVLVKEERLVRRMRRVALVTRPTPDKMIPDTRHKLNVEYRIPNKEKLGDDRDSEGAVDVRNPGVVCQARSNRARTTQTRGHNEEEIRSQGSYRAAADQLVRPEKNCLTITWYEEGERLKHVRDGLLGWGLQAVPVGMR

SEQ ID NO: 178678 - protein, 769 aa, Oryza sativa
  Clone ID: PAT_MRT4530_76210C.1.pep
MAEQAKAPDLSPSVSGDDGEPNPRRRARTPPPPPRQSPKQGEALERVERSAASPIAGDGGERRDGERRLLVYGDGSTPQGALQAAGALLRHPPVVPDPESPAQRWLDDVAKLVMTARQRLDAGGRSSATKTSGAATTGSASSRRRARRAAAAVRRSVATPSSTPSTREDLRREQGARASLERRRNDRSAAHAMEGASSSRVSPRHGRGNQPSVPPVGGVGCRAFVVSLRNVRWPPRFRPTIAEKYDGSVNPAEFLQVYTTGIEAAGGDDRVMANFFPMALKGQARGWLMNLPPASVHSWEDLCQQFTMNFQGTYPRPGEEADLHAVQRRDDESLQSYIQRFCQVRNTIPCIPAHAVIYAFRGGVRHNRMLEKIASKEPQTTAELFQLADRVARKEEAWTWNPSGSGVAASAAPGSAAQSGRRDRRRKKRSVRSDYEGHVLAVEGASRATRKGRPASDKKKEASVPSRERPTGKWCTVHNTSLHDLADCRAVKSLAERTRKWEEERRQERREGKSPAVPSGRRRSEAKQKAPAEDIDDGDNDLGFQEPGATIATVDGGACAHVSRRSLKAMKRELLAAAPTHEATRRARWSEVALTFDQSDRPPCVARGGQIAMVVSPTVCNVKPTTFCLGNSLSRSPRSSPGDRTGPPLPVRPGAQGEISSSLGMWKDRPPGRNARHGRCIQVRAAEKRNTLLLCFGGSVYEGATKCEPTSPSFKALNLGRINQPLSLWARSSFYTSRGYHMHPSLSKLDFSSFHKWTEICTVVLRTSS

SEQ ID NO: 178679 - protein, 154 aa, Oryza sativa
  Clone ID: PAT_MRT4530_76211C.1.pep
RAHRPSGTGSRTLPAGPRRRQSRRRPPRRSPPPHPTRRSRRCRRRRVAWPPGARGRRRRRRRGRRRGGPGRTAWPWPGRAGGSTPRPHPPRRPGSRASSSPSAGPPPARHSPCRRRRRRRRHQAAPPGTGTALSAAAAARAVRRVRGGATRAAH

SEQ ID NO: 178680 - protein, 496 aa, Oryza sativa
  Clone ID: PAT_MRT4530_76212C.1.pep
MKWLCAFLKGTKDGEANRRRPRVTAGEETTLWEEPVRPKKEEPPRHNNEEMDHALALALADDAKNTKERNHDKGENDEELARAIQDSLNMNPYQPYNPCAPSQTQARSRGYRVCGGCKHEIGHGHYLSCLGMYWHPQCFRCSSCRHPIREMEVFSGSDSLLYSVSQFTLLGTDPYHKLCYKELHHPKCDVCLQFIPTNRTGLIEYRAHPFWGQKYCPLHEHDRTPRCCSCEKMEPRNTKYMSLGDGRSLCMECLDSAIMDTGECQPLYHSIRDYYEGMNMKLDQQIPMLLVERQALNEAMEGESKGPHHMPETRGLCLSEEQTVTSILRRPRIGANRLLDMKTQPQKLTRRCEVTAILVLFGLPRLLTGSILAHELMHGWLRLKGYRNLKAEIEEGICQVMSYLWLESEILPSTSRYGQASTSYASSSSSSCRPPPSKKGGISHTEKKLGEFFLHQIANDTSSAYGDGFRAAYAAVNKYGLRQSLNHIRLTGGFPV

SEQ ID NO: 178681 - protein, 478 aa, Oryza sativa
  Clone ID: PAT_MRT4530_76213C.1.pep
MAAKGISTIGAASRSLSSSLMAAAKEPDVENLRLIEELTSNVDAVQERVLAEILGRNADAEYLDKCGLDASDTDRATFRAKVPVASYDDLKPYVKRIANGDRSPILSTHPIIEFFTSSGTSAGERKLMPIVTDEMARREVLSSLATSVLNVYVPGLHTGKGLYFLFARSETKTPGGLTAQPALTSVYKSEHFKRAYAYTSPMAAILCEDASQSMYAQMLCGLCQRHDVLRVGAVFAAALVRAIRFLQLNWAQLAADIETGELNPRVTDPSDRECSRGDWTGIVTRLWPKTKCLNVVVTGVMAQYIPTLQYYSGGLPIVSGMYASSECFFGLNLRPLCGPSEVSYTIMPNTAYFEFLPVGEAVDASNLVELARVEDGREYEVVVTTYAGLNRYRVGDVLCVTGFHNAAPQFRFVRRQSVLLSIEADKTDEAELQRAVERASSALLRPRGASIVEYTSRACTERVPGHFSPALPHWTLAP

SEQ ID NO: 178682 - protein, 120 aa, Oryza sativa
  unsure (1)..(120): unsure at all Xaa locations
  Clone ID: PAT_MRT4530_76214C.1.pep
MAAAAGGEAAVASGALPSARSGGRGGGGGGSAAEVDAASVGRQREGRRXRRWSDSPAAVPSPSPVLAGXWRQWPGGGRWRRRHPRQQQXAGGALLSIRQWRWIWVLDWIGLTAQCIGSMN

SEQ ID NO: 178683 - protein, 57 aa, Oryza sativa
  unsure (1)..(57): unsure at all Xaa locations
  Clone ID: PAT_MRT4530_76215C.1.pep
SNTHFXLXSRVXAASGQTQIIQIYNDMFXLYHLXTIGAQICYPEXYSIXWXPKFIRG

SEQ ID NO: 178684 - protein, 62 aa, Oryza sativa
  Clone ID: PAT_MRT4530_76216C.1.pep
KKGGGSLPLFSRALKSQKSFFGRGTVGRIFPNVEGKSFKSGWFSGGDHQLGSKKGGMTITGV

SEQ ID NO: 178685 - protein, 136 aa, Oryza sativa
  unsure (1)..(136): unsure at all Xaa locations
  Clone ID: PAT_MRT4530_76217C.1.pep
ERERGAQLSSPPLVGLKPRELHSSSSTRRSSGKGGSSSSSKNRAKSQEASTHTPLSLSLSSYCCSWSCRGGGGGGGGGGDRGXXXXXXXYXXXXXXXXXXCGGAAAXLSRGGGXXXSPGLAAGGXVLXRVSXFAFS

SEQ ID NO: 178686 - protein, 260 aa, Oryza sativa
  Clone ID: PAT_MRT4530_76218C.1.pep
MTVITVAEETREPVGSPMSSLPLPAPTAAPPAAEPSPTPLLARSSGAEALPPLPLDLLEGRASPPPSLWRPGRRGLPSSSRAAVGSPPAVGPPRAPLQLPAATSPPAAAVSPLTGSSGGKGAVAASISTLWLRKILSPIPHFPTHATLKSPIPIPKSSPPPPQESSLPTGAAVCQRPGAASSSSSQRCRSLPLEPLFCATSLWSRLPLSSSRGANIMVSTFPSCSFTRLVRSLVSALPTTVIRLRPHSLPLSISATPCSP

SEQ ID NO: 178687 - protein, 70 aa, Oryza sativa
  unsure (1)..(70): unsure at all Xaa locations
  Clone ID: PAT_MRT4530_76219C.1.pep
MAESALCHTAKANRSVEHGTMRSSSTEKTASVVSPWXGPWRGGGEVRAVEGEGEGEDGGDGGDGEQAGGE

SEQ ID NO: 178688 - protein, 38 aa, Oryza sativa
  Clone ID: PAT_MRT4530_7621C.1.pep
CCSCNMCYPHLADAGGRRGGSSAVHPKTSRGSCRRAEV

SEQ ID NO: 178689 - protein, 123 aa, Oryza sativa
  unsure (1)..(123): unsure at all Xaa locations
  Clone ID: PAT_MRT4530_76220C.1.pep
SXEQPPQQQPPLAGVDAAAASHHGPANSAARAVRGSARRGAPPAGALGNIHPAARRQLLLDPERDFGFSDLTSLPSPKXSPAASRTRHPPPPPAGRCPQAXARPPGGSHLRTLPQPFFHAPSR

SEQ ID NO: 178690 - protein, 84 aa, Oryza sativa
  Clone ID: PAT_MRT4530_76221C.1.pep
AIKHGTHILVFSWGTRIWGNFYKNLAYFDQLTKSWQNLTTFKNLALWALTSKPPVGVRLANAQILLAGARWRLAPFLAAAVTFP

SEQ ID NO: 178691 - protein, 110 aa, Oryza sativa
  unsure (1)..(110): unsure at all Xaa locations
  Clone ID: PAT_MRT4530_76222C.1.pep
LSTFQYFFFEQGLVSTYGYXNMYTRGNCNXISQSILLSAHRYPLFXRFYLSTGGIWHLTRGCIGXVRSPTKGXVLRSVGRAKSIDYIDVVQGCIVLISWIILVLLIYLPT

SEQ ID NO: 178692 - protein, 131 aa, Oryza sativa
  unsure (1)..(131): unsure at all Xaa locations
  Clone ID: PAT_MRT4530_76223C.1.pep
SADSLDVRTCGRRRTVRNKGYVESEESDDSAEKLANQQXVWKDDPXKKKGKQLKRILWDQPKGGSEEALMNGQSKXPNLICFTLDVDELWDDVKFYIKWEGQXFLHCQWKELXSFQTVGGFKKVXLNYMKR

SEQ ID NO: 178693 - protein, 82 aa, Oryza sativa
  Clone ID: PAT_MRT4530_76224C.1.pep
MFAGEEGGGAHRPGEEGGLRPGCDHRGRRRWRPGEEEGALGDRERRQGSNPYVTIQDVGGRCEEGAGARRPSEEGRRRSAGH

SEQ ID NO: 178694 - protein, 128 aa, Oryza sativa
  Clone ID: PAT_MRT4530_76225C.1.pep
MNPLAGERPAVTSTFAGSRRDAESWLSADDMTRTNVPSLGGNTLAPAGDECLEALVLTGWGEACVRSPNPYTRSENPRGVGAPRPSGPRRVRLDPLGGTKRRANTSPSGPTSPEGARPRGRLCSLPVP

SEQ ID NO: 178695 - protein, 1218 aa, Oryza sativa
  Clone ID: PAT_MRT4530_76226C.1.pep
MTEYWSHLLDIFQNERSKISKEVGRSLMSQSNILSTATPVKANNGSVQATLKDGQDSKMAVLSQTNAHQVMDNQFTLCSANNNEAFRQTPLAKTYVDNAYRNGAFGPSGTSSISHQSMSMVTVMPNRTQAQPAHGLIRPDLSCGSVIGNGMSRENIRSSISARADLISPPYKSKPPVQLITENMSGGKPAKFSSFRPQAYMNLYNHGNVAASAAANLAVLKSDEGKAPTSHLTTNQRKKLAADCALQVKAFSSAALQFVWPSTEKKVMEVPRDRCGWCLACQSSAGGTKKACFLNMATANASKGSARILSGMRLIKNSDSHFPSIVTYLSHMEESLRGLLVGSLQDVQRRQQWYNQLKDASNCGNIIPLLLELESNIRGVAFSTSWLKLIDDWPVESPSASAGASRPAAYQKRGTGGRRGRKRSMASESAPVTDDDNSWKEVNWWSGGNVSKRILQRGALPILTIRKAARQGGKKRMFSVSYHEGSNFPRRTRQLAWRACVGLSQSSSQLALQVRYLDSHIRWKEFIPPDQIPSEGKSVDSDYSVLRNAVVCDKKIVDNKIRYALKFPNQKHLPVRVTKNILEAEDNQDGDGKFWFSENHIPLYLLREFEQKAGVSSLPTPGMLDSNCFANFYQRRVKSSIGDVFFYLLHKGDVYPCTSCKKDVSFRDIIKCSSCQGNCHKECTLRSVGSKEGNAASSLTCKLCLQKRSLMLTNYNTNASFILPQQKSNVHHAVAAPKIIFKVGSSHSAEPATKVEAPPIVKVEAQPVVKKETWPVVKMETQPTANVEAQPTAKVEAFPISNLATQNNAGAQVQPKTKSKKPKPEKPRKSKKTEEIKYFGLVWKKSTNDKNNNENSGEVFRANDVILKGKDGVGSSIKPTCCLCNKPYCPDFLYVRCERCKKWFHGDALQLEEEKIFELVSYRCCRCRRRAIPKCPHSDDYKKPEPEYSEQTVATSSQSTMLSSEENFAVADQDPLLASYGRVEPFGAQTMDADLSMNMMSFNPGNQKLSVRRGQNKNCEYVDQSSIHVDDYYIQNQPQGNANINFSHSNEFSLSEADGVDASELLGWDFSQGNTSAAPSDFAANCPWNDISCGSVAGDEYEPQTYFSFTELLEADDTQFDNTFGMSNSVQDDGDQQGIGFDEMAFMMEDGASNMPFPAIDSASDEVACDRCKNPQPPPDLKCAVCGLQMHRHCSPWEDGEQPSDSADWSCGACREWR

SEQ ID NO: 178696 - protein, 118 aa, Oryza sativa
  Clone ID: PAT_MRT4530_76227C.1.pep
VILYGPVRPGMCCWLELMHVGDVDSIWHTMEVLCVYGMRSRIWKESKFDMIGYVKFVSCTRGFPKVFRTSSMSLFRGFRLPTLGINKGGASNRRLTGGQTGGKAAVRPAVVTGRGRHL

SEQ ID NO: 178697 - protein, 202 aa, Oryza sativa
  unsure (1)..(202): unsure at all Xaa locations
  Clone ID: PAT_MRT4530_76228C.1.pep
MEDDILVKSKGVFDYYSVMNNWAXRLLVLLFGTYSRSGFGDDWILXVIAGFVILCXPVRPGSGSRLELIHVVDGDSIWHTMELLCAYGMRSRIWKESKFGTIGYVKFLSCTIEFSKVFRTPSMSLVCGFRLPTSYINRGGASDRRQXGGQTGGSTAVRPAAATGAAGDFGGQTGDSTPVRPAAFTRSDRQINLGQTDLRRFR

SEQ ID NO: 178698 - protein, 1954 aa, Oryza sativa
  Clone ID: PAT_MRT4530_76229C.1.pep
MPRKKASSPSPTSTARETRSSSARGHASPTPTPTLRRSTRETTSRFSSSSSSSANKHEGSPAKQSANNNTAKRKMNNAAADTSTRPIKKNKKLNAKSYLALFSTPQQTAKSPPAPGGNSRLYSNFGNVAPPLLVQVDDDNASTVPMQDSGTLLEHEEADTQEQGYQSGLHKVPEVVLEETDVSKNKADEHASTSEAKKTIEAGDPREIKGASTSNQALVTHSDGTDYNEYLCAVCRSRETPGILKFKMRQLRRCHHERLWERSCDGKDCKNRYHDSCLDPPLQYVSLGIWLCTLCTKKRLQFGLFAVSEGIESLWDVKEVKWKDLGYEYATWELETSSFLCTPEAKDLKRNYESRHEDARRGFDPAKINKGKQCLFQKLQKLPDGFPPGLDKDHLSSLNRLREFWHNSDGAICLDDQERVIKTILFSMSILPDVCQPLLIVSTSASLSLWEAKFNRLAPSINVVVYNGEKDVRKQIQDLEFYENGLVTFQVLLSHPDAILEDIQTMESIVWEAVMVDDCQSLRVSKCLEQLKHLSTNFRMVLLSFPLKESIPEYINLLSFLNPEGSVISSSSNGDFTDTGDILATLKEKFARHVAFERKADSSKFLEYWVPARLSRVQLEMYCYTLLSNSPALRSHSRTDSVGALRDILVSLRKCCDHPYLVDQSLQSSLTKGHSLTDILDIGSGGGAGNPMGDILDDFVRQRFGFESYERVERGLLVPKKQTALNMFNDKTKGRFIFLIDSRACVPSIKLSSVDAIIIYCSDWNPTNDLRVLQRISIESQSECVPIFRLYSSCTVEEKTLILRSMIIFLTATSRILEEFQKHDYSSKDSEDDGLFMNNVFLEFAAKLSTNVEASTKMENAVISRAQQSGSFYSRDIAVISEREGISAVDGDLPKFWTFWSNLLGGRSPHWQYISEPVQRNRRKIQNMEDQMRIPAEETDEAIMKRRKIGEIMDSSPKILPVKDNDAVLPENSTASSSHETSVDDTWQELGAESLQGTQKGLHTQLKPELSKLYELLELPETVKCLCEELLDYILKNHQCWRAASLLKHKINRRESLALSVRNLNYECDEVLAEYVYEKLRILKKKFSRRASETSKQSQSTPVNNTSSYKQQTSPKLRSDGSICHQVTTIDGDLENVSHEEAPHDILTEEMILEQKELISVLETHREEHVLRDELLERITEKRINLINMVFSLREKNIQDKQGNETTLLDMHKQKEVAKLQETCNLVVEHLRKGHIDSEDRDATVKLIIEWFTLLLYAFLNHMRCQHNKLKMQQSTSWNKELQLKEIFLQQAKSGHLDRSFDQQIPLPDSCFTLEEFSHFKEIVGNFPVGAATSANCQHSLASTMEIALVRSVSPSEVGNSEAAINGAVEVPVHTEKRPTSEVGLSQNRMDNDSDGIDSQGGPPLAVQHSLSSNPAIDNSNNLESSVASHRSEHLGDIAVEVNADNCGTTLADSPHLEAPTVAALPSQSALPMAMEVDIQTDHVVQSAQQNIVTGRVPQEEEREGSTTVTSAQPLQPEMRPSSPVSGILRERTNPDQRRESRQPEAAPSSVDPTQLFPVASLMFNHPPLGNEPLKNELHRLQVHMDSLNKIYELKKSQLQTECSQEIEKIKQKYDLLIKEQDSAHHQHRKTLDDLYGKVLLNQSLADDFRVKFVSTSAAQARAVSPPLCQTTRQTAGVSQQVPTRPSVAGSIALPVGSSSASRPSLQRHCAQPSHVDRSSSSGGSHSSSPSSQVVRPPPAILGSVVRATSTPFSHTPAARGNYGVGSEVARAPAPHLQFRLPRAHPTAPVNQQQRQLPVRLESTCSRTQLTPVSTPVNARQLSSQSVSPVSNSSSSSSSHPGPALSNPALAANSSSNPVLSAGTVALPPSPHPPESIAAPRGQQKGAPSGLNTVPVVGSGLPPSRSMSDSVSLDAWLTSNLGLKDGETSTPRTRMDSHRTVDVVCLSDDEPEEH

SEQ ID NO: 178699 - protein, 93 aa, Oryza sativa
  unsure (1)..(93): unsure at all Xaa locations
  Clone ID: PAT_MRT4530_7622C.1.pep
MAGTIVCGTARQILDCKCIPTDTAHACCSDGTFARAAGPTGASSGVYEALELTDGGSDYLGXGLCKAVDNLCSVIVSALISKDPASHADLDNF

SEQ ID NO: 178700 - protein, 55 aa, Oryza sativa
  unsure (1)..(55): unsure at all Xaa locations
  Clone ID: PAT_MRT4530_76230C.1.pep
GXXXCTNXXGXXVRTXSVFNIAXXPTCILCXGMTWVTDSXPRXNHLHFAIKHYCE

SEQ ID NO: 178701 - protein, 81 aa, Oryza sativa
  Clone ID: PAT_MRT4530_76231C.1.pep
MRFSNQITSGYVQKASYPYRIREGIRILLSAEAHAWFRRIIFEVNSIYTILWSHRPQCMRHSPRRSPLPSFLLATSLLPTH

SEQ ID NO: 178702 - protein, 253 aa, Oryza sativa
  unsure (1)..(253): unsure at all Xaa locations
  Clone ID: PAT_MRT4530_76232C.1.pep
GGGGALKIRRTGATRIPPLGGKSGGTQGARARGPHNTQPRRLIYCKIKGVFDYYSVMNNWAXRLLVLLFGIYSQSGFEDDWIYRXDRRILSFCXPVRPGSGSRLELMHVVDGDSIWQTMELLCAYGMRSXIWKESKFGMIGYVKFLSCTSGFPKVFGTPSMSLVCGFRLPTSCINRGGRSDRRHRGDPTGGHTXVRPAATGVGGRRFRRFDRSXSTSVRPTFIKRSDRHNYFNQTTIHRFRGYRQGVHGCCGG

SEQ ID NO: 178703 - protein, 138 aa, Oryza sativa
  Clone ID: PAT_MRT4530_76233C.1.pep
MDLLGGKPEPTTGTVFKPDGAPFCCPLGAAIDSGGCGLGGNATVPALKTGFELEFAAKAGFESAGPGCELDDDDELLTGETDCELNCLAFTGPELEMGSWCPCYFTPNSIVSTGCSATIVGINFHCNIPKMFASMAGN

SEQ ID NO: 178704 - protein, 230 aa, Oryza sativa
  Clone ID: PAT_MRT4530_76234C.1.pep
MAGDEWRCRKHPAPPCGGVCPYCLRDRLLRLCPECAHARPCPCAASSSSPSSSSSSAASGSAAVVGRVYSLIERERRMGLRSRSVAAGGGGGGRGIVVRDERPKSRAFGWVSFRKATSDRVVEVDDGAALARSSSVSATAVETRAPPKSRGWGRFIPGSIKALRHRKSRAAGDCREGVRARSRAKDVVPHSIAGALCYAQCDANPIWLGWVHRRILVMGNGSLSRTCPVV

SEQ ID NO: 178705 - protein, 390 aa, Oryza sativa
  unsure (1)..(390): unsure at all Xaa locations
  Clone ID: PAT_MRT4530_76235C.1.pep
MIIATSNVDSGAPGRGILVLQDLDEMGLRDGFSDNELLDDFSXGEIQPNQIGTIIVIDNLVYRDHPSLKLRGVPKDVRSYDVERVRNKEQLSTRVGCGRVYPIIENDLDKCKVIAPNLPTETDDLSHSTGHGWTTREKAVNGXFLVNVVGLITRYDCERTSRYAISXYVSHAGHMRCTCNKSTXSAPIGDXRDSYSWFSNQXNVVISLALLLVVELRLXLVLDQRCSDSPTISTSSGRVTTTTWSSTSGVAILPPFPLXVVELRLLPGPRPVWSSWGYXLVFDQRCSDPPITSTPTKLISGTQYHQVFYPEIPYHXRHLELKPILLSLYAVLARPPRNLRELRLGTPRADKALSDHAETNDHTLRLLDHSRTVGGSRQGIQNEKMVYSPR

SEQ ID NO: 178706 - protein, 1990 aa, Oryza sativa
  Clone ID: PAT_MRT4530_76236C.1.pep
MPRKKASSPSPTSTARETRSSSARGHASPTPTPTLRRSTRETTSRFSSSSSSSANKHEGSPAKQSANNNTAKRKMNNAAADTSTRPIKKNKKLNAKSYLALFSTPQQTAKSPPAPGGNSRLYSNFGNVAPPLLVQVDDDNASTVPMQDSGTLLEHEEADTQEQGYQSGLHKVPEVVLEETDVSKNKADEHASTSEAKKTIEAGDPREIKGASTSNQALVTHSDGTDYNEYLCAVCRSRETPGILKFKMRQLRRCHHERLWERSCDGKDCKNRYHDSCLDPPLQYVSLGIWLCTLCTKKRLQFGLFAVSEGIESLWDVKEVKWKDLGYEYATWELETSSFLCTPEAKDLKRNYESRHEDARRGFDPAKINKGKQCLFQKLQKLPDGFPPGLDKDHLSSLNRLREFWHNSDGAICLDDQERVIKTILFSMSILPDVCQPLLIVSTSASLSLWEAKFNRLAPSINVVVYNGEKDVRKQIQDLEFYENGLVTFQVLLSHPDAILEDIQTMESIVWEAVMVDDCQSLRVSKCLEQLKHLSTNFRMVLLSFPLKESIPEYINLLSFLNPEGSVISSSSNGDFTDTGDILATLKEKFARHVAFERKADSSKFLEYWVPARLSRVQLEMYCYTLLSNSPALRSHSRTDSVGALRDILVSLRKCCDHPYLVDQSLQSSLTKGHSLTDILDIGSGGGAGNPMGDILDDFVRQRFGFESYERVERGLLVPKKQTALNMFNDKTKGRFIFLIDSRACVPSIKLSSVDAIIIYCSDWNPTNDLRVLQRISIESQSECVPIFRLYSSCTVEEKTLILAKHDHILDSNVQNVMPIVSHSLLSWGASFLFNRLEEFQKHDYSSKDSEDDGLFMNNVFLEFAAKLSTNVEASTKMENAVISRAQQSGSFYSRDIAVISEREGISAVDGDLPKFWTFWSNLLGGRSPHWQYISEPVQRNRRKIQNMEDQMRIPAEETDEAIMKRRKIGEIMDSSPKILPVKDNDAVLPENSTASSSHETSVDDTWQELGAESLQGTQKGLHTQLKPELSKLYELLELPETVKCLCEELLDYILKNHQVSQEPKGILHAFNIALCWRAASLLKHKINRRESLALSVRNLNYECDEVLAEYVYEKLRILKKKFSRRASETSKQSQSTPVNNTSSYKQQTSPKLRSDGSICHQVTTIDGDLENVSHEEAPHDILTEEMILEQKELISVLETHREEHVLRDELLERITEKRINLINMVFSLREKNIQDKQGNETTLLDMHKQKEVAKLQETCNLVVEHLRKGHIDSEDRDATVKLIIEWFTLLLYAFLNHMRCQHNKLKMQQSTSWNKELQLKEIFLQQAKSGHLDRSFDQQIPLPDSCFTLEEFSHFKEIVGNFPVGAATSANCQHSLASTMEIALVRSVSPSEVGNSEAAINGAVEVPVHTEKRPTSEVGLSQNRMDNDSDGIDSQGGPPLAVQHSLSSNPAIDNSNNLESSVASHRSEHLGDIAVEVNADNCGTTLADSPHLEAPTVAALPSQSALPMAMEVDIQTDHVVQSAQQNIVTGRVPQEEEREGSTTVTSAQPLQPEMRPSSPVSGILRERTNPDQRRESRQPEAAPSSVDPTQLFPVASLMFNHPPLGNEPLKNELHRLQVHMDSLNKIYELKKSQLQTECSQEIEKIKQKYDLLIKEQDSAHHQHRKTLDDLYGKVLLNQSLADDFRVKFVSTSAAQARAVSPPLCQTTRQTAGVSQQVPTRPSVAGSIALPVGSSSASRPSLQRHCAQPSHVDRSSSSGGSHSSSPSSQVVRPPPAILGSVVRATSTPFSHTPAARGNYGVGSEVARAPAPHLQFRLPRAHPTAPVNQQQRQLPVRLESTCSRTQLTPVSTPVNARQLSSQSVSPVSNSSSSSSSHPGPALSNPALAANSSSNPVLSAGTVALPPSPHPPESIAAPRGQQKGAPSGLNTVPVVGSGLPPSRSMSDSVSLDAWLTSNLGLKDGETSTPRTRMDSHRTVDVVCLSDDEPEEH

SEQ ID NO: 178707 - protein, 250 aa, Oryza sativa
  unsure (1)..(250): unsure at all Xaa locations
  Clone ID: PAT_MRT4530_76237C.1.pep
GSARPASTTAASPPPPSPASSPPSSSSSRPPSRAADTPATPPHDHPLSSSSSSSSPPTPARNGAAASPHRRTPSSSPYKIKGIFDYYSVMNNXHWRLLVLLFGIYSRSGFGDDWIHXNRRILLFHXPVRPGCVCRLELMHVVDGDFIWHTMELLCAYGIRSRIWKEFKFGTIGYVKFLSCTRGFPKLFRPLSMSLVRGFRLPTSCINRGGAVRPAASGGQTGDIRAVRPTSVGMRSWSLRMLMTASLSVR

SEQ ID NO: 178708 - protein, 116 aa, Oryza sativa
  unsure (1)..(116): unsure at all Xaa locations
  Clone ID: PAT_MRT4530_76238C.1.pep
MLFEEGQTCTLLSRRVVDKNDRFVTGLTLLTSSAHSHLPTTCPPQAEVEIHQNTGVGYYASQRPEPVYIACVSXLLKGRDLSVIYRESLRSHPEPPAEPAKGGLCGLPHRWLNKNK

SEQ ID NO: 178709 - protein, 199 aa, Oryza sativa
  unsure (1)..(199): unsure at all Xaa locations
  Clone ID: PAT_MRT4530_76239C.1.pep
GCCCKIKGVFDYYSVMNNWAXRLLVLLFGIYSQSGFGDDWIHRRSQDSLFHXPVRPGSGSRLELMYVVDGDSIWHTMEVLCVYGMRSRIWKESKFGTIGYVKFLSCTRGFPKVFWTPSMSLVRGFRLSTSCINRGRASDRRHCGGQTGRSTAVRPAAAXRRGRRLRRSDRXSTLVRPTASTRSDRHINLGQTDFRRFRG

SEQ ID NO: 178710 - protein, 55 aa, Oryza sativa
  Clone ID: PAT_MRT4530_7623C.1.pep
LYMYFKMSLIKDCTKSLNCMVLVIDQFAVPYIYNHHSCTSYQCFPLVPNSSARGS

SEQ ID NO: 178711 - protein, 77 aa, Oryza sativa
  unsure (1)..(77): unsure at all Xaa locations
  Clone ID: PAT_MRT4530_76240C.1.pep
LEGLGLXRLRVAXQKVTTTVHVIPXYXANAADAGALPXRRPPHXRQVSTEVTEEEXRGGGCQLLLPPPPWTERKQGI

SEQ ID NO: 178712 - protein, 582 aa, Oryza sativa
  Clone ID: PAT_MRT4530_76241C.1.pep
MPLGQRAGDKSESRYCGVEVLDFPAGEELPAVLSHSLSSSFDFLLAPLVDPDYRPTPGSVLPVAASDLVLGPAQWSSHIVGKISEWIDLDAEDEQLRLDSEITLKQEIAWASHLSLQACVLPPPKRSSCANYARVVNHILQGLTNLQLWLRIPLEKSEPMDEDHDGAKDNSDMVGYSLIRSTLPSMNSLGRWFGEPAFLTNARGYPCLSKRHQKLLTGFFNHSVQVIISGRSNHNVSQGGVLSGDENHTEDTAVRHALSPYLDYIAYIYQRMDPLPEQERFEINYRDFLQSPLQPLMDNLEAQTYETFEKDTVKYTQYQRAIAKALVDRVSDDDVSTTKTAAEETGRKLKVYAVEKNPNAVITLHSLIKLEGWESLVTIISSDMRCWEAPEKADILVSELLGSFGDNELSPECLDGAQRFLKPDGISIPSSYTSFIEPITASKLHNDIKAHKDIAHFETAYVVKLHRIARLAPTQSVFTFDHPNPSPNASNQRYTKLKFEIPQETGSCLVHGFAGYFDAVLYKDVHLGIEPNTATPNMFSWFPIFFPLRKPIYVPSKTPIEVHFWRCCGATKEKGEERERIE

SEQ ID NO: 178713 - protein, 232 aa, Oryza sativa
  unsure (1)..(232): unsure at all Xaa locations
  Clone ID: PAT_MRT4530_76242C.1.pep
MQMPPPIEYCAQQLAPKASPEHSAPPCVISGYAPPSYKCKIKGVFDYYSMMNNWHWRLLVLLFGIYSQSGFGDDWIYRXESQVLLFYXSVRPGSGSQLELMHVVDGDSIWHTMEVLCAYGMRSQIXKESKFGTIGYVKFLSCTRGFPKVFRTLSMSLVRGFRLPTSCINRGGXHEASRGGQTGGIPTVRPAATTANSSXLDGPTGRSTPVRPTASRRSDRQDYFGQTTIHRI

SEQ ID NO: 178714 - protein, 39 aa, Oryza sativa
  Clone ID: PAT_MRT4530_76243C.1.pep
PKHNQEVHTILISQPKTLTEHHIFKITSHTKKLQPLPKV

SEQ ID NO: 178715 - protein, 123 aa, Oryza sativa
  Clone ID: PAT_MRT4530_76244C.1.pep
QVLNKTTTRARRAVPVLASLRTCQRHPAMPVWCYGGHIASTTLWYCYYRHVRNEIQPFSQQGHDWKRCETTLETGEVQSPPMSSNPRSDVASSDVKHIETKRRRILALVEKSFVATKKSWHQY

SEQ ID NO: 178716 - protein, 121 aa, Oryza sativa
  Clone ID: PAT_MRT4530_76245C.1.pep
WAGPPDGSRGGAAGGRQGEALWCHSLPFGAGPPRAADESGIEGRRRKREEKRKGGREEEWGKKEKRNWFEEEEERGMFQSHLNICLGFIRSDVVEKYLLPVITPTGTKDRSLVPVDNTNRE

SEQ ID NO: 178717 - protein, 49 aa, Oryza sativa
  Clone ID: PAT_MRT4530_76246C.1.pep
MANREEREVLSRSAAVARHDHHYRPHGFFGQDLKTSDPARYIDDPVLSE

SEQ ID NO: 178718 - protein, 51 aa, Oryza sativa
  Clone ID: PAT_MRT4530_76247C.1.pep
EEGLLIVAYIGVGCEEKMQLIQQELILEGRTSISKARSWRIVRQRKIWSKL

SEQ ID NO: 178719 - protein, 208 aa, Oryza sativa
  Clone ID: PAT_MRT4530_76248C.1.pep
MPYAAVRPSPPPQLSRPIGSGAGGGKACPAVPCEVARYHEHAVGAGQCFSTVVQAIAAPADAVWSVVRRFDRPQAYKKFIKSCRLVDGDGGEVGSVREVRVVSGLPATSSRERLEVLDDDRRVLSFRIVGGEHRLANYRSVTTVHEAAAPAMAVVVESYVVDVPPGNTWEETRVFVDTIVRCNLQSLARTVERLAPEAPRANGSIDHA

SEQ ID NO: 178720 - protein, 204 aa, Oryza sativa
  Clone ID: PAT_MRT4530_76249C.1.pep
MRARPKPPSSAISLLPGVNHANSCRTVGLKIYGGIPSHNSNHSLPSRPFSPSPPPRVAPGLAPTRRQPNSHTVKPILRRILSPNQSPTSSFTSPHQAEHCRPRAALFFAAEKFFRPQFVISTDLAANPSTHQINLSAAARRSQRTLAPSPLWPQPLFPSITAFGERLEVEEEKRERERERGLEDSSDLIDNINQSQDIEQGKLP

SEQ ID NO: 178721 - protein, 133 aa, Oryza sativa
  Clone ID: PAT_MRT4530_7624C.1.pep
ASVLSKINRCKGYICRFLILASCTGRGRWEMPHTHRFCVDWYIWWHQSSISSGSSRQPSLAWQTPRGREKIAVSFSSFFLSSASSGESVATHVDASTTSWLAASTMPTNTKATMTSLMLTFSMQIRSHEIINN

SEQ ID NO: 178722 - protein, 67 aa, Oryza sativa
  Clone ID: PAT_MRT4530_76250C.1.pep
LRHRASVRLQTRKCTTDMTCKDRLDIISFGNSSYAHQIRYVHDAPLEDKNMYSTQSYMTLVTAEDQR

SEQ ID NO: 178723 - protein, 90 aa, Oryza sativa
  Clone ID: PAT_MRT4530_76251C.1.pep
MGSGGEGVVMPMGIGELRGRGTTGGDRPTREANGGRSTPREAVAPRSVREKAGSARSVRKKAAAAESTREKAGNAGSLTGPTAPEVAEMP

SEQ ID NO: 178724 - protein, 254 aa, Oryza sativa
  Clone ID: PAT_MRT4530_76252C.1.pep
DLLNVLISGPLIPQLGGLKNLQYLQLYGSRLNGSIPATLGKLKHLVSLDLSNNLLTGAIPPSLGAISNLLILRLSGNNLTGAIPPSLGNLKSLEILELGNNALSGSIPASLGDIETLNYLDLNDNMLTGTVPLEILSRLVTTLDELNVAHNDLYGTTRKSVTREKLQQNSSTAITRVVHCALEFELALSSGGVDGTNLVSPTTTTSGGDTWSESGYLRSPLLGRSACRCERGNQVGAEQHHLAVHDGYGGVRLD

SEQ ID NO: 178725 - protein, 433 aa, Oryza sativa
  Clone ID: PAT_MRT4530_76253C.1.pep
MRKLGPDLPIGFENSRFDGKLTHTIWLLINLIRTLQSQHHVPSGYQPCRNQVDLTEKANPCMRIELHKQEQGLPDGIDRIDLILSASAAATPSRLLIGSSFGAGARARYSPTCSFPPSHPTLLAPPPPFASVARQSAPPHQVRLWCRWPPLLAHLLLPQSSRAAASIRVCRPAVSAAPPVDQWLCHLRRIQVHFRLLLLSGGDAAATAARRRRQTHEEGGGSVKKAARSGGGAAGNTRITGGGSCGWGTIFKRIIRPFLNFYINIRRPTKNASERHLAKHSPLLWEGLIAINLACNFMVQKIWPLKDRAHPAWEYQFCGNDPTQESLIPINKYRATNRIYDFFKPGTVIITNNCPNTLHYKVQRPPAAWFNESQTEMNKLKGFNGAADKADSEACYEACLSLLQKIQKIIERSKMKSEALKLVFGRVRKICQV

SEQ ID NO: 178726 - protein, 346 aa, Oryza sativa
  Clone ID: PAT_MRT4530_76254C.1.pep
MVASKQLHSQRCGGHYCQLHHHRPEEIAGAGAESHRRDGSSGCGGAGPMVVLTLGSGAAAAEDDGGGRSRCCCGAGGAAPATMVSALRGSRYLLPAQELLREAVSAAAASARGGDDDDEAVASFPHDGKSTGIGGGGGGVQAKLLSLLSELESRHEHYFGELRRVSASFEPALGAGATAGYTALMAQAMSHHFGSLRRAILRKLRLHAAAAARTRSALLRLARDAMEEDDEGDGEEEEEVVNRVVRRTKQAAAARAEQAWRPLRGLPEDAVGVLRAWLFDHFLHPYPNDNEKLMLAVATGLSRTQISNWFINARVRLWKPMVEEMYNDEFDDDDAGSGGGGASSSS

SEQ ID NO: 178727 - protein, 59 aa, Oryza sativa
  Clone ID: PAT_MRT4530_76255C.1.pep
MATGAALRQVDLALANEGGDDNGSKLREGRSGGARLETSGSPSAGLSDDDNDDANGTNG

SEQ ID NO: 178728 - protein, 178 aa, Oryza sativa
  Clone ID: PAT_MRT4530_76256C.1.pep
MENFLADNVMPSDVGLETEAQSIGIFCIPASSIIPLHNHPGMTVFSKLLYGTVHVKSYDWVEDTTQLLKLSKVRPAKIVRDGEMSAPCGAMVIQPKDGGNIHAFKAITPCAILDILSPPYSSEDGRHCSYFRRCRKADPSGILSNRSREPEFVWLEEHQPPNSFVIRRDLYKGPALNL

SEQ ID NO: 178729 - protein, 57 aa, Oryza sativa
  unsure (1)..(57): unsure at all Xaa locations
  Clone ID: PAT_MRT4530_76257C.1.pep
PCPTRTLLITVSSIFTAEANSVLSLSGNPLGAQXAISSPANFPPTAMSTSPSPSAAS

SEQ ID NO: 178730 - protein, 86 aa, Oryza sativa
  Clone ID: PAT_MRT4530_76258C.1.pep
GRDGRADASSPPPVHGADTSSPLGGSRRAADDDDEAAAGSGVRVRDDDDDGKAEAGSGPTTTNRPGGEPAAAASGRGGGWTSRALG

SEQ ID NO: 178731 - protein, 105 aa, Oryza sativa
  unsure (1)..(105): unsure at all Xaa locations
  Clone ID: PAT_MRT4530_76259C.1.pep
VRDDRRAIRPGRRRARSGGHGRAAGRRARSRRRCRAARARRCRPRRRRTAXARLRRCRPAAARGGLDPESGDAHAPGGLXCRRWSAPRSRAPSRRSRRESGTRSP

SEQ ID NO: 178732 - protein, 26 aa, Oryza sativa
  Clone ID: PAT_MRT4530_7625C.1.pep
QLRFCACIAVASEFYARASIAFNLVF

SEQ ID NO: 178733 - protein, 212 aa, Oryza sativa
  Clone ID: PAT_MRT4530_76260C.1.pep
MEVVVARRGVVVLRLRHGEPPPSAAARSGGRCSRLLLLWTFAVGFAAGLFMFASHVLAAVAAAVLFAAMCLYTCLCLNNAAPEEEEEQQQQPPVLLLPGQALRVAVMPPSVGRLQQQEVNGGGGGGGLRQEDVEAAIPAFEYSKGSGGAAEAEQCAVCIGVVRRGKTVRRLPACGHAFHAACIDGWLRAHATCPVCRADVKVAAGGGGGAPV

SEQ ID NO: 178734 - protein, 199 aa, Oryza sativa
  unsure (1)..(199): unsure at all Xaa locations
  Clone ID: PAT_MRT4530_76261C.1.pep
CKIKCVFDYYSVMNNWHRRLLVLIFGIYSRSGFGDDWISQVNLQVLLELGLVRPSRCCRLELMHVVDGDSIWHTMEVLCAYGMRSRICKESKFSMIGYVKFVSCTRGFPSLPPVXTIGESLVRPLKPVTNQTHTKSSKHLTRXGQTGGYTAVRPAAATGTGRRLWRSDQSXSTPVRPTTTRRSDRQDNFGQTAIHRIRG

SEQ ID NO: 178735 - protein, 382 aa, Oryza sativa
  Clone ID: PAT_MRT4530_76262C.1.pep
MGNSYSNVGSPTAAGYVQAPELPLHLCFFLVVLLVFLGFSWYMSYESAAERFANQARLLLMASPLALLLTPRTLRHSSRRCSSRRWAQPGTVFTIPVFPEQRGYFLKLGFITQRQHACTQYFNAATAAAAAAPPPPRRHGYANVDPRCEWTRTEDADTLVVDVSGFRKEELKVLYNTSRKLKVAGERRADGGQWARFLKMFPVPRSCDAGAIRAVMDNEEALLYVILPKGSSSSSSSSRDKKEDEHNVSSQPQGEAAMAPMADGPSSSSGGGGNLYIAQEDEEMGKIDEKEEVIATQDVPRTHGDVDDGNGRWFHLGVFAGLETAVRVHLEDVGVKHGKHLVDAVRDLLGGGDPGGVDVIHTLAEDGQELLIGSGVLDGAPG

SEQ ID NO: 178736 - protein, 123 aa, Oryza sativa
  unsure (1)..(123): unsure at all Xaa locations
  Clone ID: PAT_MRT4530_76263C.1.pep
MDGDLYRCRPSHLLMGRPTTTSTFAGSRCDVESWPPADDMTGVRPVTXRSFLSTTCQLSNLHVRPSSHNILLVMVRIKPGIYLIRTNVPSLGGNTLAPAGDERLEALVLTGWGEACVRPPVAT

SEQ ID NO: 178737 - protein, 53 aa, Oryza sativa
  Clone ID: PAT_MRT4530_76264C.1.pep
VRPHVRPDSSLVMSAVQSPEISPALTYALAEAIMQESVFKTGFKTDDAIYHAD

SEQ ID NO: 178738 - protein, 198 aa, Oryza sativa
  unsure (1)..(198): unsure at all Xaa locations
  Clone ID: PAT_MRT4530_76265C.1.pep
VNCKIKGVFDYYSVMNNWHWRLLVLIFGIHSRSSFGDDWISQVNLQVLLEXGPVRPGSGCRSDRLHVVGEDSIWHTMEVLCAYGMXSRLCKLSKFGMIGYVKFVSCTRGFPKVFRTSSMYLIRGFRLLTLSINRRGASDRRHRGGQTGGHMAVRPASVTGGGDKFRRLGRXSIPVRPAATLQSNRLIYSGQTDLHRIR

SEQ ID NO: 178739 - protein, 104 aa, Oryza sativa
  Clone ID: PAT_MRT4530_76266C.1.pep
RSVAPAGVGYAGTNQGTGGPAAVPPPASNNKAPATQPGANEVYLVWDDEAMSMEERRLSLPKYQVHDETSQVSSDFYNFISVILMICEKNQVEVHGDALNWNIV

SEQ ID NO: 178740 - protein, 959 aa, Oryza sativa
  Clone ID: PAT_MRT4530_76267C.1.pep
MFPSRRRSPWAFAAALQPLYKNPRCLLYPPPPSPSSLAVGRALAPCDLAPPSSPSLQPCFAVVPVVVVARGDRHHGRRRVAVLVRHFAVAEDRRSTAVVVKPKTVATAVRCFSAASLVTGEFAASRSTSWCLPFASSRRRSPASLRRPSCRAAEPPPVVTSSPTNGALRWIVLSKGYCHISFPRYRGGIEAHEEEFYNDADGRDTRPSRRAAAGGDVTADVIVAAGGYGLGSSAVLKEVAKRLRWSSVPEKLKLGLDKIIHVDCSLWQSKRALQKAIAQELKLPRWVMAVFDQRDEEDDFDGVEHGARGVIPDVTEAILNELAGHTCLVIFHNGSGGYIDVQECGVPAIMGLSSKRVLWTSQVRFGPWIGSDLQKIAGLSDVAMFANPFNVQPLLHEEAEEVARSTGVPKPGMSPEIVKECIMYYKVKLWVLDLSYTDWYWLLSVEAQDLMVELRELNVKGVKHWSINHLLRDGNNSSAGVGSSTKPLGLLNLVKLQVTTEPITEDQHQSQVWKEDQVAATLFPNLSSCKIVKTIILDGCFELTRIDPHDLPPSLESFSFSSSSNDNDVDVTAKIESISFRGCTQLKSVLLRGVFERLKQLDVSGTCIKTLDLRSMRGNWSLKELLLLGCKELRAILWPTQDVSLEVLHIDTSSTELDHATGVEESSSFSPVEFKWAEQRWLMSTKSRRPAADNKKLYADVDSTIQHLQLQATMNGNWMWPCKSEGSTSHYISLQDDKRMQTKPLSSPSLPGVVFTPPSTGSDTIFCLLRTFWASQLARARHIWDWGTRGQLHFEPEDGSFDLQVLHLDCCPRLIYVLPLYYNSLSYAYCVLETLEIVCCGDLKDVFRVDDNNQELLVATIEFSELKHIHLHELPSLQRICGHRIVAPKLETIKIRGCWSLTRLPAVGLDSTHKPKVDCEKEWWDGLEWDGLENGHHPSLFEPTHSRYYKKNLPRGSML

SEQ ID NO: 178741 - protein, 232 aa, Oryza sativa
  unsure (1)..(232): unsure at all Xaa locations
  Clone ID: PAT_MRT4530_76268C.1.pep
RQGRTRNKREKYEQKGSRKRKVIKSSLDCKIKGVFDYYSVMNNWTXRLLVLLFGIYSRSGFGDDWIXQVIAGFYHFMXPVRPAVCARLELMHVVDGDFIWHTMKVLCAYGMQSRIWKESKFGMIGYVKFVSCTRWFPKVFRTLSMSLVRGFRLPTSCINRGGASDRRHHGGQTGGXPAVRPAATTGAAGIPGRSNRXSTPVRPAATLRSDRKINLGQTDFHRFRGLGKGSDP

SEQ ID NO: 178742 - protein, 939 aa, Oryza sativa
  Clone ID: PAT_MRT4530_76269C.1.pep
MPPAEWTRIIADSIDEAAGRVIELLEDTSEGNVMYFHGWCGLGASAVLRAVAKRLTMRPSPSPGRRRWEKMIHVDCSVWQSKRALQKAIAQELQLPWSLMALFDQHDEEDDFSGVEQSARGVIQDVSQAILSILASRTFLVIFHNGSNGYIDLLECGVPVITGILNKTVLWTSRSSFRITDLYIDNVSKEDRDKLAGLSDVAIYADPTADNEDAVKFIGMLLHEEAEEVARYTGVPQSAGMSTELVKMCIMYQLMLRQQHVDYTQHWDTHADTTSSTCCHSSSPWEIAQALYNNLILEFLTMDNYDSNPIFAEEILRDLRLPSDFVDESSFFWTCDAAGNNNVDATTACYRQKSLEAKMFQHPSARSLRVIHLFDCTFSFASPPFLSCSSLRFLLLDHCKDKHNLGSAPNSTSAGDTDKETGISSGACFQKLWVLDLSYTDWYWLLSVEAQDLMVELRELNVKGVKHWSINHLLRDGNNSSAGVGSSTKPLGLLNLVKLQVTTEPITEDQHQSQVWKEDQVAATLFPNLSSCKIVKTIILDGCFELTRIDPHDLPPSLESFSFSSSSNDNDVDVTANIESISFRGCTQLKSVLLRGVFERLKQLDVSGTCIKTLDLRAMRGNGSLKELFLLGCKELRAILWPTQDVSLEVLHIDTSSTELDHATGVVESSSFSPVEFKWYISVRDRRLLRSLNDTKYPLDAPCIEISSPPASVATATTDGSELGGTISKRRPIAISRAEQRWLMSTKSRRPAADNKKLYADVDSTIQHLQLQATMNGNWMWPYKQEGSTSHYISLQDDKRMQTKPLSSPSLPGSICERASGLHDVFRVYDNNQELLVATKEFSELKHIHLHELPSLQRICGHRIVAPKLETIKIRGCWSLTRLPAVGLDSTRKPKVDCEKEWWDGLQWDGLEKGHHPSLYELTHSRYYKKKLPRGSMLR

SEQ ID NO: 178743 - protein, 52 aa, Oryza sativa
  Clone ID: PAT_MRT4530_7626C.1.pep
CIFFLPTLSCFTLTKDPKTGPDGALNLVLGDLPTEPPRLYGSEKLRRNFLAG

SEQ ID NO: 178744 - protein, 190 aa, Oryza sativa
  unsure (1)..(190): unsure at all Xaa locations
  Clone ID: PAT_MRT4530_76270C.1.pep
CKIKGVFGYYYVMNNWAXRLLVLLFGIYLRSGFGDDWISQVNRRFIISCXPVRPGRCCRLELMHVVDGDSIWHMMEVLCAYGMQSXIWKESKFGTIGYVKLLSCTRGFPKVFRTPSMSLVRGFRLPTSCINRRGASDRRHCGGQIGGSTAVRPAAATTSGKPSRWLDRXSTPVTPAATLRSDRLIYFGQT

SEQ ID NO: 178745 - protein, 1020 aa, Oryza sativa
  Clone ID: PAT_MRT4530_76271C.1.pep
MRPSPSPGRRRWEKMIHVDCSVWQSKRALQKAIAQELQLPRSLMALFDQHDEEDDFSGVDQGMRGVVPLVTQTILSDLVNHTFLVIFHNGSGSYIDLQECGVPVITGILNKTVLWTSRSSFRITDLDMDNVSKEDRDKLAGLSDVAIYAYPTAGDEYSFVILFGMLLHQEAEEVARYTGVPQSAGMSTELVKKCIMYQLMLRQQHVDYTQHWDTHAANYWVCSGIIQTSDTTSSTSCHSSSPWEIAQALYNNLILEFLTIDDYNSNPTCAKRIQRALRLPSDFVGESSFFWTCDAAGNNNVDATTACCRQKSLEAKMFQHPSASWLRVIHLFECTFSFASPPFLSCSSLRFLLLDHCKDQNSSRTDSTLTMTTDTGDTRACFRKLWVLDLSFTDWYWLLSVEALDLMVELRELNVKGIKHWSISHLLHRLDDDDASNSTRSSSRKPWLLSLVKLQVTTEPITEDQHQSQVWKEDQVAATLFPNLSSCKIVKTIILDGCFELKRIDPHVLPPSLESFSFSSSSNDNDVHVSAKIESISFRGCTQLKSLLLRGLFQRLKQLDVSETCIKTLDLHAMRGNGSLKELFLLGCKELRAILWPKQDVSLEVLHIDTSSTELDHATGVEESSSFSPVEFKWYISVRDRRLLRSLNDTKYPLDAPCIEISSPPASVATATTDGSELGGTISKRRPIAVSRAEQRWLMSTKSRRPAADNKKLYADVNSTIQHLQLQATMNGNWMWPYKQEGSTSHYISLQDDKRMQTKPLSSPSLPGSICERASGLHVHDSLSIASITSHSNGARRWNNLEWCRVERCPNIEGVVFTPPSPVGGITFLYLKTFWATQLARARHIWDWGKRGLLHKGPVPFNLQVLHLDCCPRLIYVFSINDNRASYAYRWLETLEIVCCGDLKYVLRVYDNNQELLVATIEFSELKHIHLHELPSLQRICGHRIVAPKLETIKIRGCWSLTSLPAVGLDSTRKPKVDCEKEWWDGLQWDGLENGHHPSLYVPTHSRYYKKKLPRGSMLR

SEQ ID NO: 178746 - protein, 228 aa, Oryza sativa
  unsure (1)..(228): unsure at all Xaa locations
  Clone ID: PAT_MRT4530_76272C.1.pep
VVGNTRITNKPCHICKIKVCFDSYSVMNNWHLXLLVLIFGDYRRSGFGDNQFLGDXLDSLLFYXPVRPGCVCRLELMHVVSEDSIWHMMEVLCAYGMRSRIWKESKFDTIGYVKFVSCTRGFPEVFRTLSMSLVRGFRLSTSCINRGGASDRRSTDGQTGXGEAVRLAATSGVAGIPGQSNRXSIPVRPAATLRSDRQINLGQTDLHRFRGPRMKRLNGIERISSKPQ

SEQ ID NO: 178747 - protein, 1082 aa, Oryza sativa
  unsure (1)..(1082): unsure at all Xaa locations
  Clone ID: PAT_MRT4530_76273C.1.pep
RASFSRAWRCSSLLQWTRIIAGSIDEAAGRVIELLEDTSKGNVMYFHGWGGLGASAVLRAVAKRLTMRPSPSPGRRRWEKMIHVDCSVWQSKRALQKAIAQELQLPRSLMALFDQHDEEDDFSGVDQGMRGVVPHIDLQECGVPVITGILNKTVLWTSRSSFRITDLDMDNVSKEDRDKLAGLSDVAIYAYPTAGEMLLHQEAEEVARYTGVPQSAGMSTELVKKCIMYQLMLRQQHVDYTQHWDTHAANYWVCSGIIQTSDTTSSTSCHSSSPWEIAQALYNNLILEFLTIDDYNSNPTCAKRIQRALRLPSDFVGESSFFWTCDAAGNNNVDATTACCRQKSLEAKMFQHPSASWLRVIHLFECTFSFASPPFLSCSSLRFLLLDHCKDQNSSRTDSTLTMTTDTGDTRACFRKLWVLDLSFTDWYWLLSVEALDLMVELRELNVKGIKHWSISHLLHRLDDDDASNSTRSSSRKPWLLSLVKLQVTTEPITEDQHQSQVWKEDQVAATLFPNLSSCKIVKTIILDGCFELKRIDPHVLPPSLESFSFSSSSNDNDVHVSAKIESISFRGCTQLKSLLLRGLFQRLKQLDVSETCIKTLDLHAMRGNGSLKELFLLGCKELRAILWPKQDVSLEVLHIDTSSTELDHATGVEESSSFSPVEFKWYISVRDRRLLRSLNDTKYPLDAPCIEISSPPASVATATTDGSELGGTISKRRPIAISRAEQRWLMSTKSRRPTADHKKLYADVDSTIQHLQLQATMNGNWMWPCKSEGSTSHYISLQDDKRMQTKPLSSPSLPGSICERASGLHVHDSLSVASITSHSNEARRWYNLEWCRVERCPNIEGVVFTPPSTGSNSIFWYLKTFWASQLARARHIWDWSTTGQIHFEPADSSFWLKVLHLNCCPRLIYVLPLYDNSPSYAYCALETLEIVCCGDLKDVFRVDDNNQELLKTIKFQELKHIHLHELPSLQRICGHRIVAPKLETIKIRGCWSLTRLPAVGLDSTRKPKVDCEKEWWDGLQWDGLENGHHPSLYVPTHSRYYKKKLPRGSMLDIILCFVVXKPSAMLQYKDIQMTCSKHWGM

SEQ ID NO: 178748 - protein, 71 aa, Oryza sativa
  Clone ID: PAT_MRT4530_76274C.1.pep
MAFAAAYWLDHFWASFSWDVGDVGGAMARPEMRRNFTFPWLECGEAHQRIHAMDETPSGEKSKWKFLEIPR

SEQ ID NO: 178749 - protein, 254 aa, Oryza sativa
  unsure (1)..(254): unsure at all Xaa locations
  Clone ID: PAT_MRT4530_76275C.1.pep
IRATCENCTITGEGGRRWRQCHRPCSFKQHTNKAPCSFSTSIGHPNCKIKGVFXYYYSVMNNXQWRLLVFIFGIYSRSGFGDDWISQVIAGFVILCXPVIPGSGSRLELMHVVDGDSIWHMMEVLCAYGMRSRIWKESKFGTIXYVKFLSCTRGFPKVFRTLSMSLVRGFRLPTSGINRGGASDRRQXGGQTGGIRAVRPVAATGAAGFSAVRXDRSTSVRPTFIRRYLVYLVGENWFMVRRCHCQEMFFGMIK

SEQ ID NO: 178750 - protein, 1207 aa, Oryza sativa
  Clone ID: PAT_MRT4530_76276C.1.pep
MRINCCRPARLIRRDALRSLLPRPAEPACLCDDTDHCPTRSGCFLCEEKKAMQQPSSTPTQPHASRKQQSVSSDVHTEPSTSTSIQQPCLGSVHVNLFHGWKLLRAHALRTRESIQWQCSGSVQWTRIVAGSIDEAAKKIIDFLDDTSNNRSTVIYFEACRGLGSSAVLKEVAKRLRSSSPEKLKLKLRLDKIIHVDCSLWQSKRALQKAIAQELELPRSVMAMFDQRDKEDDLDGVDHGARGVIPHIDVQECGVPINMGLSGKRVLWTSQVRFGPWMITGDVHMVAGPSDVAMFADPMDDQPLLHEEAEEVARSTGVPKPGMSPEIVKECIMYYKVVRLLDGNHGIDWATHAANYWVCSGIIRSVGNTSAWEIAQALHTNLRLDWDDSLNNNKEKLDPLQVPCDSVKASFFWATSHSNKEATTSCKESLEARMFQHSSVDRLRVINLSQCTFSFTSPPFLGCSSLRFLLLDRCKDKDKLCSGSSPNSTSAGDTEKETSISSGACFQKLWVLDLSYTDWYWLLSVEAQDLMVELRELNVKGVKHWSISHLLRDDNNSSTGVGSSTKPLGLLNLVKLQVATEPITEVQHQSQVLQQDQVAVTLFPNLSSCKIIKTIILDGCFELTRIDPHDLPPSLESFSFSSSSNDNDVDVTAKIESISFRGCTQLKSVLLRGVFERLKQLDVSGTCIKTLDLRSMRGNWSLKELLLLGCKELRAILWPKQDVSLEVLHIDTSSTELDHATGVEESSSFSPVEFKWYISVRDRRLLRSLNDTKYPLDAPCIEISSPPASVATATTDGSELGGTISKRRPIAVSRAEQRWLMSTKSRRPAADNKKLYADVNSTIQHLQLQATMNGNWMWPYKQEGSTSHYISLQDDKRMQTKPLSSPSLPGSICERASGLHVHDSLSIASITSHSNGARRWNNLEWCRVERCPNIEGVVFTPPSPVGGITFLYLKTFWATQLARARHIWDWGKRGLLHKGPVPFNLQVLHLDCCPRLIYVFSINDNRASYAYRWLETLEIVCCGDLKYVLRVYDNNQELLVATIEFSELKHIHLHELPSLQRICGHRIVAPKLETIKIRGCWSLTSLPAVGLDSTRKPKVDCEKEWWDGLQWDGLENGHHPSLYVPTHSRYYKKKLPRGSMLSDMILCFEVKPSAILQWRVACSKIWGVSQETLDLAREAISYTSRSSRSRSLATCRLHPAFSFISDG

SEQ ID NO: 178751 - protein, 123 aa, Oryza sativa
  unsure (1)..(123): unsure at all Xaa locations
  Clone ID: PAT_MRT4530_76277C.1.pep
MDGDLHGHPPNTLLTGRHTPTSTSAXGGHIVGKWLCADDMSSVRPVTNRSFLSTTRRLSNVHVCPSSNNILLVMVRMKPGIYRSGXNVSSLGCNTLAPAGDECLEALVLTGWGEACARPPVAT

SEQ ID NO: 178752 - protein, 115 aa, Oryza sativa
  Clone ID: PAT_MRT4530_76278C.1.pep
WGSSPGDRAGPPLPVRPGALGEVLSSWFVESSREWKHTRHGRCIQVRAAEKRNTLLLCFGGSVYEEATKMKPGIYLTGTNVPSPGANTPAPARDECLEALILMGWGEACVRPPTG

SEQ ID NO: 178753 - protein, 131 aa, Oryza sativa
  Clone ID: PAT_MRT4530_76279C.1.pep
MYTDGDLYGCRPNDLLMGRPIPTSTSAGSRRDVGTWLSADDMTSVRPVTNRMKPGIYLTRTNVPSLGGNTLAPAGDERLEALVLTGWGEAGSGRPGPRGRNGSGPTPWGDLERGGHTTLGPDPPEGVRPRG

SEQ ID NO: 178754 - protein, 73 aa, Oryza sativa
  Clone ID: PAT_MRT4530_7627C.1.pep
NNVIWNSIEIVITKADTHSDLCSFEMACHLMSIQVPVHHHKNGYLALQTSKDAHLPKAVTSLFKGFFFCLPFA

SEQ ID NO: 178755 - protein, 109 aa, Oryza sativa
  Clone ID: PAT_MRT4530_76280C.1.pep
QTQGMLLLTLAVSVPALKPPPCDGGGGAACPRASALQLGVYFGGLYTIALGHGGTKPNISTIGADQFDDFHPPEKLHKLSFFNWWMFTIFLGILFSTTVLVYLQDNVSW

SEQ ID NO: 178756 - protein, 114 aa, Oryza sativa
  Clone ID: PAT_MRT4530_76281C.1.pep
GKKKPPGLKGGAQGQMGQKDLKKPPKGYGTKTKKKSPGGNLNHPPGRKLPPKNGQKRGGPKRGKETFLGLGKNPEGPLGFFPGKRGLLCGGPQRGKPKKKRGAMAKRKNPGGKG

SEQ ID NO: 178757 - protein, 391 aa, Oryza sativa
  Clone ID: PAT_MRT4530_76282C.1.pep
MGCAGSKDVTVADVYRPPPTSVSLFDISAIEEPWLIATGKKNDEEEEEEDEEEEEEEEEEEGKKPTTTVMPLPLLDKLDGYDLAPASWSEVSKALEDIKPALSSNTTTTENAKKKTKKKKKKQPAPPPQPPTTTTTVLPEPVKAIEAAAKKAAAAPSARGANEEVDRRPPPPELTGRRVVKDNPFLMRDRENKGNDGGAAAAAARWRRRDPFEGYPERRPPGASGGGVVLYTTTLRGVRRTFEDCERARKAVEACAEAVSAAGGSPVVVDERDVSLHGEYLRELRGLAGAGDAPPRLFVMGRYLGGADACAELAESGKLREMMRWARARGEACAAKDGRGCEGCGGARFVPCWECGGSCKVVAAGATAAAADVERCAKCNENGLMLCPICH

SEQ ID NO: 178758 - protein, 773 aa, Oryza sativa
  Clone ID: PAT_MRT4530_76283C.1.pep
MASLSQEVVESALASAPPTPKWLPKGMDPNSACKVVVRVVAYVEYMDNGSQDYHVSTSHKWVVDKDTVCLIDLMKDLDDEIIRGSAQELTVTFWDKRVGRDVEIYSDAMLLEAFNQYWDGRKLSLQVTITLLRMMMLMKRMMILRCMRQYVVLKEVELAVPYSEATRYRTYCKAKKCKWRIHASRLPDGRTWQIKKMPYEHSCASTGKLENNCMASNSWVKDRKTLEKYLIKLSYYVVWDGRHMALDVILGGWEQSFEAVYNFKAEIEKRSPGSIVEIEYDVINEKHRFSRMFVALKPCIDGFLYGCRLYLGIDSTVLTGKWRGHLASTIGIDGHNWMFPVAYAVFGSETKENWEWFMVCLNKAIGSPEGLVLSTDAGKGIDAAVTRVLNNGVEHRECMRHLYKNFQKRFHRDVFERNLWPASRAYRKDVFDRYFNIMKEASPRSMQWIEENHQHLWARSSFSTSSKCDYVTNNIAETFSSWIRLEKSLPVVELLDKIRQMIMERMCTRHKLSLKLQGGKCEVSGANRDLTTWRHTADLTKQECSCKQWQLTSLPCRHAISFIGSLREVELEDYVSPYYSVAMFRAAYATIVPPMPDKSLWEKVDAGFKIWPPILKRSAGRPRTRRFIGVEEGGSRKKRRKCERWNGFGHLSKTCNKHVYDPDAPPPAPPKPKRIRKKKTKPEHVPTGGNSTMPPTAAANDQAPTAVIDQAPAAAGDEAPAAAGDQAPAQVAMQVDGSPGPVTRSRSVASLAHASPLKANKRKAIVTRIARKL

SEQ ID NO: 178759 - protein, 626 aa, Oryza sativa
  Clone ID: PAT_MRT4530_76284C.1.pep
CSDKTGTLTLNKLTVDKNLIDVFERGITQDQVILMAARASRTENQDAIDTAIVGMLADPKEARAGIQEVHFLPFNPTDKRTALTYIDGDGKMYRVSKGAPEQILHLAHNKPEIERRVHAVIDKFAERGLRSLSVAYQEVPEGTKETPGAPWHFVGLMPLFDPPRHDSAETIRRALNLGVNVKMITGDQLAIGKETGRRLGTGTNMYPSLPLLGQNKDESIAALPVDDLIEKADGFAGVFPEHKYEIVKRLQARKHICGMTGDGVNDAPALKKADIGIAVADATDAARSASDIVLTEPGLSVIISAVLTSRAIFQRMKNYTIYAVSITIRIVLGFMLLALIWKFDFPPFMVLIIAILNDGTIMTISKDRVKPSPLPDSWKLAEIFTTGVVLGGYLAMMTVIFFWAAYKTDFFPRIFHVESLEKTAQDDFQKLASAVYLQVSTISQALIFVTRSRSWSFVERPGFLLVFAFLVAQLIATLIAVYADWAFTSIKGIGWGWAGIVWLYNLVFYFPLDIIKFLIRYALSGKAWDLVIEQRIAFTRKKDFGKEERELKWAHAQRTLHGLQPPDAKMFSEKAGYNELNQMAEEAKRRAEIARLRELHTLKGHVESVVKLKGLDIETIQQSYTV

SEQ ID NO: 178760 - protein, 1081 aa, Oryza sativa
  Clone ID: PAT_MRT4530_76285C.1.pep
MEIFLSAILGDLASRSISFLINKCSKPTVLTVEEKLQRLLLQACFIVEESDERLIINQAMLQQLNILRKEMYRGYYTLDSFRCHGHQEYNPKDLEVSSSFAPSMFNPAKRVRFCRVTGQSVQEHLLQQVFGRLEVTIEDMSEFVMFLNSYPRFCRQPYSMHLLLDECLFSRQMEMEHIMNFLLKEDTTGTENPGVLPIIGPGKVGKSTLIEHACDDERVRNHFSQIVLFNDDDLEDANILTLRDSGVIKHQNHATGGKRILIIIELTRDINEGAWRRLYSASKSHVASGSKIIVASRSEKIASFGTTQALRVKFFTQEAYWYFFKVRTFGSINAVEHPKLASVAMDIARELNGCFMGASIYSGLLKANINFQFWRRALAIIREFKKLNLLLYGAYFFDDPWQAVEPSYIRTVNKINSEYLLVLDDYQICSAPNMIHCHKNSAHSEDEVPMVNVKDFLFGNVKPQGKFKVLAWRSHLPPHYSYVFNYTQSILILNRRQCKHFVAVSEAIPAMDNTLVATSARVLPTMLAPDGDASLLSVSALDPVHTEKFPGYIVFSQLPVLVDPLSDLQNFRLHTSLMETFLSVILSDLATKSISFLINKCSKPTASNMEERLQRLLLRAQIIVEEAEDRLITNQRMLLQLNILRKEMFRGYYALDRFRCRGHEEDDAKDHQVSNSFAQSKFNPAKSVRFFRISGHSLQEQLQQVVGSIEVTLEDMSVFVMFLNSCPHLCRQPYSMHLLLDKCLFGRQMEIERIMNFLLKVDSPGSENPGVLPIIGRRKAGKSTLIEHACNDERVRNHFSQIVCFSDDDLKDADMVTLRHCGSIKNGNQCTGGERILIVIELIRDIDEVVWTRLYSASKSYVPNGSKIIVASQSDKIARFGTTQALRVELFTEEAYWYFFKVRTFGSMDAQEHPKMASMAMEMARELQGCFMGASIYSGLLKANFNARFWNMALASIREYKQTNLLVYGTYFENPWQASEPPYVRTVNKISSEYLVIHDEYHTCSVQNMVLCRTNFTRSEAEVPMLSMQDFLFGSVRPQGKFKVLAWKSHLPPYYNHMFNCEVQRKHHVVAKKKRSLELCS

SEQ ID NO: 178761 - protein, 631 aa, Oryza sativa
  unsure (1)..(631): unsure at all Xaa locations
  Clone ID: PAT_MRT4530_76286C.1.pep
MPSTRTPRPPTPPSTQLPTPTPSTPPSTWPPQVPSKRHVDVTWDKDQVNLPRGGGICGGGNAGDAKMDAQRIKAFNQYWDVKKLPLQVTVSEDIMPCTQIVFCVDDEADTMVPLSMVLPTQASQADNVPTRDATIKKVPTKKSSMSRDKATDQSMPNPDPWGEFDEVEYVGVSDEMENYNELVSDDEANDPDYTPDDDDGDEENADPVDDLEINDNRGCEPLIHITDVDNPRIEIGVTFEDGLCFKRXELAVPYSEATRYMAYCKAKRCKXRIHTSRLPDXKKMPYEHMCASIGKLENNCMTSNSWVKDKVINKLREDPTIGAAALKKTLEKKYLIKLSYYVVWDGRHMALDEILGGWEQSFEAVYSFKAEIKKRSPGKGIDAAVTRVFNNGVEHRECMRHLYNNFQKRFHGEVFERNLWPASRAYRKDVFDRHFNIMKEASPRSMQWIEENHQHLWARSTFSTSKCDYVTNNIAETFNSWIRLEKSLPVVELLDKIRQMIMERMCTRHKLSLKLQGNILGNVMKQLHDKSRNLNYNRHKSLPFVGEVSGANMDLTTWRHTVDLTKQECSCKEWQLTGLPCRHDISFIRSLREVDLENYVSPYYSVAMFRIAYSTIVPPMPDKSLWEKTTQ

SEQ ID NO: 178762 - protein, 475 aa, Oryza sativa
  Clone ID: PAT_MRT4530_76287C.1.pep
MASPSQEAVESTLAASPPMPPMSKWIPKGWIRLEKSLPVVELLDKIRQMIMERMCTWHKLSLKLQGNILGNVMKQLHDKSRNLNYNHHKSLPFVGEVSGANRNLTTWRHTVDLTKQECSYNEWQLIGLPCNSKSRDKATDQSMPNPDPWGEFDEVECVGVSDERENYNELVSDDEANDPDYTPEESDGDVENDDLVDDLEVNDNRGCEPLIHITDVDNPRIEVGVTFEDGICFNRCMRQYAVLKEVELAVPYSEATRYRAYCMAKKCKWRIHASRLPDGRTWQIKKMPYEHRCASTGKLENNCMAINSWVKDRVINKLREDPTIGAAALKKTLEEKYLITLVILCSMGWPYLGIDSTVLTGKWRGQLASAIGIDGHNWMFPVAYAVFGSETKENWEWFMVCLNKAIGSPEGLVLSTDAGKGIDATVTRVFNNGVEHRECMRHLYKNFQKRFHGEVFERNLWPASRASELCMQSCG

SEQ ID NO: 178763 - protein, 71 aa, Oryza sativa
  Clone ID: PAT_MRT4530_76288C.1.pep
LLRRRRRRREAGCVFILTIPNSPSKPQNYPVVDADGGPGPPGAWVGGEGPSRYSAIVDSGVSSGSRRCRWL

SEQ ID NO: 178764 - protein, 92 aa, Oryza sativa
  Clone ID: PAT_MRT4530_76289C.1.pep
MAASIDLTCSSSSSRLGSPAIASRRRATAAVASRPPPSHCRICRRIPPSRRARRRISPSRRACRRIHPAAPTASTAQRRETRYHAVPRFSSH

SEQ ID NO: 178765 - protein, 240 aa, Oryza sativa
  Clone ID: PAT_MRT4530_7628C.1.pep
MKAIGSGGEWWWNLPSLRRKPDRRRRGRRNTDPRGRRRGPPPEPLSSSSSESIGQSRGWPIDFPFTQAVTAASLTLTGDTIAQVRQRIVDRRLRGPEPDSKGLVPDLLMSHDWLRALRMASYGFLLYGPGSHAWYQFLDQCMPKPTFANLSTKVILNQIALGPCVIGVIFAWNNLWTGKLSELPSKYRNDALPTLLFGKRSARIHLFDFSTRMVPLSARVAFMSSCAIFWNFYLSTTMSK

SEQ ID NO: 178766 - protein, 68 aa, Oryza sativa
  Clone ID: PAT_MRT4530_76290C.1.pep
FATIQPLPILLNFLPISIFFEFRSLNLIHMTLHASKLNLLSLTSLFPFFFFFFFFFFFFFPTRPPTRP

SEQ ID NO: 178767 - protein, 41 aa, Oryza sativa
  Clone ID: PAT_MRT4530_76291C.1.pep
MELGLGTNLRCSLLYQINLLATNSYSFTRKRTLKSNKLTDE

SEQ ID NO: 178768 - protein, 76 aa, Oryza sativa
  Clone ID: PAT_MRT4530_76292C.1.pep
PPPTKKCPKSCKPNAKKAKVFLYKVVAYIQPPKQACLFFVGPPHLFLHHGRAGPLLMVFPQRPALHYIVRFIPFPL

SEQ ID NO: 178769 - protein, 379 aa, Oryza sativa
  Clone ID: PAT_MRT4530_76293C.1.pep
MGWRPAAAARAVLLREARHLRPGPAHYEKTLVATKPMIQKAIQELYSAVLPRTMLVADMGCSSGPNTLNFIFEVIKATSEYCQRIEQLDNLVAKDQNREAAILPKYYVVGLPRSYYTRVFPDKSVHLFHSSYSLHWRSQMFQESNNGEFLNEGNIYIAKTTPKSVIKLYQELFYDDFSKFLELRYQELVSGGQMVLSFLARKKDDLYDGNLSVLYGLISQALQSLVMEGLVEKEKLDSFNIPNYEPSIHEVKTVVISSKLFTINKIYVFESNWDPYDDSSDQGQATNINPIKSGLNVAKCIRAVLEPLIASHFGESILDVLFSRFAHYASIKPTFKETKCRTDIRPNYRRSGFGDNQFSGDEHGLLFCWDRSDRAEVAG

SEQ ID NO: 178770 - protein, 123 aa, Oryza sativa
  Clone ID: PAT_MRT4530_76294C.1.pep
MDGDLYGCRPNDLLMGRPIPTSTSAGSRRDVGTWLSADDMTIVRPVTNRSFLSTTRQFINLHVRPSSYNILPVMVRMKPGIYLTGTNVPSPRANTPAPARDECLEALVLTGWGEACVRPPIAS

SEQ ID NO: 178771 - protein, 129 aa, Oryza sativa
  unsure (1)..(129): unsure at all Xaa locations
  Clone ID: PAT_MRT4530_76295C.1.pep
LNANFILHSSYINYTASLSRRSIGMGIMFAYAITLCHDDDIRVVSGSLGVMSRLLSIIIWGYMLRKRGGPLMVTSQYWYSSARLYSHKLISXGGYSSVFSPGYMVMIGCRKELGSQGWLLEVPGEHRKE

SEQ ID NO: 178772 - protein, 133 aa, Oryza sativa
  Clone ID: PAT_MRT4530_76296C.1.pep
MAKGRKQIPSSVPLYPCQRCARLLASRAHYFAPSFLAPTLALIPFTRLRRMRHNRPRGLAPSGDVGPEGDVFALLLVPPRGSGCTPLGPEGRGAPTPRGFSLRVYGLDRSDRGLGDGRRSDAHLAPSRKDEGF

SEQ ID NO: 178773 - protein, 43 aa, Oryza sativa
  Clone ID: PAT_MRT4530_76297C.1.pep
QIERLDVGTHYLLRLNVLGNCIDILYLRYYDLLIVVYSLRTRK

SEQ ID NO: 178774 - protein, 103 aa, Oryza sativa
  Clone ID: PAT_MRT4530_76298C.1.pep
ESVEEKPLSGLIRINTENFRFPKLGVYTTLTARLVNVLDTDVLWTLRSSTFHRNNRCFVAYEISIGSPRCRARQPTLTARLVDVLDTDVIFDIPPKQPLLRGI

SEQ ID NO: 178775 - protein, 147 aa, Oryza sativa
  Clone ID: PAT_MRT4530_76299C.1.pep
MATSAGAPVAAGGGRIALNRFSVLDLMACRCPLPDGDAPPATAPHLKPVTVRVVISSAQRIIPMALRHRVSLPAERIHRSSSPRLDPTLRRRGSVSTKASTSSLLLDHAVRRWKRRRISIPSLTLLELLALSMAWIGICKQQSTTSY

SEQ ID NO: 178776 - protein, 802 aa, Oryza sativa
  Clone ID: PAT_MRT4530_7629C.1.pep
MAFWDSKDMTVMPSLRHRAVAKKPKWIIILVSLDWLPSVTRRERTDEEIISSVVLRDILAMPMPVSKNPKIALMFLTPGTLPFEKLWEKFLQGQEGRYSIYVHASREKPVHTSSLFVGRDIHSDAVVWGKISMVDAEKRLLANALADVDNQFFVLLSDSFRDPGPHGNGRYSPEMLPEIEEKDFRKGAQMVDPGGIANWSVTHVDWSEGKWHPRSYRAADVTYDLLKNITAVDENFHVTSDDKITWTAHTTTQQGLPYRRRKDWLPNSLNKSMREGYWLGTGPRASHVAPLTSLHVAPLPTLPSTFPSLPPRLANQPPISKMLHFLSSSSPLNPQFLLLPRQSARLRVLLSIPVSAMSSSSSSSSRGALAAAAVPSLSADEAGAAADEAFLRYTSPSMRRSGGGGVAIVWFRNDLRVLDNEAVVRAWAASDAVLPVYCVDPRISAGSTHYFGFPKTGALRAQFLIECLEDLKRNLTKQGLDLLIRHGKPEDILPSIAKAVTAHTVYAHKETCSEELLVEHLVRKGLEQVVIPQGGASNQKKPRNPKLQLIWGATLYHVDDLPFSVNNLPDAVESKSSVRNCSKLPPSLGPPPGSGLDEIGEKGMHFVGGESAALGRVHEYFWKKDQLKVYKETRNGMLGPDYSTKFSPWLASGSLSPRYICEEVKRYEKQRIANDSTYWYPLIDANMKELLATGFMSNRGRQIVCSFLVRDMGIDWRMGAEWFETCLLDYDPASNYGVGNDPREDRYFSIPKQAKTYDPDGEYVAYWLPELRSIAKERRNFPGASYIKQNFSFRGVEDGVAK

SEQ ID NO: 178777 - protein, 50 aa, Oryza sativa
  Clone ID: PAT_MRT4530_762C.1.pep
LPRARYDLSRLPQPHIHLMRRKRANGISGSMGARNEGAKQWAREARSRDS

SEQ ID NO: 178778 - protein, 218 aa, Oryza sativa
  unsure (1)..(218): unsure at all Xaa locations
  Clone ID: PAT_MRT4530_76300C.1.pep
CKIKCVFDYYSVINNWHRRLLVLLFGIYFRSGFGDDWISQVNLHVLLSFMCPVRPGSGCRLELMHVVDGDFIWHTMEVLCVYGMRSRIWKESKFVMIGYVKFVSCTRGFPKVFKIFSISLVRGFRLSISGINRGRAGFDGLTGGQTGRSEAVRPTAATARSSXSRRSDLXSIPVRPAAFERSDRQINLGQTDLHRFRGIHEARQIINGTSNKVLIIIT

SEQ ID NO: 178779 - protein, 64 aa, Oryza sativa
  Clone ID: PAT_MRT4530_76301C.1.pep
GVIMHLCRATYSKFSSMLPDKKAWTHAILQYCTTWDLYLPRPTASDPFIILSLLQLSVNILQYN

SEQ ID NO: 178780 - protein, 200 aa, Oryza sativa
  unsure (1)..(200): unsure at all Xaa locations
  Clone ID: PAT_MRT4530_76303C.1.pep
LAHALYVDKIGIDCKIKGVFDDYSVMNNWXHRRLLVLLFGIYLRSSFGDDWISYVIAGFIISCXPVRPSSGSWLELMHVVDGDSIWHMMEVLCAYGMWSRIWKESKFGTIGYVKFLSXTRGFPKVFRTLSISFVRSFRLPTSCINRGGASDRRQXGGQTGGSTAVSQQRRQRAAADLGGRTRAVDRQCPPPLARAPRGAT

SEQ ID NO: 178781 - protein, 275 aa, Oryza sativa
  Clone ID: PAT_MRT4530_76304C.1.pep
MGKDKQCETVDAVGMVPMEEEKKSKEEIHLKIKSKDKSSGDEDEKKEIEIEVKAKIVDKEEVKLDSDDGAKSAVKSKDSKKDKENKKSDKKDDEHDDEDEEGKKKEKEMKEKKKDKSDKKEEGKKKKDGDEEEGKKKEKKKDKDGDEKEGKKEKKKDKDGDEEEEGKKKEKKKKDKGDKEKTNDPAKLKAKLEKIDTKIQDLQAKKEDILRQLKEQLKEELEGGKSKNAIEEKPAQTLEKGIEHNKPIEEKPAETVEGSRECKNNEKEETHVAAA

SEQ ID NO: 178782 - protein, 193 aa, Oryza sativa
  unsure (1)..(193): unsure at all Xaa locations
  Clone ID: PAT_MRT4530_76305C.1.pep
KIKGVFDYYSVMNNWAXRLLVLLFGIYSQSGFGDDWIXHVNRRIVISCDXVRPGIVYRLELMHVVDGDFIWHTMEVLCAYDMRSRIWKESKFGTIGYIKFLSCIRGFPKVFRTRSMSLVRGFRLATSCINRGGAVRLAASGGQTGGSTAVRPAAAATGAAGYFGGQTGDSIPVRPAASTRLDQQDNFGQTAIR

SEQ ID NO: 178783 - protein, 116 aa, Oryza sativa
  unsure (1)..(116): unsure at all Xaa locations
  Clone ID: PAT_MRT4530_76306C.1.pep
MLCEEGQTCTLLSXHAVDKNDRFVTGLTLLMSSAHSHVPTTRLPPAEVEVEKNTGVGYYASQRPEPVYIVRVSRFFLARDLSTYRESLRSHPKPPAEPAKGGLRGLPVRSHELRQY

SEQ ID NO: 178784 - protein, 352 aa, Oryza sativa
  Clone ID: PAT_MRT4530_76307C.1.pep
FRWVSPSRAVPLQSPLPPQFFGGAMGVFTTRTLLNSVGVAQSRATSGAVAINWILKDGAGRVGKMLFARQGKKFDYDLKQLRFSGDLLMELGAGIELATAAFPQLFLPMACIANVVKNVAAVTSTSTRTPIYKAYAKGENIGDVTAKGESVGNIADLSYHEVRSVVLNTLNTARFTVAVDSFIKSGHVPSLKEGNSQETIFNPPWRHQPVAIGSRFGEAFQEPASFVAIRPLFEDERYIVTYNPTKDKVYALLKDQAKPDDILKAAFHAHVLLHFINASHANLNARKRMNSNRSYQNANPLNMDFIPHIAESCKIVTSSYGVFKKKAREQGWIMSESLLNPGRARLCGIVPQ

SEQ ID NO: 178785 - protein, 353 aa, Oryza sativa
  unsure (1)..(353): unsure at all Xaa locations
  Clone ID: PAT_MRT4530_76308C.1.pep
MCLRDGFSDNELLDDFSXGEIQPNQIGTIIVINNLVYRDHPSLKLRGVPKDVRSHDIERVRNKEQLSTXVGCGRVHRIIENDLDKCXVVVPNLPTKTDDLSHSTGHGWTTREKVVNGXFLANLHWCSRDNSTCSLVLEPXHVAISRTXNFHWCPRDNSTRSLVLELWLRNSYDWSSTGSVAALIPRLQMIERHLXLVLNQSIVAISRTFTSSGRVTTTIWSSTSGVAILPLFPLQVVEYDYYLVLDQKGSXSSTTFTSTKLISSTQCCQVFYPEIPYHDXHLAFKPILMSLYAVLTRPPRNLRELRLGTPRADKALSNPVETKDHALCLLDHSRTVGGSQQGIRNEEMVYSPR

SEQ ID NO: 178786 - protein, 202 aa, Oryza sativa
  unsure (1)..(202): unsure at all Xaa locations
  Clone ID: PAT_MRT4530_76309C.1.pep
CKINVCFDSYSVLNNWHLXLLVLSFGDYCRSGFGXIGFTGGVILCGPVRPGGGCRLELMHVVDGDSIWHTMKVLCAYGMRSRIWKESKFGTIGYVKFLSCTRGFPKVFRTLSMSMVRGFRLPTSCINRGGASNRRHIGGQTGXKAAVRPAGSWRSYRRRHQXSRGDLGAVGPGNLHRSDRRHKLGQTDTRCHAGSGTGRIGG

SEQ ID NO: 178787 - protein, 121 aa, Oryza sativa
  Clone ID: PAT_MRT4530_7630C.1.pep
MCPWMRTKVRRTYALTELNLQSAPERQVYAILKDRVFGHIRAYDADLLTKTGWEGFVLVDEHGACFLTIQYLCTLRDVGDGITFRFFGTEYHLSVKNLSLHLGFNKRCSVDLETMTLGVFG

SEQ ID NO: 178788 - protein, 404 aa, Oryza sativa
  Clone ID: PAT_MRT4530_76310C.1.pep
MKDIVVSKSGPPVLVTPSSEPTPAAATIRLTSADKSRLGLSFTAFLVFERRRRRSRVHRPAETVRRALSRALVHYYPLAGHVVAAGDDDNVVLSCTGEGGGLPFVAATASCTLEDVDDGDGDLPLADLAIWYGGESCWMSDPLLMMQVTEFECGGFVVGVTWNHGVADTYGLAQFLRAVGELACGLPSPSVIPVSFVNRVKAEFVSRNGGGGGRRRCSVFDVVTAAIWQCRTRAIHGRRCRSDAPAVLLFAVNARPHIGAKDGYYGNCITRQVVASTADAVAYGDIVDVVKLVNDAKERIPEELLRNKLRGKQGVDGGGGEGLFVGPMHRLYVSSWAGLGLDGIDFGGGKPARVIPRMEVTVMPSCLPCLPCSRSNGSDGVNAVAWCVTDEHVDVFRAELAKLQ

SEQ ID NO: 178789 - protein, 180 aa, Oryza sativa
  Clone ID: PAT_MRT4530_76311C.1.pep
MGGRQRQAAGEPVAPRRVSAIAWGGRLVPTWRCLGTGGRIGRGRRHVEPDGRVTEGEEAWAARPPLRSLCFEASTPTRRDTWLRASLTVLTWNGCEIKEDDVFQPLHLVYHDEPLASPRRGDSGEPADKLVGDIGSCPMCPRPTYGGSLDGRQGLRLLYQQEDTGARNRFSREAREGRIT

SEQ ID NO: 178790 - protein, 51 aa, Oryza sativa
  Clone ID: PAT_MRT4530_76312C.1.pep
LNSDNFYKNHHVIIVTHTILLSMYYSQTSLSSNIQFQYFSISFIVFWGNKC

SEQ ID NO: 178791 - protein, 436 aa, Oryza sativa
  Clone ID: PAT_MRT4530_76313C.1.pep
MWDQGAPAAFRHVASRSFFTRRTLVHIRPTAFLPVPPVCHPGVCIIVHIAAAFINMLTLMMKNNCNDDDIGNVYLRTQIAGQDNKSGEGADFMDDGTFTLLKDLVTESRTSSPYYEKDHQLNSLNYVNQDGHGIPTTTNPTWDLTQSCNPLNHSLTEDSVPFNVGTSAGVLTNATSNDFIPIDELAITSGRYGVLPSIEKTEEGSIAIDEANSFGATATMCYNSVHFSHWIDQNLTGPLPDLADLPDIYPDSFLPTPRKNITLVLDLDETLIHSSAVDRDGADFSFPMYHGLKEHTVYVKKRPHVDTFLQKVSEMFKVVIFTASLSSYANRLLDMLDPKNIFFTKRYFRDSCLPVDGSYLKDLTVIVADLAKVVIIDNSPEVFRLQEENGIPIESWTSDPADKSLVELIPFLEAIAVADDVRPIIAQMLGRPRSIA

SEQ ID NO: 178792 - protein, 403 aa, Oryza sativa
  Clone ID: PAT_MRT4530_76314C.1.pep
MTREGVQQYSIMQSPSKVSEASGSAPPATSVIEGWAELPEGLLHSIVALLGSFLDLLAFTGTCHSWRAAFSSYPSKSNFRTILPPLLVRPNVRVKAPYSSNGHRKLRSCEVIDLANRNTPLRCQIPQETLQRMHFAGSSHGQLICCRRGYCLVVDVFTGAEVSPPRLPFSENCDEFYYCGILTAPITSPNSHLIISTQSSLFDWPVGSDSWSELKLPVNRVDQIVEFNGQLIAVIEYSLYTLQLAPILRLEKIKTLWWDNMNECPYMRPWFVVCGDMLLIVDHYISFSFGAPVLYRPYRLDMSTKPAKWVEVKKLENWALFIGGDARSPPFSFKNPERWGGRSNCLYYAHYSQPLSLHGLGDDADAVWDPNTDDNLVFKRNWYRQLQALWVYPSMFYSAGDGQ

SEQ ID NO: 178793 - protein, 120 aa, Oryza sativa
  Clone ID: PAT_MRT4530_76316C.1.pep
TREDEEESLRGEFSKDEYKEEKSWGEELKDEKLLREWLQPSEGEKFPKHQWEVRWWVWRKLEEALDSNKDDPSSLMKEREEWLKEEEHKFRSETVGKDWPNISHVPYIRVNEQIVQNLYI

SEQ ID NO: 178794 - protein, 94 aa, Oryza sativa
  Clone ID: PAT_MRT4530_76317C.1.pep
MSHVSSFCGSAAGVKPQGIYEYKYKPPRRRGVTPQRLKATSQHTSPDINIRYKSRHTPSDSYGGWQEGSSTISDLAEYGFEEEDYPVVDYGLVI

SEQ ID NO: 178795 - protein, 94 aa, Oryza sativa
  Clone ID: PAT_MRT4530_76318C.1.pep
MLCWPLYSEQKMNKVLMVEDMGIAVEMVGWQQGLVTAEEVEAKVRLVMESEAGNQLRARVTTHKEAAAVAWGDGGSSRAAFAEFLLDADSRQSH

SEQ ID NO: 178796 - protein, 107 aa, Oryza sativa
  Clone ID: PAT_MRT4530_76319C.1.pep
MKDFFVISRVQGLKWKMVTDIYLSIPIPVPIPILNPIGATYSPSLHCHRRQDLSAAVASIPSGPPSSPAATAPHHQVVLGIEEGGSGFASGRGRQRQPHSGGSALPP

SEQ ID NO: 178797 - protein, 531 aa, Oryza sativa
  Clone ID: PAT_MRT4530_7631C.1.pep
MLHFLSSSSPLNPQFLLLPRQSARLRVLLSIPVSAMSSSSSSSSRGALAAAAVPSLSADEAGAAADEAFLRYTSPSMRRSGGGGVAIVWFRNDLRVLDNEAVVRAWAASDAVLPVYCVDPRISAGSTHYFGFPKTGALRAQFLIECLEDLKRNLTKQGLDLLIRHGKPEDILPSIAKAVTAHTVYAHKETCSEELLVEHLVRKGLEQVVIPQGGASNQKKPRNPKLQLIWGATLYHVDDLPFSVNNLPDVYTQFRKAVESKSSVRNCSKLPPSLGPPPGSGLDEIGGWGTVPTLESLGLSMTKAEKGMHFVGGESAALGRVHEYFWKKDQLKVYKETRNGMLGPDYSTKFSPWLASGSLSPRYICEEVKRYEKQRIANDSTYWYPLIDANMKELLATGFMSNRGRQIVCSFLVRDMGIDWRMGAEWFETCLLDYDPASNYGNWTYGAGVGNDPREDRYFSIPKQAKTYDPDGEYVAYWLPELRSIAKERRNFPGASYIKQVVPLKFDGGHQKRDQQFNRQRRPGHMYRRQK

SEQ ID NO: 178798 - protein, 46 aa, Oryza sativa
  Clone ID: PAT_MRT4530_76320C.1.pep
HTKPILSEVASYKFCTTLLPHISTDCQCVTSESFLHITISVTYTFT

SEQ ID NO: 178799 - protein, 64 aa, Oryza sativa
  Clone ID: PAT_MRT4530_76321C.1.pep
MANAGSGGSGGEGNGCGPLADPMRQQHSPALSCTDLAAGSDVGGRMDYGEYHDVGGGCDEDISL

SEQ ID NO: 178800 - protein, 264 aa, Oryza sativa
  Clone ID: PAT_MRT4530_76322C.1.pep
MWANQSYHQVLDTDSHNEMEVVLMLARMIGPKEKKDSNIIPSHPRAIKSDNGEYNHVVIRLRVIGFIDDPNSILVRTELSVFMVDIESNGYQQLSWRINFATVYPYVSFYSTDMFGQKSAAKSLLEIRVVSDMDIFCNLGIKSTSTLIHLKASFWTCTGVKQISQASCFYINTFATYHASTRTSGTYTASAREISGFGFSHHRQDVIPMPGSYFTNDDSYHTAMIGSCNSPEHAGTDDCDCQSMKFHITIALTTYPTSVWMTAT

SEQ ID NO: 178801 - protein, 100 aa, Oryza sativa
  Clone ID: PAT_MRT4530_76323C.1.pep
MAQQQRRRRRGGSLAVLLLLLLLAALLLSLSLLARVDAAATVSSANLDWNEGEVAVATPLGQEAVAAAEEEGDRPPERVEMESINDYGQASANNRHNPHP

SEQ ID NO: 178802 - protein, 198 aa, Oryza sativa
  unsure (1)..(198): unsure at all Xaa locations
  Clone ID: PAT_MRT4530_76324C.1.pep
SVECKIKGVFDYYSVMNNXTXRLLVLIFGIYLRSGFGDDWISXGDLQVLLXCGPVRPGRCCRSDRLHVVGEDSIXHTMEVLCAYGMWSRIWKESKFGMSGYVKFVSCTRRFPMRIRTSSMSLVRGFRLPTSCINREGASNWWHTGGQTGGVRAVRPALTXVTGADLGGQTRDTISVRPTVTRRSDRHIYFGRTAICRI

SEQ ID NO: 178803 - protein, 160 aa, Oryza sativa
  unsure (1)..(160): unsure at all Xaa locations
  Clone ID: PAT_MRT4530_76325C.1.pep
VSSCCCVVVFCVSPWQVAATTTANGAGGGGRPRVPAVLVFGDSIVDTGNNNAVLTLTRSNFRPYGKDLNGGEPTGRFSNGRIPPDFLGQPIRLHGRRSFISSFESSSMAAYXSCAASRLGLKDLVPAYLGTDLTDGDLLTGVSFASAGSGYDPLTSTLVV

SEQ ID NO: 178804 - protein, 127 aa, Oryza sativa
  unsure (1)..(127): unsure at all Xaa locations
  Clone ID: PAT_MRT4530_76326C.1.pep
MLFEEGQTCTLLNRRVVDKNDRFVTGLSLLMSSAHSHLPTTCSPQAEVEIHQNTGVGCYASQRPEPVYIVRVSCSFXASNLSTYRESLXHHPEPPAEPAKGGPCGLPVRSPALRQGPFYTAGQLISK

SEQ ID NO: 178805 - protein, 194 aa, Oryza sativa
  unsure (1)..(194): unsure at all Xaa locations
  Clone ID: PAT_MRT4530_76327C.1.pep
INVCFDSYSVMNNWHLXLLILIFGIYSRSGFGDDWISQVIYRRILLNCGPVRPGXCGRLELMHVVDGDSIWHTMEVLCAYGMRSXIWKESKFGTIGYVKFVSCTRGFPKVFRTPSMSLVRGFRLPTSCINRGGASDRRRTSGQTGXSEAVRPAATSHAADDXRRLDRXSTPVRPAARARLDRRINFGQTDLHRI

SEQ ID NO: 178806 - protein, 258 aa, Oryza sativa
  unsure (1)..(258): unsure at all Xaa locations
  Clone ID: PAT_MRT4530_76328C.1.pep
LLVLIFGDYRRSGFGDNQFSGDDRIHCYFMCPVRPGGGCXLELMHVVDGDSIWHTMEVLCAYGMQSRIWKEFKFGMIGYVKFVSCTRGFPKVFRTLSMSLVRGFRLPTSCINRGGASDRRQGGGQTGGSTAVRPAAXGRRGRRLRRSDRXSTPVRPAASTRSDRQINLGQTDFRRFRGCHLPPHIASQRVPSSNSPYSESYYNSLAVVLQRRDWENPGVTQLNRLAAHPPFASWRNSEEARTDRPSQQLRSLNGEWRL

SEQ ID NO: 178807 - protein, 336 aa, Oryza sativa
  unsure (1)..(336): unsure at all Xaa locations
  Clone ID: PAT_MRT4530_76329C.1.pep
RQGRIRCEQNNGCQIPGNSLDDRDVPGIKEKNMSKKAQEKIKLKNSLGCKIKGVFDYYSVMNNWAXRLLVLLFGIYSRSGFGDGWIXQVNRRFIISCXLVRPGRCGRLELMHIVDGDSIXHTMEVLCAYGMRSRIWKVSKFGTIGYVKFLSCTRGFPKMFRILSMSLVRGFRLPTSGINIGGASDRRQGGGQTGGRSAVRPTVXQARHASRRFDRSXSTSVRPTFIRWSDRRIHIGQTAIRRIRGWSRTRGGNSAGATGLQQGGEAPTDRVAYREYARGTHSNGEVRQTRQVRARRRASAGIIAHAATSRRYTDALVENHQTPAPRNWLYYPPSLR

SEQ ID NO: 178808 - protein, 359 aa, Oryza sativa
  Clone ID: PAT_MRT4530_7632C.1.pep
MTVMPSLRHRAVAKKPKWIIILVSLVCFVLIGAYVFPPRRYSQCYLFGSGACATFKDWLPSVTRRERTDEEIISSVVLRDILAMPMPVSKNPKIALMFLTPGTLPFEKLWEKFLQGQEGRYSIYVHASREKPVHTSSLFVGRDIHSDAVVWGKISMVDAEKRLLANALADVDNQFFVLLSDSCVPLHTFDYVYNYLMGTNISFIDCFRDPGPHGNGRYSPEMLPEIEEKDFRKGAQWFAITRRHALLILADSLYYKKFKLYCKMVDPGGIANWSVTHVDWSEGKWHPRSYRAADVTYDLLKNITAVDENFHVTSDDKKLMTQKPCLWNGSKRPCYLFARKFYPETLDNLLKLFTSYTSV

SEQ ID NO: 178809 - protein, 277 aa, Oryza sativa
  unsure (1)..(277): unsure at all Xaa locations
  Clone ID: PAT_MRT4530_76330C.1.pep
REQGGEAPEPNGGPRPPTAGAGPPPACPTVPGAPDPXDGPEATAGRPHLSPSDPEANPVPIRSGREQGEEAPEPNGGLRPLTTGVGPLPACPTTPGAPDPQDGPEATVGRPPLSSSDPEVVGTEDECAPRGRLGEEHPRDAAPSEEDRPHRKVQRPIYFVIEALRDAKTRYPQAQKMLYAILMTSRKLRHYFQAHRVTVVTSYPLGQILHNREGTGRVVKWAIELSEFDLHFEPSHAIKSXALADFVVEWTPAPKLVSAPEASSSPSQLPHTALWVM

SEQ ID NO: 178810 - protein, 223 aa, Oryza sativa
  unsure (1)..(223): unsure at all Xaa locations
  Clone ID: PAT_MRT4530_76331C.1.pep
HCKIKCVFDYYSVMNNWXWRLLVLLFGIYSRSGFGDDWIXQVNHRFIILCXPVRPGRCCRLELMHVVDGDSIWHTMELLCAYGMWSRIWKESKFGTIDYVKFLSCTNGFSKVFRTPSMSLVRGFRLPTSCINRGGASNRQLTGGQTGGIAAVKPAGARRSDRRWRQARQATSAVRPEIQHRSDRQINLGQTDFRRFRGIGKGRHQSAQTLHNSIATAETETDS

SEQ ID NO: 178811 - protein, 405 aa, Oryza sativa
  Clone ID: PAT_MRT4530_76332C.1.pep
MESSRNGDVTVTYEHQLFGRRRNVAGGGGGFATYLDLVREEGDAGKMPPRRPLPAPPPHGVASWRRTYADGELDVFAAERYFKGAMDGADGYNKVDLASPVMAAAAARPAVAVSRPAPWTTRASVASAGSSGSTANSQAVLLREQRRRDKCCAHVGGILRSCSGKRSVHVGGAAVAATEPAGDPGDELPPATASRIEWYRDLRLDKAGDGVSHGGVVAAGLPPNLNSIGAARVAAIGREEGTAATSEYSSSSFRSNFTLLAPVKVTIPASGGDDDDDDVGSESSSDLFEIKSLMIDDCRGYEPSEASVQWSVVTASAADVSVAASGRGGGGGGKGRPAAAVAVRQQQHRRQADRPVGLLAGCVSHRAVDVSAVAAVCRPPPPPGAPATATRRRSDLSRFAHSGHL

SEQ ID NO: 178812 - protein, 243 aa, Oryza sativa
  unsure (1)..(243): unsure at all Xaa locations
  Clone ID: PAT_MRT4530_76333C.1.pep
SGDGVVGDKRRARARALKDTCLSFALFKLLKRRPPFVQGERRPSRRRPVACKIKVCFDAYLVMNNWHLXLLVLIFGDYCRSGFGXIGLTGAVILCGPVRPGGGCRLELMHMVDGDSIWHTMEVLCAYGMRSRIWKESKFGTIGYVKFLSCTRRFPKLFSTLNMSLVRGFRLPTSCINREGASNRHLTGGQTGDLLAVKPTKARRSDRRXFRRLNRXSTPVRPAARARSDRRINFGQTAIHRIR

SEQ ID NO: 178813 - protein, 89 aa, Oryza sativa
  Clone ID: PAT_MRT4530_76334C.1.pep
SVFPFGKRVFGLKHFMLVSSLFWELGLSFFSFRFVCFFTLSSVVSFCQGTAFPSVPRVFMVLPRCKTGPPSGPWPAFPGRSRCPRKTQE

SEQ ID NO: 178814 - protein, 194 aa, Oryza sativa
  unsure (1)..(194): unsure at all Xaa locations
  Clone ID: PAT_MRT4530_76335C.1.pep
KIKSVFDYYFVMNNWHRRLLVLIFRFYSQSGFGDDWISQVNLQVLLXLDPVRPGMCCRLEXIHVVGEDSIWHTMEVLCTYGMRSRICKESKFGMIGCVKFVSCTRGFPKVFRTSSMSLVRGFRLPISGINRGGASDRRHRGGQTGGHTAVRPATATGSGRRSWRFDRSLSSVRPTCSRWLDRCNTFGQTAIRRI

SEQ ID NO: 178815 - protein, 140 aa, Oryza sativa
  Clone ID: PAT_MRT4530_76336C.1.pep
MHHFPLFSVGISPTFSEIDGDLHGCRSSHLLMERPAPTSTFAGSRRDVESWLSAGDMTGVRMVTNRSFLSTTRQLSYLHVGSPSHYILPVMVRMKPGIYLIRANVPSLGGNTLAPAGDERLEALDLTGWGEACVRPPAAT

SEQ ID NO: 178816 - protein, 94 aa, Oryza sativa
  Clone ID: PAT_MRT4530_76337C.1.pep
RGEGDPEKFPAPFGGAPKKGISPEGREPLAKRVLVATRAVPPRAKSPKKGPAPPKRSPPKKLPSEQRKARFFEKLNAFPSPPGADDEAEERVSE

SEQ ID NO: 178817 - protein, 114 aa, Oryza sativa
  Clone ID: PAT_MRT4530_76338C.1.pep
KSNFTIMDKPGKHRHAFAQGTTMTRVISRKGKRISLNVEGRIEHTLTPWMEGSTSLPNGRTLFLLCKTKHLARGESRPFPTVNSKRAGTLYEGQRMRPQTNPINSARAKCTHVQ

SEQ ID NO: 178818 - protein, 96 aa, Oryza sativa
  Clone ID: PAT_MRT4530_76339C.1.pep
RPGSYLSFSVSLPVAGEIHTALSCLSPSLSLLQAVVAASVSLPAPLPLHLPALVLPSEGTVTAATARSSGLILPSTTASTVDDLADGSIGVEVGGC

SEQ ID NO: 178819 - protein, 157 aa, Oryza sativa
  unsure (1)..(157): unsure at all Xaa locations
  Clone ID: PAT_MRT4530_7633C.1.pep
ITSEFPGVTGVDEDGDDLAIPTVAFQSDDDDRSGGGARLNSRRRRRCKGXRGGGATGGGELRRGWRRIEEVPGVLLXGLGGGDGGPRRSATRRKXRVRXRETNTNQTRIRRFPNKIRRSFYKRKDRGDQGDHFPSTNLTGSGKTRPNLEGAAAARGG

SEQ ID NO: 178820 - protein, 70 aa, Oryza sativa
  Clone ID: PAT_MRT4530_76340C.1.pep
TYAYAWADAWADAWPAIYPSIYSALRPPANSPQQWRPSSPSSLSPGRASPAVQFPAGAGRGPGPALCRHP

SEQ ID NO: 178821 - protein, 286 aa, Oryza sativa
  Clone ID: PAT_MRT4530_76341C.1.pep
MPSPLRGSPESQFTINADADPVIAAFSDLLKNGQRQMRYRLKKKYFNGIPANEVRTTSPLSSMTDNEWKQLVDMWSTPKHKEKCIKNKDSRELVQYHQMTGSRSYVAQCYVMKQTKFKDVPPTAIDIFKDTHCSSKSGFNENAKDAIAQMEAYVAQPTEEGKDPKTPVEAVAHVLPKSTFLRNVGMQSTEMKKNAKAAAMNDHVRELESELHAEKMGSARMQLQIADLHKQLEDQKEVARKNEEETEKLRHQGSEIQSFLRSLFGSKFASSDAQQCAAVALDVGGR

SEQ ID NO: 178822 - protein, 35 aa, Oryza sativa
  Clone ID: PAT_MRT4530_76342C.1.pep
SADFFNYKGRVYVTNFVCDLPPSLSCILGKRSDYG

SEQ ID NO: 178823 - protein, 85 aa, Oryza sativa
  Clone ID: PAT_MRT4530_76343C.1.pep
CVVNIGVKLKERSFACKNLEVVNIRCSKDDGRVHMLAELFGANGLPLEKIFVRRTGSTYLRNMKKMRKIARDELRKARWFQLLNL

SEQ ID NO: 178824 - protein, 146 aa, Oryza sativa
  unsure (1)..(146): unsure at all Xaa locations
  Clone ID: PAT_MRT4530_76344C.1.pep
KSPGKEQEITIKSSGGLSESDMKKMVXAELHFQKDQERKSLIDLKNSADTTIYSIEKSVSEYKDKVPAEVTNEIQSAVSDLRAAMAEDDLEKIKQKLEAANKAVSKIGEHMQQGGGGGSGGGSSSSSGGDQTPEAEYQDAAKEAKM

SEQ ID NO: 178825 - protein, 345 aa, Oryza sativa
  Clone ID: PAT_MRT4530_76345C.1.pep
TTLLCEAIARRLFPRDSSPDYAQLSDEHYAYSVLRRLRREALVPLRDVLQLPEVYMSARRWSELPYTRVASVAMRRYKALFKKHDEDRFAQYLAAVEEGKAKIAAGALLPHEIASAAMRGEEDDVSELQWRRMVDDLRAKGSLRNCISVCDVSGSMSGTPMDVCVALGVLTSELSEEPWAGRVITFSARPQLHMIKGKTLAEKLRFVQRMDWCMNTNFQAVFDQILRTAVDGRLPPEKMIRTVFVFSDMEFDEASTNHWETDYETICRKFGSAGYGDAVPQIVFWNLRDSTSTPVTSTQPGVAMVSGFSKNLLKIFLQNDGVVNPEAVMAAAIAGEEYQKLVVFD

SEQ ID NO: 178826 - protein, 295 aa, Oryza sativa
  unsure (1)..(295): unsure at all Xaa locations
  Clone ID: PAT_MRT4530_76346C.1.pep
EEKFKKINHVYTYMYGSDEEDESKVAAAEWVRSKKVVPCQWVRSSGKRGKFDFDITKVDKIFDLXLREKQIQLPAGHVIPSAEELGKRRYCKWHNFGSHNTNDCKVFRQQIXVSIEGGKIKFDDSKKPMKVDSNPFPVNMVHTARRSVDERKTRGCQLNSTRIINKYQRRYANQQERYCEEDDGGFDPHWDCGFFRFCWNEEMRLPSINDXPGCSNNAGSLSRPYNRGNRLNQERMSVRXRLGPVNQDCYQDGYEGRKTQWVLLVFFTKNQKRRVQRIRNRERFQEVEQEINHRG

SEQ ID NO: 178827 - protein, 488 aa, Oryza sativa
  Clone ID: PAT_MRT4530_76347C.1.pep
MENAPATTTSSTQDGGGGAGGHVFLLAFPEAQGHVNPILQFGRHLAAHHGFLPTLVTTRHVLSTVPPPLAPFRVAAISDGFDSGGMAACGDAREYTRRLADVGSETLGVLLRSEAAAGRPPRVLVYDPHLPWAGRVARGAGVPAAAFFSQPCAVDVIYGEVWAGRVGLPVVDGGALRGLLSVELGPEDVPSFVKAPESYPPFLEAVLGQFDGLEDADDVLVNSFQELEPKRELEKVEDLIAAMLLLNQEADYLASAWRFKTIGPTVPSFYLDDDRLQPNKNYGFNISDSTSPCLAWLDNQPPCSVVYASYGTVADLDPTQLDELGNGFCNSGKPFLWVVRSCDEHKLSEELRDKCKERGLIVSWCPQLEVLSHKATGCFLTHCGWNSTTEAIVTGVPLLAMPQWTDQPTTAKYIESAWGNGVRVHRDKEGMVRKEEVERCIREVLESERKAEYRKNANRWMKKAKEAMKKGGSSNKNIAEFASKYASY

SEQ ID NO: 178828 - protein, 81 aa, Oryza sativa
  Clone ID: PAT_MRT4530_76348C.1.pep
GGHQHVRRPPAGPAQERVAVPGPPVRPPRDGHCRPLYAHHRRHVRPPVPRLEDRGPSLQRVLGFELIPPPISPPNLWVFGL

SEQ ID NO: 178829 - protein, 126 aa, Oryza sativa
  unsure (1)..(126): unsure at all Xaa locations
  Clone ID: PAT_MRT4530_76349C.1.pep
PGPPLFPGKGVGFXPGILDLGIMGKGFWVKGGGSVXMGPKLGLKGGFLGGISSGGYPGGGFCLAKKPGNQGGALGAGFPGFGGGNPSFALFWGFRGGGGALQPGPGGLLGLSPLGLGFFWTELVSP

SEQ ID NO: 178830 - protein, 238 aa, Oryza sativa
  Clone ID: PAT_MRT4530_7634C.1.pep
MAVLGLSTAFSPPRGSCIAVRIRHGARSARSNLSLRRRSAGGGAIGVRAEVSFVDGDEAKRLVAEEGYTVLDIRDRTQRERAHIKNSAHVPLFVENDDGDIGTIIKRTVHSNFAGLFFGLPFTKRNLEFTKMVKDKFSPESKLLVVCQEGLRSTGAADVLEREGFQNLACIKSGLQTLKPGTFESVGKSELQNAGKAGLVTVQGKISAVLGTVLIKLYLFSCILVLLLGIHVPIARLT

SEQ ID NO: 178831 - protein, 251 aa, Oryza sativa
  Clone ID: PAT_MRT4530_76350C.1.pep
MARSSPTSPSSRSWPGGTPSRSSTSLTSSAAAASPPSPSSRTTISPAFVEAMSALRPRLEASLAAARPRVGLLVADALLYWAHDAAAGLGVPTVAFYATSMFAHVIRDVILRDNPAAALVAGGAGATFAVPEFPHVRLTLTDIPVPFNDPSPAGPLIEMDAKMANAIAGSRGLIVKTAWPVGPLCLARQPCRAAGDSAAAIKPSWMRWLDEMAAAGRAVLYVALGTLNAEPHAQLRELAGGLEASGVDFLW

SEQ ID NO: 178832 - protein, 479 aa, Oryza sativa
  Clone ID: PAT_MRT4530_76351C.1.pep
MAAAAAAADSPCSRAVRHDAQLPHVAIFPFMARGHTVPPIHLAHLLRHRGLAAVTLFTTPANAPFVRRVLDDDAVAVAELPFPDHLPGVPPGVECLDGLSSFPAFVEAVSALRPRLEACLAAARPRVGLLVADALLYWAHDAAAALGVPTVAFYATSMFAHVIRDVILRDNPAAALVAGGAGSTFAVPEFPHVRLTLADIPMDAKMANAIAGSHGLIVNTFDAMEGHYIEHWDRHHVGHRAWPVGPLCLARQPCHVAGDGAGAVKPSWLQWLDEKAAAGRAVLYVALGTLIAVQEAQLRELAGGLEASGVDFLWVVRPSDADVGAGFEERVEGRGLVVREWVDQWRILRHGCVKGFLSHCGWNAVVEGVAAGVPLATWPMGVEQPLHATLAVDELRIGVRVPAAATTGHGVVSGEEIARVARELMGMDGEGENGAGGEAARNAAALAAKAREAVAEGGSSWKTLEEMLAVVCLPTDPSE

SEQ ID NO: 178833 - protein, 54 aa, Oryza sativa
  Clone ID: PAT_MRT4530_76353C.1.pep
KVFFHRNFSFKIPESSLWLSHQHIASLDLFTPHVFLSVTSYRYIDPHINFIPLI

SEQ ID NO: 178834 - protein, 222 aa, Oryza sativa
  unsure (1)..(222): unsure at all Xaa locations
  Clone ID: PAT_MRT4530_76354C.1.pep
MAPSLLGVSSLSSSSLSLRVFAAQTKDVTGLGFTKSLAMTVLSEIGDKTFFAAAGTNSYCLFAKNGIFYLAKIILAMRYPRKLVLAGCLTSLTVMTALSVSLGWVAPNLDANFKSNKAESKSKSKANDDKKKQQRPFVLQFFSPIFIKAFSITFFGEWGDKSQIATIGLAADENPFGVVLGGVLYELHLLFPLHFXMVGLSSGVLFLLFGIMSYLSGPEGEL

SEQ ID NO: 178835 - protein, 175 aa, Oryza sativa
  Clone ID: PAT_MRT4530_76355C.1.pep
MARPRFATTAPLLALAVLAAVVSVAVATAPAGKDPGGFVVTGRVYCDPCRAGFETNVSKSIPGATVSVECRHYGAGRESLKAEATTDEKGWYKVEIDQDHQEEICEVVLDKSSDPACSETEKTRDRSRVPLTSNNGLKQNGIRYANPIAFFRKEPLADCGSILQKYDLKDAPETP

SEQ ID NO: 178836 - protein, 108 aa, Oryza sativa
  unsure (1)..(108): unsure at all Xaa locations
  Clone ID: PAT_MRT4530_76356C.1.pep
ILDATARGRKGGFINIRARDENTHSMYYSMPREHRKTIAVPVTNTGQLHTQXDDLSTSDTSTRGKMXPEDFTDPRTRSRSPGPKGHTIAEQKAKIREYGMSPRSPPKT

SEQ ID NO: 178837 - protein, 1264 aa, Oryza sativa
  Clone ID: PAT_MRT4530_76357C.1.pep
VIQADTPKVGSIVSGVVERLTPAAVVVSVNGFCKGSILNEHLADHRGQAAQLKNLLKPGHEFSELLVLDVEGQNLVLSAKQSLINCASDIPSEISQMHAGSVFHGYVCNIIEAGCFVRFLGHLTGFSPKDKAVDRSVEKLSNAFYVGQSVRSHILNVNAESARVKLSLQQSMCSSADCSFVQGYFLLDQKITELKYSDPSSSFHDWLNTFAIGNLVEGEVGAIEEYGVILNFQSHPDVVGLIEHHQLGDSSVEVGSSVKGLVIDLSDGVVNISLKSELVRSVSKVGKKKKRHRAAVMDLELHEEVNAIVEIVKESHVVLSIPEYNYAIGFAPLMDYNSQLLPCCNYENGQRITVVVGSMPSSGPTGRLLLLPKASGKNSSVSSSKRAKKKSDFKVGSLVEAEIIDIKPLELLLKFGSNLHGRIHITEVFDDDSNDCPFSELQIGRSVQARIVAEAEHSGKGGKNSKWELSIRPSLLQGGLEDFTPPKAELRHSIGGIVHAYVVKVDREWIWLTVSRDVMAHLFILDSSAEPGELEKFQQRYSVGQAVKGRIIGVNREKRLLRLKALDSQSLPENIGETQKPLSATVEHTKQGDIIGGRIQKILPGVGGLVIQIGPHLHGRVHYTEIVDSWVQEPISGFHEGQFVKCKVLDVSRSSEGSVRVDLSLRSSMCANSNQSRRLFDDSRIRTSRFEKINDLCPGTEVKGYVKSVNSKGCFIMVSRTIEARIILSNLSDEYVENPQNDFPVGLLVHGRVLSSEPQSGKVEVSLRKNTGSKSQKSDDISYSDLHVGDIIAGQVKRVESFGLFVTIQGSELVALCHVSELSDEPVLDIHSCHKAGDKIDEERHRVSIGMKKSYIGPDSTGDTSDDEDDEIVPEEISRNPVMGRDRNHALVLPKPESRASVLPLQVSLDESEGSDQENDNKGQEIANGTEVDDKKSNKRLKEKARKQRELEISALEERALQRDIPQTPDEFEKLVRSSPNSSFVWINYMAFLLDLADVDKARAVAERALRTINIREEEEKLNVWVAYFNLENEYGSPREDAVKKIFQRALQYCDPKKVHLALLAMYERTEQYTLADELLDRMTKRFKTSCKIWLRCIQLSLKQSKDVECIKLIVKRALLSLPQSKRRKFLSQTAILEFKCGVPEEGRSRFELILREYPKRTDLWSVYLDQEIRLGDTEIIRALFERVTCLSLPPKKMKIYLIPRKIQFVSEKCNPELSDSSYYAQLPQFLFKKYLEYEKSQGDEERIEHVKQKALEYVQSSLA

SEQ ID NO: 178838 - protein, 116 aa, Oryza sativa
  Clone ID: PAT_MRT4530_76358C.1.pep
VPLQEMVNRQKRNHRGTLLCPVESRNKSEFLFGTILKKVGGVIDLSTFSSTHKLPLADSRIQHMFIQCDCIHWFHYFFLQKTQLRLASPLLLCLPHVGCGGPPLLTRDTYTRRRNR

SEQ ID NO: 178839 - protein, 158 aa, Oryza sativa
  Clone ID: PAT_MRT4530_76359C.1.pep
QLATETSLSQFEIQHKLFRKLSICKSVRKDRNLCLALKLDDASSLLLDPLCSSERIGAPPPPPPLVAGVHHAAPAPRRRAQHQQQQREDDGDEQPQQVELRIVVRLAATQLPHATRFRRRGREFLACKMNFSRSLSLRGSRREAGLLGSSGFSESERL

SEQ ID NO: 178840 - protein, 84 aa, Oryza sativa
  Clone ID: PAT_MRT4530_7635C.1.pep
AADVLEREGFQNLACIKSGLQTLKPGTFESVGKSELQNAGKAGLVTVQGKISAVLGTVLISAYLFITLFPDQAEKLFDLAGIKL

SEQ ID NO: 178841 - protein, 149 aa, Oryza sativa
  Clone ID: PAT_MRT4530_76360C.1.pep
MVKIKYGPNPHNIQEVEVKPLTTNNLTAFMKNFLEKEAEMSKPRPRNTPVKPGAQARKPVKSVAKKPQVTPKMKKVWRVKQMTFDGEFKENLPMEEVSVEELVADEDIAGIFIFISNIGRFIAHIGSNIFDIFHGGTETDDSRSYFPIW

SEQ ID NO: 178842 - protein, 31 aa, Oryza sativa
  Clone ID: PAT_MRT4530_76361C.1.pep
KHESLRVHYLFNTQAYMSHVTQFVLFPNYTT

SEQ ID NO: 178843 - protein, 636 aa, Oryza sativa
  unsure (1)..(636): unsure at all Xaa locations
  Clone ID: PAT_MRT4530_76362C.1.pep
MDSIRRRSAGGILGILFLVLLRWAGAGDPYAYYEWEVSYVWGAPLGGVKKQEAIGINGQLPGPALNVTTNWNLVVNVRNGLDEPLLLTWHGVQQRKSPWQDGVGGTNCGIPPGWNWTYQFQVKDQVGSFFYAPSTALHRAADGYGAITINNRDVIPLPFPLPDGGDITLFLADXYARVHWALRDAGDVGHPLGPPDGGVNNALGPYRDNDTPVRPGDTLERIDLDPERTYRMRVHTVGASKSINFGIQGHYLLLVEAEGVYTSQQNYTNMDIHVGQSYSFLLTMDQNASTDYYVVASARFVPDADKLTGVAILHYSNSQGPPSGSLPDAPDDQYDTAFSINQARSIRWNVTASGARPNPQGSFHYGDITVTDVYLLQSMPPELIDGQMRATLNGISYIAPSTPLMLAQLFNVPGVYKLDFPNRPMNRLPKLDTSIINGTYKGFMEIIFQNNATSVQSYHLDGYAFFVVGMDYGLWTDNSRGTYNKWDGVARSTIQTTAFYLEKTFEFRKYCLKYNLLMNSIQYSGTAFSLTCLCARLQVFPGAWTAVLVFLDNAGIWNLRVENLDAWYLGQEVYISVVNPEDSSNKTVLPLPDNAIFCGALSSLQKEQSHRFQYSEASQITQLWKMVFFMAWLALW

SEQ ID NO: 178844 - protein, 209 aa, Oryza sativa
  unsure (1)..(209): unsure at all Xaa locations
  Clone ID: PAT_MRT4530_76363C.1.pep
MRSLQMTHRMPSSICKIQGVFNYYSVMNNWXWRLLVLLFGIYSRSGFGDDWNLQVNLQDIAIISCXPVRPGSVCRLELMHMVNGDSIWHTMEVLCAYGMRSQIWKESKFGTIGYVKFLSCTRGFPKVFRTLSMSLVCGFRLPTSGINIGGAFRLAASGGQNGGIRAVRPAAVTGAASISVVRXDRSTSLRPAASTRSDRQINLGQTAIR

SEQ ID NO: 178845 - protein, 83 aa, Oryza sativa
  Clone ID: PAT_MRT4530_76364C.1.pep
EEFYNEADEIPGVTEPAAGEGGGDAQDHPEVVFAENFVFGPPWELANYNVLKVTGWMRAHPGRTLDDYDSVHVERLEDMVRFW

SEQ ID NO: 178846 - protein, 63 aa, Oryza sativa
  Clone ID: PAT_MRT4530_76365C.1.pep
VNCVYSSALDGDRSRINHFRFGHGTVHVCSLSAWVKLKPDVANDYLGESGGPLKWTKGLLTGN

SEQ ID NO: 178847 - protein, 221 aa, Oryza sativa
  unsure (1)..(221): unsure at all Xaa locations
  Clone ID: PAT_MRT4530_76366C.1.pep
MRYFLFLAMDCITTTQIDKSHRFLCKIKGVFNYYSVMNNWAXRLLVLLFGIYSRSGFGDDWIXHVIVGFNMLCXPVRPGSGSRLELMHVVDGDSIWHTMELLCAYGMRSKIWKESKFGTIGYVKFLSCTRGFPKVSRTLSMSLVRGFRLPTSCINRGGALCLPGFGGQTGGSTAVKPAAATASSSXSRRSDRRXISFRPTATRRSDRQDNFGQTAIRRFRG

SEQ ID NO: 178848 - protein, 516 aa, Oryza sativa
  Clone ID: PAT_MRT4530_76367C.1.pep
MAAGMVATMVLLTCLAAGGLVVGAEEDGGGGGLGRLGSPDYGDALAKAILFFEGQRSGRLPANQRATWRGDSALTDGREENVNLTGGYYDAGDNVKFGYPMAFTVTLLGWSAVEYGAAVAAAGELGNLRAAIRWGADFLLRAHASPTTLYTQVGDGNADHQCWERPEDMDTPRTLYKITADSPGSEAAAEASAALAAAYVALKDDGDTAFSSRLLAASRSLFDFANNYRGSFQSSCPFYCSYSGFQDELLWASAWLFKATRDAKYLDFLTNNQGSSNPVNEFSWDNKYAGAQMLAAQEYLGGRTQLARYKDNLDSFVCALMPNSGNVQIRTTPGGLLFTRDSVNLQYTTTATLVLSIYSKVLKSSGSRGVRCSAATFSPNQISSFATSQVDYILGKNPLGMSYMVGFSTKFPRRIHHRGSSIPSIKVLSRKVTCKEGFSSWLPTSDPNPNIHVGAIVGGPDGNDQFSDNRGDSSHSEPATYINAAFVGACAAAMGQKQVVKLEEPADNLESMVSTY

SEQ ID NO: 178849 - protein, 210 aa, Oryza sativa
  unsure (1)..(210): unsure at all Xaa locations
  Clone ID: PAT_MRT4530_76368C.1.pep
MYRHSNDTEEMIFCALLGIYDYYSVMNNWAXRLLVLIFGIYLRSGFGDDWIXQVIAGFCHFMXPVRPGCGSRLELMHVVDGDSIWHTMEVFCAYGMRSXIWKESKFGTIGYVKFLSCTREFPKVFRTLSMSLVCGFRLPTSCINRRGASNRXLTGGQTGSKAAVRPAAAIANGSXSRRSDRRSXISVRPTATRRSDRQDNFGQTAIYRFR

SEQ ID NO: 178850 - protein, 162 aa, Oryza sativa
  unsure (1)..(162): unsure at all Xaa locations
  Clone ID: PAT_MRT4530_76369C.1.pep
CKIKGVFDYYSVMNNWHRRXLVLLFGINSRSSFGDDWIXQVNLQVLLLFHXPVRPGSVCRLELMHVVDGDSIWHTMEVLCAYGMRSRIWKESKFGMIGFVKFVSCTIGFTKVFRTSSMSLVRGFRLSISSINRGGASDRRQXGGQTGGGETVRPAELNTSSQ

SEQ ID NO: 178851 - protein, 157 aa, Oryza sativa
  Clone ID: PAT_MRT4530_7636C.1.pep
DVSRDDREKVGWVSVSLLQIDSVSSSLSPSRRLLEAPEMSTLRWKGQAQAPRIAGAGGGGGGGGAQLDLTPQDGDGVHKYAVAVAALEDKDVGVAARYLQEEQPPEALLQPPQSQCLRPQHQQATARPPHTNKPQLGSLQYKKGKEHVYDVSGQTPT

SEQ ID NO: 178852 - protein, 51 aa, Oryza sativa
  Clone ID: PAT_MRT4530_76370C.1.pep
PRVRSICNCLELTVVNLSHSSTFPLFSTMFYSKQSLVSYGCNHTGIWNWWL

SEQ ID NO: 178853 - protein, 109 aa, Oryza sativa
  Clone ID: PAT_MRT4530_76371C.1.pep
MGRPTTTSTFAGSRRDAESWRSAGDMTGVRMVTNRSFLSTTRQLSNLHAGPPSHHILPVMVRMKPGIYLVGTNVPSLGGNTLAPAGVERLEALVLTGWGEACVRPPAAT

SEQ ID NO: 178854 - protein, 127 aa, Oryza sativa
  Clone ID: PAT_MRT4530_76372C.1.pep
RPESAAPGHGSACASPPPPPPRARAPRRARPSPPPPRAAAPRRRRPGPRHPASAPPPPPAPPRPRPARAPGCPPPPPGSPPPPPPAASAAAAPPCPPRRRRPPPPPPPTPRRPLHYQIEFPSLVLVT

SEQ ID NO: 178855 - protein, 246 aa, Oryza sativa
  unsure (1)..(246): unsure at all Xaa locations
  Clone ID: PAT_MRT4530_76373C.1.pep
RGRGFRRERLLYGAKIRPHLDLPQLINRSNTTPPPKIRNETKTTTRRSRGCKIKGVFDYYSVMNNWXHRRLLVLLFGIYSRSGFGDDWIXQVKYRCYHFMWPVRPGSGSRLELMHVVDGDSIWHTMELLCAYGMRSRIWKESKFGTIDYVKFLSCIRGFPKVFRTLSMSLVRGFRLSTSGINRGGASNRRLTGGRTGGKAAVRPAAATXRGRRHRRSDRXSIPVRPAASTRSDRQINLGQTDLCRI

SEQ ID NO: 178856 - protein, 249 aa, Oryza sativa
  Clone ID: PAT_MRT4530_76374C.1.pep
MTGVRPVTSVILVHQVMKPGIYLTRTNVPSLGGNTLAPAGDERLEALVLTGWGKAKFICHPFAITHVLHNKHEFPFVRGVEDLLVLSIGGCSAGGTGAAADADLRRLRRWGPKDWARPIARIAADGAADLVDHAVARAFGQCRSSNYLRIQAKRESMPPCGPDGEYDPTPANVHALLAAADEMLKHRNVESVLFEGRRVGEQTNAERLDCFAAELVAEHRSRGSRIGPTVAFKQAPRKQPPAAAVAAMG

SEQ ID NO: 178857 - protein, 208 aa, Oryza sativa
  unsure (1)..(208): unsure at all Xaa locations
  Clone ID: PAT_MRT4530_76375C.1.pep
CKGSKDVKPSACCKTKGVLDYYSVMNNWHIRLLVLIFGIYLRSGFRDDWNLQVNXELLLXFGPVRPGMCCRSDRLHVVGEDSIWYTMEVLCAYGMRIRIWKESKFGMIGXVKFVSCTGRFPRWIRTSSMSLVRGFRLPTSYINREGASDRRLGGGQTSGRPAVRPTRMTGXQRRSLGGWTERSIPVRTTASRRSDRRDTFGQTAIHRI

SEQ ID NO: 178858 - protein, 196 aa, Oryza sativa
  unsure (1)..(196): unsure at all Xaa locations
  Clone ID: PAT_MRT4530_76376C.1.pep
YKIKGVFDYYSVMNNWHWRLLVLLFGIYSXSGFGDDWIYRXELQVLLFYXPVRPGVCCRLELMHVVGEDSIWYTMEVLCAYGMRSRIWKESKFDMSGYVKFISCTRGFPKVFRTSSMSLVRAFRLPTSGINRGGASDWRHHSGQTGGSTAVKPAAATASSSXSRRSDRRXISFRPTATRRSDRQDNFGQTAIRRIR

SEQ ID NO: 178859 - protein, 67 aa, Oryza sativa
  Clone ID: PAT_MRT4530_76377C.1.pep
VSGTRVRTHFARPSWRDVFKRVAVNHQGQRVGVFFCGDQALTPELRRLAQDFSHKTTTKFVFHKENF

SEQ ID NO: 178860 - protein, 254 aa, Oryza sativa
  unsure (1)..(254): unsure at all Xaa locations
  Clone ID: PAT_MRT4530_76378C.1.pep
YSARALCKIKGAFDYYSAMNNWAXRLLVLLFGIYSXSGFGDDWIXQVIAGFIISCXPVRPDSGSRLELMHVVDGDSIWHTIEVLCAYGMRSRIWKESKFGMIGYVKFLSCTSGFPKVFMTPSMSLVRGFRLPTSCINRGGASNRQSIVGQTGGIAAVRPAGTRRSNRRLPLGQTGRSISVRPTSVDFEAAAIPPSSAWQWQRLLPSSAWGQQLPSPPWLPTHLPDVEPTVVLSSVAAILICDYFEDFVNWDVDL

SEQ ID NO: 178861 - protein, 214 aa, Oryza sativa
  Clone ID: PAT_MRT4530_76379C.1.pep
VVDISYNFRLSGVLPDFSSGSALTELLCSNTNLSGPIPSSVSNLKSLKNLGVAAAGDSHQEELPSSIGELRSLTSLQLSGSGIVGEMPSWVANLTSLETLQFSNCGLSGQLPSFIGNLKNLSTLKLYACNFSGQVPPHLFNLTNLEVINLHSNGFIGTIELSSFFKLPNLSILNLSNNELSVQVGEHNSSWESIDNFDTLCLALVPILQPGDPL

SEQ ID NO: 178862 - protein, 76 aa, Oryza sativa
  Clone ID: PAT_MRT4530_7637C.1.pep
PRVRSTGAADVLEREGFQNLACIKSGLQTLKPGTFESVGKSELQNAGKAGLVTVQGKISAVLGTVLISKMTGTIFI

SEQ ID NO: 178863 - protein, 1600 aa, Oryza sativa
  unsure (1)..(1600): unsure at all Xaa locations
  Clone ID: PAT_MRT4530_76380C.1.pep
MVERAVAHNLSPSASGDDGEQNPRRRARTPPSPSRRCLGREEVLEGVERSATSPPTGDGEGQRDGERRLLVYGDGSTPQGALQAAGALLRHPPVIPDPETPARXRLGAGGRSSATKASGAATAGSVSSRRRARRAAAVTHRSSAILGQRPPTQEDVRGGXDARLSIERRRNGRRAAHATEGASSSGAPLRFGHRGQPPVSPVGGAGCRAFVASLRNVRWPPRFRPTITEKYDGSVNPAEFLQIYMTGIEAAGGDDRVMANFFPMALKGQARGWLMNLPPASVHSWEDLCQQFTTNFQGTYPRPGEEADLHAVQRRDDESLRSYIQRFCQVRNTIPCIPAHAVIYAFRGGVRHNRMLEKIASKEPQTTAELFQLADRVARKEEAWTWNSSGSGVAAPAAHGSAARSGRRDRRRKKRALRGPPERGGLRATKRRRPALPAGSARPASGVLCTTPPSTTSRTAXAVKSLAERTRKWEEERRQERREGKAPXAAPAGNRRGEAKQKATAEDVDDGDDDLGFQEPGATVATVDGGACAHVSRRSLKAMKRELLAAAPTHEATRRARWSEVALTFDQTDHLPCVARGGQIAMVVSLTVCNVKLGRVLIDGGAALNILSPAAFDAIKAPGMVLRPSQPIIGVTPGHTWPLGHINLPVTFGGSANFRTERVNFDVADLSLPYNAVLGRPALVKFMAAVHYTYLQMKMPGPGGPITVHGDHKVALACMEQRADHLAAASKPAGGDERLSTSVPAAPRQRMSTYDEVLIKQEDALVSFLRANADVFAWRPADMPGVPREVIEHRLAVRPGTKPVRQKVRREAPERQAFIREEIRMAREDEEKTAFITPIGTYCYTTMPFGLKNAGPTFQRTTRISLGSQIGRNVEAYVDDLVVKTRNQETLLSDLAETFESLRSARIKLNPDKCEFGVPAGKLLGFLVSARGIEANPEKIRAIERMRPPASLGMREQGGEAPEPNGGPRPPTAGAGPPPACPTVPGTPDPQDGLGATAGRPRLSPSDPEVVGTEAECAPRGLSDEERPGDAAPSEEDRPHRKVQRPVYFVSEALRDAKTRYPQAQKMLYAILMASRKLRHYFQAHRVTVVTSYPLGQILHNREGTGRVVKWAIELSEFDLHFEPRHAIKSQALADFVAEWTPAPEPVSVPEASSGPSQLPHTAYWVMQFDGSLSLQGAFEERHAQPTARPDPLGETDAPERPPRPVGAYIADKTLPEDREGSERVQRISKRYVLVEGTLYRRAANGVLLKCIPREQGVELLADIHEGECGAHSASRTLVGKAFRQGFYWPTALNDAVDLVRRCRACQFHAKQTHQPAQALQTIPLSWPFAVWGLDILGPFRRAPGGFDYLYVAVDKFTKWPEAYPVIKIDKHSALKFIRGITARFGFTSELFGDYCEDMGIKLCFASPAHPRSNGQVERANAEILKGLKTKTFNILKKHGDSWIEELPAVLWANRTTPSRATGETPFFLVYGAEAVLPSELTLRSPRATMYCEADQDQLRRDDLDYLEERRRRAALRAARYLQSLRHYHQRHVRARSLCVDDLVLRRVQTRAGLSKLSSMWEGSYRVIGVPRPGSVRLATGDGTELPNPWNIEHLRRFYP

SEQ ID NO: 178864 - protein, 435 aa, Oryza sativa
  unsure (1)..(435): unsure at all Xaa locations
  Clone ID: PAT_MRT4530_76381C.1.pep
MSSADSHDSTSHLLPAKVEVVVARLIRSPMAEQAKAHNLSPSVSGDDGKSNPRRRARTPSPPPRQSPRREEVLERVEGSATSTSTGDGEGRRDGERRLLVYGDGSTPQGALQAAGALLRHPPIVPDPESPAQRWLDDVANLVMTARQRLGAGGRSSATKTSGAATTGSVSSRRRARRAAAVARHSAATPSSAPPTQEDLRGGPDARISIERRRNGRRAAHATEGASSSGVSHQHGRGDQPSVPPVGGVGCRAFVASLRNVRWPPRFRPTIAEKYDGSVNPAEFLQVYTTGIEAAGGDDRVMANFFPMALKGQAHIRAXGEEADLHAVQRRDDESLRSYIQRFCQVRNTIPCIPTHALVDRVARKEEAWTWNPSGSGVAASAAPGSAAQTGRRDRRRKKRSAHTDDEGHLLAVEGASRATRKGRPASDKKKEADAP

SEQ ID NO: 178865 - protein, 465 aa, Oryza sativa
  unsure (1)..(465): unsure at all Xaa locations
  Clone ID: PAT_MRT4530_76382C.1.pep
MVPGAPDPQDGPRATAGRPHLSPSDPEANPVPTRPGREQGEEAPEPNGGLRPLTTGVGPLPACPTTPRAPDPLDGPEATVGRPPLSSSDPEVVGTEDECTPRGRLDKEHPRDVAPSEEDRPHRKVQRPVYFVSEALRDAKTRYPQAQKMLYAILMASRKLRHYFQAHRVXDKTLPEDREGSERVQRISKRYVLXRAPGGFEYLYVAIDKFTKWPEAYPVVKIDKHSALKFIKGITTRFGVPNRIITDNGTQFTSELFGDYCEDMGIKLCFASPAHPRSNGQVERANAEILRGLKTKTFNILKKHGDSWIEELPAVLWANRTTPSRATGETPFFLVYGTEAVLPSELTLRSPRATMYCEADQDQLRRDDLDYLEERRRRAALRAARYQQSLRRYHQRHVRARSLCVDNLVLRRVQTRAGLSKLSPMWEGPYRVIGVPRPGSVRLATGDGTELPNPWNIEHLRRFYP

SEQ ID NO: 178866 - protein, 91 aa, Oryza sativa
  Clone ID: PAT_MRT4530_76383C.1.pep
TSNSDTSKQAKINPQQQLDPYEQYRDMDNTGITRVNGSRTRHGIRETEQLLNSRPISANAHGTVQIRGSEKLTASVMDFHLSPPALPICDF

SEQ ID NO: 178867 - protein, 207 aa, Oryza sativa
  unsure (1)..(207): unsure at all Xaa locations
  Clone ID: PAT_MRT4530_76384C.1.pep
TPQGALQAAGALLRHPPIAHDPESPAQRWLDDVAKLVMTARQRLDAGGRSSATKASXIERRRNGRRAPHATEGASSSGVSPHHGRGDQPSVPPXFVASLRNVRWPPRCRPTIAEKYDGSVNPTEFLQVYTTGIEAAGGDDRRFCQVRNTIPCIPAHAVIYAFRGGVRHNRMLEKIASKEPQTTAELFQLADRVARKEEAWTWNPFGS

SEQ ID NO: 178868 - protein, 136 aa, Oryza sativa
  Clone ID: PAT_MRT4530_76385C.1.pep
PHTFLMPLFSPPFLGPSILNWGLLSGTVVFFPGAPPRPRLFPTFVLTNGGSGFDPFSSCPPFSRSPLGVSPGLPFLGFFFALSPPLFFPLFPFPPFFSPMVKLNPLHTVKKVQHNALSKTQRDLEKHFPKKKKKPK

SEQ ID NO: 178869 - protein, 1583 aa, Oryza sativa
  unsure (1)..(1583): unsure at all Xaa locations
  Clone ID: PAT_MRT4530_76386C.1.pep
MAEQAKAHNLSPSVSGDDGEPNPRRRARTPPPPPRQSPRQEEALERVEGSATSTSTGDGEGRRDGERRLLVYGDGSTPQGALQAAGALLRHPPVVPDLESPAQRWLDDVANLVMTARQRPRAFVASLRNVRWPPRFRPTIAEKYDGSVNPAEFLQVYMTGIEAAGGDDRVMANFFPMALKGQARGWLMNLPPASVHSWEDLCQQFTMNFQGTYPRPGEEADLHAVQRRDDESLRSYIQRFCQVRNTIPCIPAHAVIYAFRGGVRHNRMLEKIASKEPQTTAELFQLADRVARRRDKRKKKRSAHSDDEGHVLAVEGASRATRKGRPASDKKKEAGAPSRERPTGKCKAKQKAPAEDIDDGDDDLGFQEPGATIATLDGGACAHVSRRSLKAMKRELLAAAPTHEATRRARWSEVVLTFDQTDHPPCVARGGQIAMVVSPTVCNVKLGRVLIDGGAALNILSPAAFDAIKAPGMVLRPSQPIIGVTPGHTWPLGHIDLPVTFGGSANFRTERVNFDVADLSLPYNAVLGRPALVKFMAAVHYAYLQIKMPGPGGPISVHGDLKVALACMEQRADHLTAASKPEGGDERLGTSAPAAPRQRIVTCDEVPEDALVFFLRVNADVFAWRPADMPGVPREVIEHRLAVRSGARPVRQKVRRQAPERQAFIREEVARLLEAGFIREVIHPEWLANPVVVPKANGKLRMCIDYTDLNKACPKDPYPLPRIDQIVDSTAGCDLLCFLDAYSGYHQIRMAREDEEKTAFITPIGTYCYTTMPFGLKNAGPTFQRTTRNSLGSRIGRNVEAYVDDLVVKTRNQETLLSDLAETFESLRSARIKLNPDKCVFGVPAGKLLGFLVSARGIEANPEKIRAIERMRPPSKLRDVQCVTGCMAALSRFISRLGEKALPLFKLLKRSGPFTWTEEAERALTQLKAYLSSPPVLVAPEPNEPLLLYLAATPQVTVPGAPDPQDGPRATAGRPHLSPSDPEANPVPTRPGREQGEEAPEPNGGLRPLTTGVGPLPACPTTPGAPDPQDGPEATVGRPPLSSSDPEVVGTEDECTPRGRLDKERPRDVAPSEEDRPHRKVQRPVYFVSEALRDAKTRYPQAQKMLYAILMASRKLRHYFQAHRVTVVTSYPLGQILHNREGTGRVVKWAIELSEFDLHFEPRHAIKSQALADFVAEWTPAPEPVSVPEASSGPSQLPHTAHWVMQFDGSLSLQGAGAGVTLTSPSGDVLRYLVRLDFRVTNNMAEYEGLLAGLRVAAGLGIRRLLVLGDSQLVVNQVCKEYRCSDPQMDAYVRQVRRMERHFDGIELRHVPRRDNTVADELSRLASSRAQTPLGAFEERLAQPSARPDPLGETDAPDRPPMPVGVQASGPEGSAPSSLRLIAWIAEXQAYLTDKTLLEDREGSERVQRISKRYVLXRAPGGFEYLYVAIDKFTKWPEAYPVVKIDKHSALKFIKGITARFGVPNRIITDNGTQFTSELFGDYCEDMGIKLCFASPAHPRSNGQVERANAEILRGLKTKTFNILKKHGDSWIEELPAVLWANRTTPSRAXTGETPFFLVYGAEAVLPSELTLRSPRATMYCEA

SEQ ID NO: 178870 - protein, 1820 aa, Oryza sativa
  unsure (1)..(1820): unsure at all Xaa locations
  Clone ID: PAT_MRT4530_76387C.1.pep
MAEQAKAHNLSPSVSGDDGEPNPRRRARTPPPPPRQSPRQEEALERVEGSATSTSTGDGEGRRDGERRLLVYGDGSTPQGALLRHPPIVPDPESPAQRWLDDVANLVMTARQRLGAGGRSSATKTSGAATTGSVSSRRRARRAAAVARHSAATPSSAPPTQEDLRGGPDARISIERRRNGRRAAHATEGASSSGVSHQHGRGDQPSVPPVGGVGCRAFVASLRNVRWPPRFRPTSPKNMTGASTPPSFSRSTRPGSRPPGGGVRHNRMLEKIASKEPQTTAELFQLADRVARKEEAWTWNPSGSGVAASAAPGSAARTGRRDRRRKKRSAHSDDEGHVLAVEGAPWATRKGRPASDQKKEAGALSRERPTGMWCIVHNTSLHDLADCRAVKSLAERTRKWEEERRQERREGKSPAVPSGNRRSEAKQKAPAEDIDDGDDDLGFQEPGATIATVDGGACAHVSRRSLKAMKRELLAAAPTHEATRRGRWSEVALTFDQTDHPPCVARGGQIAMVVSPTVCNVKLGRVLIDGGAALNILSPAAFDAIKAPGMVLRPSQPIIGVTPGHTWPLGHIDLPVTFGGSANFRTERVNFDVADLSLPYNAVLGRPALVKFMAAVHYAYLQMKMPGPGGPISVHGDLKVALACMEQRADHLAAASKPKGGDERLGTSAPAVPRQRIVTCDEVPEDALVSFLWANADVFAWRPADMPGVPREVIEHRLAVRSGARPVRQKVRRQAPERQAFIREEVARLLEAGFIREVIHPEWLANPVVVPKANGKLRMCIDYTDLNKACPKDPYPLPRIDQIVDSTAGCDLLCFLDAYSGYHQIRMAREDEEKTAFITPIGTYCYTTMPFELKNAGPTFQRTTRISLGSQIGRNVEAYVDDLVVKTRNQETLLSDLAETFESLRSARIKLNPDKCVFGVPAGKLLGFLVSARGIEANPEKIRAIERMRPPSKLRDVQCVTGCMAALSRFISRLGEKALPLFKLLKRSGPFTWTEEAERALTQLKAYLSSPPVLVAPEPNEPLLLYLAATPQVVSVALVVERDEDNPHSAHPHPVLAWPGREPGGEAPEPNGGPRPPTTGAGPLPACQTVPGAPDPQDGPRATAGRPHLSPSDPEANPVPTRPGREQGEEAPEPNGGLRPLTTGVGPLPACPTTPGAPDPQDGPEATVGRPPLSSSDPEVVGTEDECTPEALRDAKTRYPQAQKMLYAILMASRKLRHYFQAHRVTVVTSYPLGQILHNREGTGRVVKWAIELSEFDLHFEPRHAIKSQALADFVAEWTPAPEPVSVPEASSGPSQLPHTAHWVMQFNGSLSLQGAGAGVTLTSPSGEVLRYLVRFDFRATNNMAEYEGLLAGLRVAAGLGIRRLLVLGDSQLVVNQVCKEYRCSDPQMDAYVRQVRRMERHFDGIELRHVPRRDNTVADELSRLASSRAQTPPGAFEERLAQPSARPDPLGETDAPDRPPMPVGVQASGPEGSAPSSLRLIAWIAEIQAYLTDKTLPEDREGSERVQRISKRYVXGECGAHSALRTLVGKASRQGFXGQQLSMMQSTWRAPGGFEYLYVAIDKFTKWPEAYPVVKINKHSALKFIKGITARFGVPNRIITDNGTQFTSELFGDYCEDMGIKLCFASPAHPRSNGQVERANAEILRGLKTKTFNILEKHGDSWIEELPAVLWANRTTPSRATGETPFFLVYGAEAVLPSELTLRSPRATMYCEADEDQLRRDDLDYLEERRRRAALRAARYQQSLRRYHQRHVRARALCVDDLVLRRVQTRAGLSKLSPMWEGLYRVIGVPRPGSVRLATGDGTELPNPWNIEHLRRFYP

SEQ ID NO: 178871 - protein, 1559 aa, Oryza sativa
  unsure (1)..(1559): unsure at all Xaa locations
  Clone ID: PAT_MRT4530_76388C.1.pep
MAEQAKAHNLSPSVSGDDGEPNPRRRARTPPPPPRQSPRQEEALERVEGSATSTSTGDGEGRRDGERRLLVYGDGSTPQGALLRHPPIVPDPESPAQRWLDDVANLVMTARQRLGAGGRSSATKTSGAATTGSVSSRRRARRAAAVARHSAATPSXFVASLRNVRWPPRFRPTXAEKYDGSVNPAEFLQVYTTGIEAARGDDRGGVRHNRMLEKIASKEPQTTAELFQLADRVARKEEAWTWNPSGSGVAASAAPGSAARTGRRDRRRKKRSAHSDDEGHVLAVEGAPWATRKGRPASDQKKEAGALSRERPTGMWCIVHNTSLHDLADCRAVKSLAERTRKWEEERRQERREGKSPAVPSGNRRSEAKQKAPAEDIDDGDDDLGFQEPGATIATVDGGACAHVSRRSLKAMKRELLAAAPTHEATRRGRWSEVALTFDQTDHPPCVARGGQIAMVVSPTVCNVKLGRVLIDGGAALNILSPAAFDAIKAPGMVLRPSQPIIGVTPGHTWPLGHIDLPVTFGGSANFRTERVNFDVADLSLPYNAVLGRPALVKFMAAVHYAYLQMKMPGPGGPISVHGDLKVALACMEQRADHLAAASKPKGGDERLGTSAPAVPRQRIVTCDEVPEDALVSFLWANADVFAWRPADMPGVPREVIEHRLAVRSGARPVRQKVRRQAPERQAFIREEVARLLEAGFIREVIHPEWLANPVVVPKANGKLRMCIDYTDLNKACPKDPYPLPRIDQIVDSTAGCDLLCFLDAYSGYHQIRMAREDEEKTAFITPIGTYCYTTMPFELKNAGPTFQRTTRISLGSQIGRNVEAYVDDLVVKTRNQETLLSDLAETFESLRSARIKLNPDKCVFGVPAGKLLGFLVSARGIEANPEKIRAIERMRPPXANLGMCNASPEAERALTQLKAYLSSPPVLVAPEPNEPLLLYLAATPQVVSVALVVERDEDNPHSAHPHPVLAWPGREPGGEAPEPNGGPRPPTTGAGPLPACQTVPGAPDPQDGPRATAGRPHLSPSDPEANPVPTRPGREQGEEAPEPNGGLRPLTTGVGPLPACPTTPGAPDPQDGPEATVGRPPLSSSDPEVVGTEDECTPEALRDAKTRYPQAQKMLYAILMASRKLRHYFQAHRVTVVTSYPLGQILHNREGTGRVALADFVAEWTPAPEPVSVPEASSGPSQLPHTAHWVMQFNGSLSLQGAGAGVTLTSPSGEVLRYLVRFDFRATNNMAEYEGLLAGLRVAAGLGIRRLLVLGDSQLVVNXDKTLPEDREGSERVQRISKRYVLXRAPGGFEYLYVAIDKFTKWPEAYPVVKINKHSALKFIKGITARFGVPNRIITDNGTQFTSELFGDYCEDMGIKLCFASPAHPRSNGQVERANAEILRGLKTKTFNILEKHGDSWIEELPAVLWANRTTPSRATGETPFFLVYGAEAVLPSELTLRSPRATMYCEADEDQLRRDDLDYLEERRRRAALRAARYQQSLRRYHQRHVRARALCVDDLVLRRVQTRAGLSKLSPMWEGLYRVIGVPRPGSVRLATGDGTELPNPWNIEHLRRFYP

SEQ ID NO: 178872 - protein, 1452 aa, Oryza sativa
  unsure (1)..(1452): unsure at all Xaa locations
  Clone ID: PAT_MRT4530_76389C.1.pep
MAERAVAHNLSPSASGDVGEQNPRRRARTPPPPSRRSLGWEEALEGVERSATSPPTGDGEGRRDGERRLLVYGDGSTPQGALQAAGALLRHPPVVPDPETLARXRLGAGGRSSATKASGAATAGSVSSRRRARRAAAVNRRSSAIPSSTPPTQEDVRGGPDARLNIERRRNGRRVAHATEGASSSGAPXSARARGPPPVSPVGGVGYRAFVASLRNVRWPPRFRPTITEKYDGSVNPAEFLQVYTTGIEAAGGDDRVMANFLPMALKGQARGWLMNLPPASVHSWEDLCQQFTMNFQGIYPRPGEEADLHAVQRRDDESLRSYIQRFCQVRNTIPCIPAHAVIYAFRGGVRHNRMLEKIASKEPQTTAELFQLTDPSAAPEFAARSGRRDRRRKKRSAHFDDEGHVLAVEGASRATRKGRLASDKKKEARAPSRERPTGKWCSVHNTSLHDLADCRAVKSLAERTRKWEEERRQERREGKAPAPPTGNRRDEARQKATAEDVDDNLGFQEPEATIATVDGGACAHASRRSLKAMKRELLAAAPTHEATRRARWSEVALTFDQTDHPPCAPGMVLRPSQPIIGVTPGHTWPLGHIDLPVTFGGSANFRTERVNFDVADLSLPYNAILGRPALVKFMAAVHYAYLQMKMPGPGGPITVHGDLKVALACMEQRADHLAAVSKPAGGDERLSTSVPAAPRQRMITCDEVSVKEEDVLVSFLRANADVFAWRPADMPGVPREVIEHRLAVRPGARPIRQKVQRQAPERQAFIREEVARLLEAGFIHEVIHPEWLANPVVVPKANGKLRMCIDYTDLNKACPKDPYPLPRIDQIVDSTAGCDLLCFLDAYSGYHQIRMARENEEKTAFITLIGTYCYTTIPFGLKNAGPTFQRTTRISLGNXTRNQETLLSDLAETFESLRSARIKLNPDKCVFGGQRGVGRGARREQPSLRASPPCVDSTRERAXGEAPEPNGGPRPPTAGAGPLPACPTVPVALRPRGRWHRSRRPGNAAPGEEDRPRRKVQRPVYFVSEALRDAKTRYPQAQKMLYAILMASRKLRHYFQAHRVTVVTSYPLGQILHNREGTGRVVKWAIELSEFDLHFEPRHAIKSQALADFVAEWTPAPEPVSVPEASSGPAQLPHTAYWVMQFDGSLSLQGAGRGVAAGLGIRRLLVLGDSQLVVNQVCKEYRCSDPQMDAYVRQVRRMERHFDGIELRHVPRRDNAVADELSRLASSRAQTPPGAFEERLAQPSARPDPLGETDAPERPPRPVGVQASGPEGSTPSSLRLIAWIAEIQAYLTDKTLPEDRKGSERVQRISKRYVLVEGTLYRRAANGVLLKCIPREQGVELLADIHEDQLRRDDLDYLEERRRRAALRAARYQQSLRRYHQRHVRARSLCVDNLVLRRVQTRVGLSKLSPMWEGPYQVIGVPRPGSVRLATGDGTELPNPWNIEHLRRFYP

SEQ ID NO: 178873 - protein, 545 aa, Oryza sativa
  Clone ID: PAT_MRT4530_7638C.1.pep
PHHPAHHRRLRLLPLVAGGGGGSPPRVGRRIRASREKGRRVGIRVFARYSQAQDFSTRLQDRAGELPKLVEDLLQTSISTGPRGAFRFAQGIQAVLGVGGEWLNDFSKTANTSAGIPAQMQLGLLSPLYLRRLFERMGATYIKLGQFVASAPTLFPAEYVEEFQNCFDRAPPVPYSEIESILREELQQPLDSVYEYIDPVPIASASIAQVHGARLKSSQKDVVIKVLKPGIEDTLVADLNFIYVVARILEFLNPELQRTSLVGIVKDIKESMLEEVDFRKEAMNIEAFQRYIDAMGFDRQAKAPFVYRHCSTKRVLTMERLYGVPLTDLDSIRSLVPDPELTLVTALNVWFGSLISCESFHADVHAGNLWLLRDGRVGFLDFGIVGRISPRTWAAMEVFLASFATDDYNAMASALSEMGATGNDINVNEFAKDLEKIFSSIQDLDTEVIVATARTPDATAVSANVVVDERQMNALFLDLVRVSESYGLKFPREFALLMKQLLYFDRYTRLLAPSMNMLRDERINIGMNRSAAAKENLDEYNWTFS

SEQ ID NO: 178874 - protein, 1908 aa, Oryza sativa
  Clone ID: PAT_MRT4530_76390C.1.pep
MAEQAKAHNLSPSVSGDDGEPNPRRRARTPPPPPRHPPIVPDPESPAQRWLDDVANLVMTARQRLGASGRSSATKTSGAATTGSVSSRRRARRAAAVARHSAATPSSAPPTQEDLRGGPDARISIERRRNGRRAAHATEGASSSGVSHQHGRGDQPSVPPVGGVGCRAFVASLRNVRWPPRFRPTIAEKYDGSVNPAEFLQVYTTGIEAAGGDDRVMANFFPMALKGQARGWLMNLPPASVHSWEDLCQQFTMNFQGTYPRLGEEADLHAVQRRDDESLRSYIQRFCQVRNTIPCIPAHAVIYAFRGGVRHNRMLEKIASKEPQTTAELFQLADRVARKEEAWTWNPSGSGVAASAAPGSAARTGRRDRRRKKRSAHSDDEGHVLAVEGASRATRKGRPASDKKKEAGAPSRERPTGKWCIVHNTSLHDLADCRAVKSLAERTRKWEEERRQERREGKSPAVPSGNRRSEAKQKAPTEDIDDGDDDLGFQEPGATIATVDGGACAHVSRRSLKAMKRELLAAAPTHEATRRARWSEVALTFDQTDHPPCVARGGQIAMVVSPTVCNVKLGRVLIDGGAALNILSPAAFDAIKAPGMVLRPSQPIIGVTPGHTWPLGHIDLPVTFGGSANFRTERVNFDVADLSLPYNAVLGRPALVKFMAAVHYAYLQMKMPGPGGPISVHGDLKVALACMEQRADHLTAASKPEGGDERLGTSAPAAPRQRIVTCDEVPEDALVSFLRANADVFAWRPADMPGVPREVIEHRLAVRSGARPVRQKVRRQAPERQAFIREEVARLLEAGFIREVIHPEWLANPVVVPKANGKLRMCIDYTDLNKACPKDPYPLPRIDQIVDSTAGCDLLCFLDAYSGYHQIRMTREDEEKTAFITPIGTYCYTTMPFGLKNAGPTFQRTTRISLGSQIGRNVEAYVDDLVVKTHNQETLLSDLAETFESLRSARIKLNPDKCVFGVPAGRLLGFLVSARGIEANPEKIRAIERMRPPSKLRDVQCVTGCMAALSRFISRLGEKALPLFKLLKRSGPFTWTEEAERALTQLKAYLSSPPVLVAPEPNEPLLLYLAATPQVVSAALVVERDEDNPHSAHPHPVLAWPGREQGGEAPEPNGGPRPPTTGAGPLPACQTVPGAPDPQDGPEATVGRPPLSSSDPEVVGTEDECTPRGRLDKEHPRDVAPSEEDRPHRKVQRPVYFVSEALRDAKTRYAQAQKMLYAILMASRKLRHYFQAHRVTVVTSYPLGQILHNREGTGRVVKWAIELSEFDLHFEPRHAIKSQALADFVAEWTPAPEPVSVPEASSGPSQLPHTAHWVMQFDSSLSLQGAGAGVTLTSPSGDVLRYLVRLDFRATNNMAEYEGLLAGLRVAAGLGIRRLLVLGDSQLVVNQVCKEYRCSDPQMDAYVRQVRRMERHFDGIELRHVPRRDNTVADELSRLASSRAQTPPGAFEERLAQPSARPDPLGETDAPDRPPMPVGVQASGPEGSAPSSLRLIAWIAEIQAYLTDKTLPEDREGSERVQRISKRYVLVEGTLYRRAANGILLKCIPQEQGVELLADIHEGECGSHSASRTLVGKAFRQGFYWPTALNDAVDLVRRCRACQFHAKQIHQPAQALQIIPLSWPFAVWGFDILGPFRQAPGGFEYLYVAIDKFTKWPEAYPVVKIDKHSALKFIKGITARFGVPNRIITDNGTQFTSELFGDYCEDMGIKLCFASPAHPRSNGQVERANAEILRGLKTKTLNILKKHDDSWIEELPAVLWANRTTPSRATGETPFFLVYGAEAVLLSELTLRSPRATMYCEADQDQLRRDDLDYLEERRRRAALRAARYQQSLRRYHQHHIRARSLCVDDLVLRRVQTRAGLSKLSPMWEGPYRVIGVPRPGSVRLATGDGTELPNPWNIEHLRRFYP

SEQ ID NO: 178875 - protein, 49 aa, Oryza sativa
  Clone ID: PAT_MRT4530_76391C.1.pep
MADIRVHLLDNNMESTLVNMSVNRPFTIPVETSAGITIWDTTTFAVMQN

SEQ ID NO: 178876 - protein, 1090 aa, Oryza sativa
  Clone ID: PAT_MRT4530_76392C.1.pep
MSVWNYVVTAHKPTSVTHSCVGNFTGPNQLNLIVAKCTRIEIHLLTPQGLQPMIDVPIYGRIATLELFRPHNETQDFLFIATERYKFCVLQWDGEKSELLTRAMGDVSDRIGRPTDNGQIGIIDPDCRLIGLHLYDGLFKVIPFDNKGQLKEAFNIRLEELQVLDIKFLYGCVKPTIVVLYQDNKDARHVKTYEVALKDKDFVEGPWSQNNLDNGAGLLIPVPAPLGGVIIIGEETIVYCNANSTFRAIPIKQSIIRAYGRVDPDGSRYLLGDNAGILHLLVLTHERERVTGLKIEYLGETSIASSISYLDNGVVYVGSRFGDSQLVKLNLQADPNGSYVEVLERYVNLGPIVDFCVVDLDRQGQGQVVTCSGAFKDGSLRVVRNGIGINEQASVELQGIKGLWSLKSSFNDPYDMYLVVSFISETRFLAMNMEDELEETEIEGFDAQTQTLFCQNAINDLLIQVTANSVRLVSCTSRELVDQWNAPEGFSVNVASANASQVLLATGGGHLVYLEIKDSKLVEVKHIQLEHEISCVDLNPIGENPQYSSLAAVGMWTDISVRILSFPDLELIRKENLGGEIVPRPVLLCTLEGVSYLLCALGDGHLFSFLLNASTGELTDRKKVSLGTQPISLRTFSSKGTTHVFASSDRPTVIYSSNKKLLYSNVNLKEVNHMCPFNTAAIPDSLAIAKEGELSIGTIDDIQKLHIRTIPLNEQARRICHQEQSRTLAFCSFKHNQTSIEESETHFVRLLDHQTFEFLSIYQLDQYEHGCSIISCSFSDDNNVYYCVGTAYVLPEENEPSKGRILVFAVEDGRLQLIVEKETKGAVYSLNAFNGKLLAAINQKIQLYKWMLREDGSHELQSECGHHGHILALYTQTRGDFIVVGDLMKSISLLVYKHEESAIEELARDYNANWMSAVEMLDDEIYIGAENNYNIFTVRKNSDAATDEERGRLEVVGEYHLGEFGNRLRHGSLVMRLPDSEMGQIPTVIFGTINGVIGIIASLPHEQYVFLEKLQSTLVKFIKGVGNLSHEQWRSFHNDKKTSEARNFLDGDLIESFLDLSRNKMEEVAKGMGVPVEELSKRVEELTRLH

SEQ ID NO: 178877 - protein, 108 aa, Oryza sativa
  Clone ID: PAT_MRT4530_76393C.1.pep
AIEVPQNIFFLYPSPVYDYEIVLQEHMENQACFSLNRQHAQNKFERVAEVSLSVSSFLLRVPVQHMYQSTEGKTWRLDNYWPSSSTTTRNEMRTCKAQQFTTAHFLPQ

SEQ ID NO: 178878 - protein, 103 aa, Oryza sativa
  unsure (1)..(103): unsure at all Xaa locations
  Clone ID: PAT_MRT4530_76394C.1.pep
RLRLGLPVXECWDSGYWMSYLWADDPEVRAMLGIHEGSIAYWSRCTALMLFRHDVDSAIPYHAELTQCGYRALVYNGDHDSXMTVFGTQYWIRSLGYNVETAW

SEQ ID NO: 178879 - protein, 96 aa, Oryza sativa
  unsure (1)..(96): unsure at all Xaa locations
  Clone ID: PAT_MRT4530_76395C.1.pep
AGAARSRCRQRRRRLTAEVAYGCRRWWTWPGRSRSFSVRSLNVLPTPTPPSPTPPSRXPFSPSSLATNAAAVDSAPNPRDLAPSAPAGGGRLPDPR

SEQ ID NO: 178880 - protein, 365 aa, Oryza sativa
  Clone ID: PAT_MRT4530_76396C.1.pep
MEELEGHRGEGRLPPPPPLLPFPKVSVQVYTVPSSSTAASAAAAGGARQAVAPATRDGGDGGGRAAGVLDDPVKARIVSHPRYHRLLAAFLDCHKVGCPAEAAEEIAAAARVREARQRAAAAASRMPPAPEDPELDQFMEDYCKLLVECKEELSRPLQEAEEFLRTVESELNSINSGPPLTALISESKAGLDSSDDDEHEDGSGMEMMEAAEDEDLGIIDPRSDDKALKRHLLRKYSGYLGGLRKELSKKRKKGKLPKEARQKLLTWWELHYRWPNPSEMEKIALAESTGLEQKQINNCFINQRKRHWKPTEEMEFAVMEAYHHQSTDAAAAFYVDVDARLVGATAAAPASAVYTARPDHGVWRA

SEQ ID NO: 178881 - protein, 132 aa, Oryza sativa
  unsure (1)..(132): unsure at all Xaa locations
  Clone ID: PAT_MRT4530_76397C.1.pep
MSGAYRDRTFGGAAGEIHRKRIKSTRSXHLNRTATTTSRGADVGKERDRLASALGKLTVPVDLVEKAYDGAHNVXNGSDNYDXVSSDGVETHIAXWVCWSSCIERFCESDDEYIQXDDFNLCGVSIQVPYYD

SEQ ID NO: 178882 - protein, 105 aa, Oryza sativa
  Clone ID: PAT_MRT4530_76398C.1.pep
MVWRSKSGGGGASPSRENGGEDEVPRGHVPMVAGGGGDCDGDGGERVMVPVRLLGDPCIAELLDMAAQQYGFGQPGVLRVPCDAGHFRRVVERALRKGAAGGRSA

SEQ ID NO: 178883 - protein, 75 aa, Oryza sativa
  unsure (1)..(75): unsure at all Xaa locations
  Clone ID: PAT_MRT4530_76399C.1.pep
TVLWRTXXXSKNHPEASICTPEASXFKRIANFQDYHGLPEFRKAMXQFMGQXRGGKATFXPDRVVMSGGAXPRET

SEQ ID NO: 178884 - protein, 90 aa, Oryza sativa
  Clone ID: PAT_MRT4530_7639C.1.pep
FKVVGGFSPRILKFFPKVAFFWGGIKKKGGKDWVGFKGFFFYPWGFKSGGPLKGPFFVRFFFKKGGSRVVDFFFPQRFPGGFENKRGLPL

SEQ ID NO: 178885 - protein, 104 aa, Oryza sativa
  unsure (1)..(104): unsure at all Xaa locations
  Clone ID: PAT_MRT4530_763C.1.pep
AGRLFDQTARGRSRGGREDVWLSERVRSSHSDHPSAGGLTSSRRRGERREDFNPAAVGGAITPRPPRPPYTPRRRRLPAPCADSSPLXPPPPPPRSPVKQSTSV

SEQ ID NO: 178886 - protein, 48 aa, Oryza sativa
  Clone ID: PAT_MRT4530_76400C.1.pep
FRVMTKRLSALTYGDAQLLFELYLSIEKLRWELYENLETKDEIKGTTK

SEQ ID NO: 178887 - protein, 233 aa, Oryza sativa
  unsure (1)..(233): unsure at all Xaa locations
  Clone ID: PAT_MRT4530_76401C.1.pep
GKATPENSCKINMCFDSYSVMNNWHLXLLVLIFRDYCSRGFRDNXFQVXIPVRPGGGCRLELMHVVGEDFIWHTMEVLCEYGMRSXIWKESKFGMIGYVKFVSCTRGFRKVFRTSSMSLVRGFRLPTSGINRGGASVSLGFGGLTGDIPTVRPAAAGRXVGGDFGGSTDRSTSVRPMTTRRSDRCTHFGQTAIRRIRGVRDHGSSPSDVLSSEIRVREDQSDVAACRCRGSSR

SEQ ID NO: 178888 - protein, 159 aa, Oryza sativa
  unsure (1)..(159): unsure at all Xaa locations
  Clone ID: PAT_MRT4530_76402C.1.pep
EPGKFTASCAAEGCKWRIHACAVADGVTIMVKTNLVAHGCSSTRRSETIKAASKFWICEKVKDWLLEDATVGAKELQRRIHETHKVLINYKRVFVGRELALTKLYGSWNESFDMLYRYEAQIELLSPGSFFIIDHHKVLEEIRFRRLFFXLKPCIDGFL

SEQ ID NO: 178889 - protein, 200 aa, Oryza sativa
  unsure (1)..(200): unsure at all Xaa locations
  Clone ID: PAT_MRT4530_76403C.1.pep
FCKIKVCFDSYSVMNNWHMXLLVLIFGDYRRSGFGDNQFSGDXIGFTGLSGPVRPGGGCRLELMHVVDGDSIWHTMEVLCVYGMRSRIWKESKFGTIGYVKFLSYTRGFPKVFRTLSMSLVHGFRLPTSCINRGGASDRRPTGGQTDXRRGGQTGGGGNSDRSWRXSRRFDRXTTSVRQTISRRSDRCYYFGQTAIHRFR

SEQ ID NO: 178890 - protein, 180 aa, Oryza sativa
  Clone ID: PAT_MRT4530_76404C.1.pep
PYLNTDPCIDAAVYGGRQCNSAVFSPSIGGNGLSRYRTDFHEIEKIGYGNFSVVFKVLNRIDGCLYAAKRSIKQLHNDMERRQAVKEVQAMAALGSHENIVRYFTSWLENEQLYIQMELCDRSLSMNRNQPVKHGEALELLYQICKGLDFMHERGIAHLDVKPDNIYVRNGIYKLGDLAV

SEQ ID NO: 178891 - protein, 63 aa, Oryza sativa
  Clone ID: PAT_MRT4530_76405C.1.pep
TSGSPGLQAIRAQCIPCPCNQSTRWLVVAIRSIASLEYSMIDVFFFSKLDFYRTTCLMNSFAM

SEQ ID NO: 178892 - protein, 217 aa, Oryza sativa
  unsure (1)..(217): unsure at all Xaa locations
  Clone ID: PAT_MRT4530_76406C.1.pep
MSRTSGKRHLQSKIKGVFDYYSVMNNWNWRLLVLLFGIYSRSGFGDDWIXQVIAGFVILCXPVRPGSGSRLELMHVVDGDSIWHTMELLCAYGMRSRIWKESKFGTFSYVKFLSCTRGFPKVFRTLSMSLVHGFWLPTSCINRGGVSERQHCGGQTGGSMAVRPAAATASGRRSRRLDRXSTTVRPAATLRSDRLIYFGQTDLIEIEGTHRGAKFLF

SEQ ID NO: 178893 - protein, 249 aa, Oryza sativa
  unsure (1)..(249): unsure at all Xaa locations
  Clone ID: PAT_MRT4530_76407C.1.pep
LAAHVVTCPRQPVPHHAVPPQSHARKGSHPSSTLGPRPKSNCDTRTDQNTIIKCKIKGVFDYYFMMNNWAXRLLVLLFGIYSRSGFGDDXISQVIVGFVILCXPVRPGSGSRLVLMHVVDGDSIWHTMELLCAYGMRSQIWKESKFGMIGYVKFLSCTRGFPKVFRTLSISLVHGFRLSTSCINRGGALCLPGFGGQTGGSTAVRPAAATASSSXSRRSDRRXTAVRPTTTRRSDRQDNFGQTAIRRFR

SEQ ID NO: 178894 - protein, 78 aa, Oryza sativa
  unsure (1)..(78): unsure at all Xaa locations
  Clone ID: PAT_MRT4530_76408C.1.pep
DTRIPAWDHEFEFPMSVAELXLVRVEVXDSDNHQKDYFGGPTCLPXRELRQGIRSVRLCDHRGEPFRSGKVLMRFDLT

SEQ ID NO: 178895 - protein, 214 aa, Oryza sativa
  Clone ID: PAT_MRT4530_76409C.1.pep
WPALCFSRSAAPGTTTERSGGRRQADGGAKPTGRSGAAAGGRAGAVAAPEAGGAVEPSERREPRRWRGAALSSRPCAAATRRQPARRPPLPPLPLAQPAAVVSSSSSSSTAAARTPRGGSWRSSGPRRRPTPTNWSSRGRARRQRGRGGTAARAAAAGKGTRTPRLGRAAPGTAPTCAALNSSTRGEGEGEGEGGRRKKRRVRMICGAHGRKSD

SEQ ID NO: 178896 - protein, 169 aa, Oryza sativa
  Clone ID: PAT_MRT4530_7640C.1.pep
AAAAAMALRRINLRKKPLLLFPRPFSSSSSPNPPFPPPPPPPNDRDDASPKPSEGEGRNPAASLFQDLRDRLMSTPSHLPSRRIPTAPPPRPSGNAEPVASIDDIRRQLESYRGSLAARGAPPGSSPDGADPSLLDLVRSTSSPTSPQGPNSGHFSSLAESLRNLPSGR

SEQ ID NO: 178897 - protein, 206 aa, Oryza sativa
  unsure (1)..(206): unsure at all Xaa locations
  Clone ID: PAT_MRT4530_76410C.1.pep
IEYTLRKTSLNCEIKGVFYYYSVMNNWHWRLLVLIFEIYLRSGFGDDWISQVIYMYYWICGPVRPGMCCQLEXMHVVGEDSIWHTMEVLCAYGIRSRIWKESKFGMIGYVKFVSYTKRFPRGIRTSSMSLVHAFRLPTSCINREGASNRRDTGGQTGGHTVVRPAAATGAGDXPRRFDRXTTSVRPTCSRRSDRHVYFGQTAIHRI

SEQ ID NO: 178898 - protein, 61 aa, Oryza sativa
  Clone ID: PAT_MRT4530_76411C.1.pep
SSSIYVQSKLEAKLLIPSSLESFTLVCKVVWLSVLLVLYHSLFKPCPVVNCLLERGGHPEL

SEQ ID NO: 178899 - protein, 201 aa, Oryza sativa
  unsure (1)..(201): unsure at all Xaa locations
  Clone ID: PAT_MRT4530_76412C.1.pep
YNCKIKGVFDYYSVMNNCHWRLLVLLFGIYSRSGFGDDWIXQVNCRFIISCGPVRLGRCVRLELMHVVDGDSXYIWHTMEVLCAYGMRSRIWKESKFGTIGYVKFLSCTRGFPKVFRTLSMSLVHGFRLPTSGINRGGACISPSFDGQTGGAPAVRPAATGVGGRRSRRFDRSSISVRPTFIRRSDRRNYFGQIAIRRIRG

SEQ ID NO: 178900 - protein, 203 aa, Oryza sativa
  unsure (1)..(203): unsure at all Xaa locations
  Clone ID: PAT_MRT4530_76413C.1.pep
KTSLDCKIKGVFDYYSVMNNWALDIIGFVFGIXSRSGFGDDWFSQVKSAALTXLCGPVRPGSGSRLELMHVVDGVSIWHTMELLCEYGMRSRIWKESKFGTIGYVKFLSCTSGFPKVFRTPSMSLVRGFRLPTSCINRGGASDRWHHGGPTGGHTAVRPAATGVGGRCFRRFDRSXSTSVRPTFIRQSDWLNYFSQTAIHRFR

SEQ ID NO: 178901 - protein, 207 aa, Oryza sativa
  unsure (1)..(207): unsure at all Xaa locations
  Clone ID: PAT_MRT4530_76414C.1.pep
RHPDPPYIWCKIKVCFDSYSVMNNWHLXLLVLIFGDYRRSGFGDNQFSGDDRIHCYFMXPVRPGGVCRLELMHVVGEDSIWHTMEVLCAYGMRSRIWKESKFGTIGYVKFLSCTRGFSKVFRTLSMSLVRGFRLPTSCINRGGASDRQQXGGQIGSARAVRPAAQAGSGRRFRRFDRSXSTSVRPTFIRRSDRRIYFGQTAIHRFRG

SEQ ID NO: 178902 - protein, 374 aa, Oryza sativa
  unsure (1)..(374): unsure at all Xaa locations
  Clone ID: PAT_MRT4530_76415C.1.pep
ADNNFTQETAMTMIGLFGPPDDSLLQFDESRVADIPQISLLENEALTQDFTEKEIKKAIFQMEHNKASGPDGFPAEFYQVFWNVIKNDLLDLFKEFHNGSLPLFSLNFGTIILLPKCVEAMKIQQYRPICLLNVSFKIFTKVATNRVMSVAQKVISPTQTAFIPGRNIMEGVVILHETLHELHRKNNSDVIRKIDFEKAYDKVKWXNFQTHKGLRQGDPLSPILFNIVADMLALLIKRAKDNGSLNGVIPHLVDDGLSILQYANDTIIFLEHDLRXAKNLKLILSVFEKLSGLKINFHKRSXVIMIGRLLNKEXRENLVVGKVIFRATYWLRLWAQLQKCEEDREFLSVACRNLESTVMXLFTNHGWRFTNRLK

SEQ ID NO: 178903 - protein, 207 aa, Oryza sativa
  Clone ID: PAT_MRT4530_76416C.1.pep
CKIKGVFDYYSVMNNWHRRLLVLLFGIYLRSGFIDDWNLQVIDRDCCLSGPVKPGRVCRLELMHMVCEDSIWHTMEVLCAYGMRSRIWKESKFGMIGYVKFVSCTKGFPKVFRTSSMSLVRGFRLPTSGINRGGASNRRHTGGQTGSIAAVRPAAAGDFGGSTDRSTSVRPTFIRRSNWRNTFGQTAIRRIKKPRHSRTTRHRSISQ

SEQ ID NO: 178904 - protein, 90 aa, Oryza sativa
  Clone ID: PAT_MRT4530_76417C.1.pep
MPKREKAAARFGWTETAALRRDSNGCSGLKSFPRASNENVQSAGCILLEVIEGERHSAVSDLAGHGFEEEDYPVVNYESDLQTAMSTTVR

SEQ ID NO: 178905 - protein, 69 aa, Oryza sativa
  Clone ID: PAT_MRT4530_76418C.1.pep
MREEEDREFREDEQKDGRSSVTSNEKGEQQSSLGRMNRKAEYPCAKKKIETRKESSNPLRWACHCLLLE

SEQ ID NO: 178906 - protein, 129 aa, Oryza sativa
  Clone ID: PAT_MRT4530_76419C.1.pep
MSRNNGKSSKLECLRLMSLSRARGGGGGGPSATVRPGGDSGGVNGANTSPRRLSSSSSSTASPPSSCVSSEGSPDAAGGGAGPPMVLAGCPRCMMYVMLSREDPRCPRCHSAVLLDFNDDDQRRPRQRR

SEQ ID NO: 178907 - protein, 1404 aa, Oryza sativa
  Clone ID: PAT_MRT4530_7641C.1.pep
MMSSIAVAAASAGLRGLAQPIIGNLSSFASRYVGVDMAREMVDLETIILPQLNLIIASAESQPQHVNNIVQKCLQRLKVELSQAEDLLDEHEYDLLKHRMKQKKLSVFSVHGQCQGPISNPFIWVLSNISSLSPHNTKMLNHLKEVKSILEKAKNFLGVLSVATQVSADTAGSRVIQDTTTFREEKVFGRDKDRDSIINLLFDPAMVGGGNSNIKGYSSIAIVGAGGAGKTTLLQYICSDDRVQNNFHVIWVCMSHKLDIRKHTTEVIESLATEETPKIQNLDTLQRKLKNLLLEKREKELLLVLDDVWFEQRHHSEWEQFLAPLISAEFNKGIRILVSSRSKELPSVLNCRKTVSLEDIEENDFLTFFRYYSLGHVLIGNEELEEELQGIGDDIAKKLRRSPLEAKAVASRLSRMLDVEIWKHARDSKQLDGNIMENLLWSYQRLDPQVQRCFLYCSIFPKGYMFHIDEIILLWEAEGFVSSNGRSERAEGITRQYFYELSLSGFFGKQSHGKDSHVGYRMHDLFHDLAENLSIDDGYRIETEENTEIPQFVRHISISVPSLERHAASICKLEQLHTLIFFNPVADIGKFLKPMLKKLKKLRVLSLCFFSSYTLPKHIGKLKHLRYLNLERTSISKLPKSSCKLYHLLVLKMNKKVPKTLPKKANNLISLRRINGPLKDVCNVGMLTSLEDMKEFQVKKEKGYEIGQLGSLTKLRGHLHIMNLENVQNRNAAKDAKLQEKANLDALRLVWNHDTYKNNNVDLEVLEGLEPSSRLNELAIEGYRSTSYPKWLSGCSQSLRSLELLNCTFLENLPSNLQCFARCRSLALLNLTGLKRLSPLPENLTSLKFGGCSSLCFISKEEEEHGVNPAREKALQPLTSSTELETLTEILRLDGSELEQFQACFQELQYPVSTISARRRDVAQLVLPLTLRRLELSSCNITDQALSECLRSLTSLKDLALLHITTLSALPSKQVMENLSMLSSVGITSCRSLCSVAGLGAIASLEKFAISFCPSLELSDRRILPSQLKEVTVRGCTIHDGFLHDDLPFLVNLEISKCRTPSVLQVGAWPSLKCLKLCDCLDVCFLVGLPALESLQEVQLVLPNLGADSFTGCKGNWRSLRVRTSSLLHDLSELEGFAPPMLLTIEGCQEPDFSLEGIQNLSSIIGLSFMNCKVQSISAMKDLASLETLAFFDCPLLISLPELPPSVQYLDIIGCQILEKSCRSRRGEDRRKISQIPHVERKNHGRQPGKYLHYIWGEVTTPHGGLQEVSGEYSMIKAGGALKMVDDERVMMESLLCLPPASRRRHHPHLLRRPPGRQPPLRHAPRLIQLMPNCTVTAAWRRDQAIPSGRICAIQPTTNATVLQSNRLIVAKKLTAGCTRRVVRCAIIEKIALLGAQGSVVGTL

SEQ ID NO: 178908 - protein, 102 aa, Oryza sativa
  Clone ID: PAT_MRT4530_76420C.1.pep
MAEQLRKLGGIRTGAAGARRGEKMGKEKPKAMGMKSSNTTYIDISHELKKLLLDKLLLIGSIPNSDGDWVMGKFTGRWAKLELQSKMQSESSSSTVCAQEQH

SEQ ID NO: 178909 - protein, 45 aa, Oryza sativa
  Clone ID: PAT_MRT4530_76421C.1.pep
KLLPLLTEVPIKMPFWDVHGLNLTTLIREGDKHIKVIYFVEDRCH

SEQ ID NO: 178910 - protein, 47 aa, Oryza sativa
  Clone ID: PAT_MRT4530_76422C.1.pep
ASDHGKVILQFGKVGKDMFTMDYRYPLSAFQAFAICLTSFDTKLACE

SEQ ID NO: 178911 - protein, 224 aa, Oryza sativa
  unsure (1)..(224): unsure at all Xaa locations
  Clone ID: PAT_MRT4530_76423C.1.pep
HLEEVFYTPLPIQAIQEWHLLSSTVQTLNLNHMEDQWTYIWNSPQYQSKRVYDMFFTHIQPEIPLTLIXKSKCTLKFKVFLWLFLLDRLNTKELLXXKHFNTQGGATCVTCNNSITEDSLHLFFVCPFAQQCWHILGINWDLNLNFMNMIIAANRNFPHPFFMEVLAICCWHLWSRRNDLIFNGIQANFGKWKADFKDEFTLLDCRPESDKLVQELNCHSIIDG

SEQ ID NO: 178912 - protein, 193 aa, Oryza sativa
  Clone ID: PAT_MRT4530_76424C.1.pep
MCSRVAESCAGLGEQYGSFIRIRYSHGPWRGAACDFEGPRATDLCSAVLRAWTTPTRSATPGQNPTTRLTRVGGGNAQPPPPRVAPLAPCNRACQLIQLQPSESPRTRQHPSKYAGHFLRVHVRVPPISTSSSDPRDYRTRLIRMQPTSYIFVVLPAAGKALSYAAGKLKLQPSGQRAKHACIHRKDKAKAPD

SEQ ID NO: 178913 - protein, 48 aa, Oryza sativa
  Clone ID: PAT_MRT4530_76425C.1.pep
DLGLHRLSICSAQVYKQITIWFRENKRCDRPAEGQIFSHVSLVIEQRC

SEQ ID NO: 178914 - protein, 469 aa, Oryza sativa
  Clone ID: PAT_MRT4530_76426C.1.pep
MQLPEDILYHIHTLMPMQDAARAACASRCFLRSWRFYPRLNLNVNTLRIDKRAPSNDKLTIDFISRVDPIMLNHAGTGVKMFKLTTHPCFSLHPSYVDRWLQIAFAPGIKEFELEMTRVSKMDYDFPCSLLSRVASSIQSFLLGGCSFHPGIQIGQMSTLTSLRLRSVKITEEELCGFLSKSCALQRLLLSDCHNIVVLKIPHLLELNYLEVLHFRKLEVIDSSAPKLSTFIYAGPPIQISLGEALLQVKKMQMFCDGSPDALHYGSKKLPSIAPNIQKLYLSTRNETVNTPKVLGKFLQLKCLEILLLTPDLSPGYDFCSLVSFIDASPALETFILRIERPAKRHDSILEALSGDSMHPMRASEYRHDNLKNMMITGFSSAKSMIDLANHILEKASSLEYLTLDTTRGYDRRNDKIDPCQCLQMSKEALLEAEKALLAIRIYVEGRVPSSVSLKVIEPCSNCHTETRS

SEQ ID NO: 178915 - protein, 243 aa, Oryza sativa
  Clone ID: PAT_MRT4530_76427C.1.pep
MDRQKNRAERPQSSEDKKEDDEKKKKIKRSTLYLTAALKDSSYGLLRKIQSAMNKEGKEGQRPFSCRRCRSREPRDLEHPHSIRLDPWFPGLGHPDLEVLSLGLGVASTGSGGDGGSSSPAGDGGDGRLHLADGAGRRLGSRPAVRRRYRTGARHVDLERIEGRRRLEGNLAAHRVALKSGRKKGTGEQHGGEDLPPMYLDIDDLIITRTSDGEDSDELCSIKSDSPRDATPPRKIPPAGRRS

SEQ ID NO: 178916 - protein, 403 aa, Oryza sativa
  unsure (1)..(403): unsure at all Xaa locations
  Clone ID: PAT_MRT4530_76428C.1.pep
KPRTRRGVDEDEARRVLLAGVVPGRAAEEAEDRRRRRGGIGCGGRGGGRRRRGAXNDMFEELPDDLVVSILADVAASARSPGDLAGAMLTCKRFRELGQSKVVLARASPRCLAVRAKAWSDAAHRFLQRCADAGNLDACYLLGMIRFYCLGSRGSGAALMAAAAVGGHREALYSLAVIQFNGSGGSKDDRDLRAGAALCARAASLGHVDALRELGHCLQDSYGVRRSVLDGRRLLIQANARELAAAVAASASLLRAATGKPAAAASRRHSCLLNDFGXTPRRPRPAGEAHAANRFLVDWFASRPLTGSTTSAAPAPTPGSAAEDEAAGLRLCSHALCGRPETRRHEFRRCSVCGVVNYCSRACQALHWKTAHKAECTPMDRWLDNAAAGAANPNAAAMAAPAP

SEQ ID NO: 178917 - protein, 82 aa, Oryza sativa
  Clone ID: PAT_MRT4530_76429C.1.pep
FFFFFFFSGGISNPVKKINIPVSWLWNPTGNLAAHRVALKSGRKKGTGEQHGGEGEQSQGSSSSQKQQSVSETQREREKHGI

SEQ ID NO: 178918 - protein, 165 aa, Oryza sativa
  Clone ID: PAT_MRT4530_7642C.1.pep
MAGAAKGATFPPRSGAMAKQDLVGVEKELRFGSPAMATPTPTKGAKGAAFPCPGPGALVTLDLVPKKLSFDPLPGAAAVGGGEAPKKVVTSSPSSPSKNARLYTGGEMLFTPVGLAMFGVFGDFALAALKRWAFDFLQSPEVTQILKTFINNRYYGYVTKLVINM

SEQ ID NO: 178919 - protein, 93 aa, Oryza sativa
  Clone ID: PAT_MRT4530_76430C.1.pep
PWFVWLPIGRPLGQVILWCPGVRNSAAKFFFSPPSGWGNLFIPFPFFCGVGFLAFFVSGLGKFFCFKKVEWSLQYLFYLAMGFLKIPPHGGVP

SEQ ID NO: 178920 - protein, 68 aa, Oryza sativa
  Clone ID: PAT_MRT4530_76431C.1.pep
MTKSKSFKEEHTLDKRQAEAQRIREKYPDRIPVIVEKAEKTDIPDIDKKKYLVPSDLTVGQFVYVIRK

SEQ ID NO: 178921 - protein, 408 aa, Oryza sativa
  Clone ID: PAT_MRT4530_76432C.1.pep
MQAAAAWRRHLLDGNISPTTAAAISAFRSASQPALAPQGLGGADGARYMSARAPAVKGTGHLVRKGTGGRSSVSGIIATVFGATGFLGRYLVQQLAKMGSQVLVPFRGSEDCHRHLKLMGDLGQIVPMKYNPRDVDSIKAVMAKSNVVINLIGREYETRNYGFDEVNHHMAEQLAMISKEHGGIMRFIQVSSLGASASSPSRMLRAKAAGEESVLKEFPEATIMRPATMIGTEDRILNRWAQFAKNWGFLPLVDSGSTKIQPVYVVDVAAAIVNSLKDDGTSMGKTYELGGPEIYTVHELAELMYETIREWPRYIDVPLPIARAIASPREMLLNKVPFPLPTPSIFNKDQINAFSVDTLVSDNALTFSDLGIVPHKLKGYPVEFLVCYRKGGPAFGSTVSEKIRSSEL

SEQ ID NO: 178922 - protein, 973 aa, Oryza sativa
  unsure (1)..(973): unsure at all Xaa locations
  Clone ID: PAT_MRT4530_76433C.1.pep
GRPVEMDAVSIIATFPSEIREEVLLTSPDTLLATLTPALVAEANMLRERFAHRYHSGSLFGMNSRGRRGESSRRGDIIGSGLDRNAGDSSRQPTSKPIETEGSPLVDKDALKALIRLLRVVQPLYKGQLQRLLLNLCAHRESRKSLVQILVDMLMLDLQGSSKKSIDATEPPFRLYGCHANITYSRPQSTDGVPPLVSRRVLETLTYLARNHPNVAKLLLFLEFPCPPTCHAETSDQRRGKAVLMEGDSEQNAYALVLLLTLLNQPLYMRSVAHLEQLLNLLEVVMLNAENEITQAKLEAASEKPSGPENATQDAQEGANAAGSSGSKSNAEDSSKLPPVDGESSLQKVLQSLPQAELRLLCSLLAHDGLSDNAYLLVAEVLKKIVALXLFFCCHFINELAHSMQNLTLCAMKELHLYEDSEKALLSTSSANGTAILRVVQALSSLVTTLQEKKDPDHPAEKDHSDALSQISEINTALDALWLELSNCISKIESSSEYASNLSPASANAATLTTGVAPPLPAGTQNILPYIESFFVTCEKLRPGQPDAIQEASTSDMEDASTSSGGQKSSGSHANLDEKHNAFVKFSEKHRRLLNAFIRQNPGLLEKSFSLMLKIPRLIEFDNKRAYFRSKIKHQHDHHHSPVRISVRRAYILEDSYNQLRMRSPQDLKGRLTVHFQGEEGIDAGGLTREWYQLLSRVIFDKGALLFTTVGNDLTFQPNPNSVYQTEHLSYFKFVGRVVGKALFDGQLLDVHFTRSFYKHILGVKVTYHDIEAIDPAYYKNLKWMLENDISDVLDLSFSMDADEEKRILYEKAEVTDYELIPGGRNIKVTEENKHEYVNRVAEHRLTTAIRPQITSFMEGFNELIPEELISIFNDKELELLISGLPDIDLDDLKANTEYSGYSIASPVIQWFWEIVQGFSKEDKARFLQFVTGTSKVPLEGFSALQGISGPQRFQIHKAYGSTNHLPSAHTCF

SEQ ID NO: 178923 - protein, 74 aa, Oryza sativa
  Clone ID: PAT_MRT4530_76434C.1.pep
MIASMCAHVCIVKRIKLCGSTDRYARPPPFPPHVVILTTLCGHFKLQSLSDEVSVSVGVGVPGCTGPVRAGCTA

SEQ ID NO: 178924 - protein, 561 aa, Oryza sativa
  Clone ID: PAT_MRT4530_76435C.1.pep
MADAAHHLRRRSSAALPRGWCCSFSATPQSPDHHRPLSAASAAGGEGVGGGGARGKLPPKSPSVSLPSFQSSPSSRLAGFIDPRRILSPGRVSPIDPDGSPAVAAGANSEEDATPRPSVPFVAVREEREEEEGRGLDLKLCLRGRDGRSVAMELDSAVLCESSAFFAAMAPPPEATVGGGSKRIEVDGVENVEAFKETVELMFEADPMRCTPQRVNGLINFYCMYTYSRSLEGYELKHIECTADGYPALQTVSGLQLKVSSSIMFDRGIKSCLEYIEAVPWNENEEEKLKNLFARCTFDEAVSKDVLARLKPQCQSISDDVTVHLIQSVTSSTNTGARKEMQSLVNGLLSRSSVYQKDLSGLNKGSLYQICCSCLNSLVEHFTEDLCSDKIVRDSKPMIERVSKQTENLNWLFDILVNNDMAEEFVELWAKQEDLISMHGQASAMFRYELSRISANVFIVLGKGKVQCPSDLRSQLFYGWFRPMLMDFGWLQRCSKGLDMRMLEENLGQALLTLPLQQQQSLFEEWFQCFASRGTECPNLSRAFQVWWRRSFVRSSLESRR

SEQ ID NO: 178925 - protein, 87 aa, Oryza sativa
  Clone ID: PAT_MRT4530_76436C.1.pep
ISAHMLQNKEFILQNIFMTNNFLGTPKFFIVNISRLVDNLLNLLVSIHSASWCSCHIFFLLILHKAFCFFHERTEAFSLLSGMVAAR

SEQ ID NO: 178926 - protein, 98 aa, Oryza sativa
  unsure (1)..(98): unsure at all Xaa locations
  Clone ID: PAT_MRT4530_76437C.1.pep
MQLNPKARTRRNKTKAKRTLSMCGNHLETPQFNPMSYTKLYCQNRLYRLTXSDSDPADPXIVADPDFSRFLLRINLRLRLQLDLISFFDADITKFARR

SEQ ID NO: 178927 - protein, 97 aa, Oryza sativa
  Clone ID: PAT_MRT4530_76438C.1.pep
PMRRRRSSLPDEHRQQALEHGAARLGGPCELELRPEENVDKDAARARCGQRREGGGHVGLACSTFAWQEDSTERKYGTAMSRPARRHDWKMTNGESC

SEQ ID NO: 178928 - protein, 76 aa, Oryza sativa
  Clone ID: PAT_MRT4530_76439C.1.pep
EKPPIPPPNNPSGVAPDPITPGSPSDNAGLNGGNNNNSGFPVWAIIVIVIVVGLIIIIITLIIVAVKKNQKSEKPV

SEQ ID NO: 178929 - protein, 344 aa, Oryza sativa
  Clone ID: PAT_MRT4530_7643C.1.pep
MATKLLAAVITVLALLGHVMGQGGYGPSPSPSPSPSSSGGGLAVGYYDSVCPNAEEIVRGVVKNAVAQDAGVGAGLIRLLFHDCFVQGCDGSVLLDATAANTQPEKLAPPNLTLRGFEVIDEAKAALEAACPGDVSCADVVAFAARDATVLLSGSGVDFAMPAGRLDGRVSLASEALGILPPPTSNLSALTASFAAKGLGVGDLVVLSGAHSVGRSHCSSFSDRLNSSSSSGSDINPALAASLTQQCSANASSGGGGDPTVMQDAVTPDVLDRQYYTNVLNGSALFTSDAALLTSLETKVAVLANAIIPGLWEGKFRAAMVRMAAVEVKSGAGGEIRKNCRVVS

SEQ ID NO: 178930 - protein, 46 aa, Oryza sativa
  Clone ID: PAT_MRT4530_76440C.1.pep
VLFNGELLPLFGFLEAFHKCLGRYLVFNLGFGFVFAPKFVWGCFLL

SEQ ID NO: 178931 - protein, 434 aa, Oryza sativa
  Clone ID: PAT_MRT4530_76441C.1.pep
METVATEPGTCLRRLPDDLVADEILTRLPARSLARFASVCGAWRAAISGDPSSFLRRRRKKEHSSSFLLLLYALLVHVSVFGDGGEEPTLSLPRTCDGLVLLPNGDDVHVINPATGDVLTLPQSSRVAAAADHSTGLGLDTRTNTYKVARYIHLSTAAAAAAAEDDGAAVMEVFTIGHGDAAAWRETTTPPPPSYPVCHVRTAIHSRGNLFWKLQLRRSPAAAAAGSFLLLRFNLAHETFTVVHHPRPPSHLPSADQNGEPPPPPPPLLSELDGELCLGLLVSGRQELWLYSNNGGGGGGDDRWQWEQRFSIAVSGPDAMYLPLGVLRRHDRLLLQKGVHLYHHDSGGGEESVREVARMDEFEFEWSFPGEPYAFMVIPYTESLVRVTAARPINKTAAATAMAGETAATMMATPERPKRARRANSRYIGDMWDV

SEQ ID NO: 178932 - protein, 72 aa, Oryza sativa
  Clone ID: PAT_MRT4530_76442C.1.pep
MRWKRRDTDDGRGFPGTGTATRAGRGVNRSRARGAGKEQQQPGPASPVNGEFGPGLGGEEKRHRVHEKEAEF

SEQ ID NO: 178933 - protein, 66 aa, Oryza sativa
  Clone ID: PAT_MRT4530_76443C.1.pep
IKIYPYLLKMITTGPKCPHRTVALTWKQHTKSKERPTPRRGPGIQRPPELIQEHRANQAQPRAIHC

SEQ ID NO: 178934 - protein, 100 aa, Oryza sativa
  Clone ID: PAT_MRT4530_76444C.1.pep
MGITRAIVSNHVSYVDILYHMSVSFPSFVAKESVSRLPLVGLISKCLGCIFVQRESKASDSKGVSGAVTERVQEAYQDKNSSMMLLFPGLCTIIILCGFF

SEQ ID NO: 178935 - protein, 264 aa, Oryza sativa
  Clone ID: PAT_MRT4530_76445C.1.pep
MLAGKKIKAPAINPSALAPKKKAKKQKPKPADDLPALDPSIEQALDEEDIEEDVDQAAAEKKKTGVRKKLAATTLKPAPPPPHPPSPPVQLESSDHTPSAAGSHNVEEEEQPTAPTIPVLADLFSFDIKDYLDEETEDDTTSKALAPLSDDVKKTLEDISHRLEQSSLDSLVVGCGSNRTRLHEVQALIPDELANALTPAVYLEQHQFKLGKAKQRLANHRERRDIEATIQVNRQLVHEEKPKLDRLSEGLIKSNIDRLCQGYG

SEQ ID NO: 178936 - protein, 730 aa, Oryza sativa
  unsure (1)..(730): unsure at all Xaa locations
  Clone ID: PAT_MRT4530_76446C.1.pep
MEFQPFPQGVHPNTSEPAMEPMASESSVPIGTAFADLLLQGPEHPSLWNDLTGMFRKAFRWQGADKRFTLSVYVMSVLQGLFPILDWWKTYNLKFFRSDLMAGLTLASLSIPQSIGYATLAKLDPQYGLXTSVVPPLVYAVTGSSREIAIGPVAXVSLLLSSMIQKIVDPSVDPAFYRKMVFTVTFLTGVFQFAFGLFRLGFLVDFLSHAAIVGFMGGAAIVIGLQQLKGLLGLSHFTNRTDVVSVTKAVWVSVHETGRKYKKLFWVSAIAPVLSVALSTLFVYATRADKHGVKIIQKVNSGINASSVEQIDLKGGYAAECAKIALVCAVIALTEAVAVGRSFSAINGYRLDGNKEMVAMGFMNIAGSLSSCYVATGSFSRTAVNFAAGCKTTVSNIIMAATVMVALELLTKLLYYTPVSILASIILSALPGLINVQEVCFLWKVDKMDFLTCMGSFLGVLFGSVEIGLSVALLVSFAKIIIQSIWPQVEILGRLQGTEIFCNVKQIMGWVTDEREAFCSVVLDMSNVVNMDTSGLVALEELHKELACLGIQSIGVHPVLSGVRRGAGEPRGRRRSSIYTSAVAGELRDGIQPETRPWILLLLVVAPHQAGSRVDFGQCDVKRCTGRKLSRFGLLKELRVTNGFGGVVLRELLKAYSQCENGTEIINVQNSWLSSNSNVPKSPVNEKSHQSTEEGSDADSDDGLPPLEENLNHLNFNQDDESEEESESDE

SEQ ID NO: 178937 - protein, 163 aa, Oryza sativa
  Clone ID: PAT_MRT4530_76447C.1.pep
MDCHRRGQIHLTPPSSRTDPPLLVTVEAGSAAPSSCGESGDGVGRSKLKDGQPKRPPVVAVLLHGASRRRTLAWGRLPDMLVVQTGGCNFHRWLSTFFKCDKAAIDARDGKGATEARHREEEEESAALLAYSQRWPGRQRRRRRECIRTNSLSYSVPSKDRIF

SEQ ID NO: 178938 - protein, 70 aa, Oryza sativa
  Clone ID: PAT_MRT4530_76448C.1.pep
IWTHPPHLAFNDIPHFFPPPPRGGAGKPKYLSPPPELGGGCELRAPVRRWSLTPGRKKDAPGMNSRWGGE

SEQ ID NO: 178939 - protein, 422 aa, Oryza sativa
  Clone ID: PAT_MRT4530_76449C.1.pep
MRLPSKEDCPGCSDADENHVSSSSRFHPGKENRERFQEVYEEIDHRLKRTKQEWRIKSKIVPADEVDADKAKQGAGDWAAGPYGDAARGAGLETRWRRARRRRDVGARWQWRRDGDGTTALQRDGRRRGSGGARCEAMPMGDDAAAAARGVRRWDGAAAATRRARGAATGRSCGDGTGARRGDVGEARGTGRKAAAARGLGRCDSERRGARHEVTRQQRRQRRDGDGARQRRRRRLAVAASAHGSGGMLHNPSEAKCVSNVELTIGNKTIPTTFFVIDGKGSYGHKIINFMDGNAGYNQIFMAEEDVHKTTFRCPGGMGLYEWVTKSREWKACGGDGRRAGNDGVLGVGAAALGSGRRLAGRPDLPPPAARWPDPPPPGHREAGSASVDRAPADDVATFQLRENGKGIYYGCNGQLDLSISH

SEQ ID NO: 178940 - protein, 347 aa, Oryza sativa
  Clone ID: PAT_MRT4530_7644C.1.pep
MGNSCSSVDESAAAIATLAESAAAGARETVADEFARAAGSGAGGRGDVAGSAAAGVASGAGGRDDAAGDEVVIAGVLSLADGQKAAAAGAISGVESMQSYMRGTRFFCFGERVCSDQMAALKMAAACGSAAGMRAVAMVAARARHAARIAANPDVENPLHDIPEPNCVPNNPLSLIFDLSSSRCKLLPCHQDPKDRPDYMLSAAATGARAGVLCARMKIQAAGGDSTSHAKYVPFLAPFIGGALPGSYAAYHLVKHSPEWVMGVVFGSISLGFFAACTGTVSGLLGTSSATFQYSRFAAITTFTAVWFLFSFAMTSVFSKTWRKILCGFICGVPGVTFVGAWLYSGW

SEQ ID NO: 178941 - protein, 135 aa, Oryza sativa
  unsure (1)..(135): unsure at all Xaa locations
  Clone ID: PAT_MRT4530_76450C.1.pep
SPSANRSAATKFSRAHPTDYTSNKLREMIRVMKQRNVPASIKWXGNYHIIDSLSNDILFYKMVIHVLSESVCRRYEPEMTRNPGMWPLYRGIFAGVDMFKDNNMKSFIPEEDIVIWLKNICGALDINSSANDGLA

SEQ ID NO: 178942 - protein, 97 aa, Oryza sativa
  Clone ID: PAT_MRT4530_76451C.1.pep
MAMSRAPFGLALVAVPAALLLLVVSSCHASREHPDIRNTMAVGSSKTVVILDDPKCEVMEKCDPKGCTDYCIGIGLGQNNGFCTFHDLQFYCCCPID

SEQ ID NO: 178943 - protein, 477 aa, Oryza sativa
  unsure (1)..(477): unsure at all Xaa locations
  Clone ID: PAT_MRT4530_76452C.1.pep
XKXRISDLPDALRLQILSLLPLKSAIRTGALSSRWRGLWKHGWPDPSSLDVRLPSGEGTASASVAALRAEHLAGIDRRGRRRMDLFSLAFHAGQLAPPELKRFIEYAAACDVEEVRLRLDGGGGRGARGGTRRPGALAVHFPIGSKLLARLSVRGLHLTASANAMVATLEVIHFHSVSLTDAALRRVVSACPRLRELELRYCRHLRRIDFTVGASNLKSLTVVDCSRATELRVPSAPLLRSFRFSGAFLCSNIFGSTADCVEHLYLCSGGPETGLPRTNLPSAVPRLSNLTVLTLCSIALQYVSASVATPNVEKSLNSLRELQLLMFGMANSNLADIYSFLKACRCPQLERLFVQLPTNTYDSFTTNYLEVAEEEPPEGGLENLRLVKMTNFKGYRNELRLVDFLLRKASRLNKLFLIAPKEVHPQGLRKVHSEALPHFLKTDVLHLERASAIAQIIFDESVSPQILPLHSEVFVRV

SEQ ID NO: 178944 - protein, 237 aa, Oryza sativa
  Clone ID: PAT_MRT4530_76453C.1.pep
MTALTRMKFPKRYVIVLLTFICTNVCYIERVGFSIAYTVAADAIGVNQANKGMILSMFYYGYVLSQIPGGWAAQRIGGRRVLLLSFVLWSLICGLIPLDPKREVILVLSRLFVGVAQGFIFPAIHILAQWVLPQEGSSSVSLTTSGMYLGAAGGMLFFPSLVKHMGAQSVFFVEAVLGVAWSVIWLKFSSEPPRTDLPKVSMPKVASREKIKAQAGGVVAPRTVKIPWRRIIFSLPV

SEQ ID NO: 178945 - protein, 173 aa, Oryza sativa
  Clone ID: PAT_MRT4530_76454C.1.pep
MEGCDWLSSGALFAYQFKLTLIVEESDRVKAEVAAAAQASAMLFEHTSFSPSSGPHGDFMFSLDDFEALGNNAGPSTSPPASERKLFSDVARLGFASAQDSPPLRVESGDLTGKSESTGEQGPAATPALSFASIISSTRASDNSLDTHKPNVVGKKGKKPTKVLLSTGGGRRY

SEQ ID NO: 178946 - protein, 81 aa, Oryza sativa
  Clone ID: PAT_MRT4530_76455C.1.pep
LVVVANIHHHRAGLRSMGRGPLPGEARAINIADYNATPRRGPVPHRHRGEPMGAVPIPALDPQQRRRWRWWRVLCPPPRGQ

SEQ ID NO: 178947 - protein, 399 aa, Oryza sativa
  Clone ID: PAT_MRT4530_76456C.1.pep
MGRPPCCEKEGVKKGPWTPEEDMVLASYVQEHGPGNWRAVPPRTGLLRCSKSCRLRWTNYLRPGIRRGGFSHHEERLILHLQALLGNRWAAIASYLPHRTDNDVKNFWNTHLKKKLALTSSSSSPPTPTTPLVARGQWERKLQTDIDLARRALRDALSVDDAASPAMISSGPPAPAAAAAYALSERNISVMLSGWAAPPPARKGLSACNPAAATTTPGGAAAESASTAGTSLELTADCCSGGGDSSASNCLPSSMLLACDDGDATATAAGVAPLSAIESWLLLDDSGEPQLALDEQLLDKQVKEIDWADTFQPLVPKPHGTIYANIEQGLAATRSRRAARRCADSRRAARHEAPRSAAAPQRRPPPRGRRPGLCPSACRREAAGRRPPDGMMEGEGEEL

SEQ ID NO: 178948 - protein, 176 aa, Oryza sativa
  Clone ID: PAT_MRT4530_76457C.1.pep
SAVVSLASLSLILWLVLRPSPPRFSLLAATTTANDSASVVAINAAFAARNPNSHTAVLYDRLQASASYAGLPLTAPSPLIPPFLPQQGQGDAMLSASLTSPPAAAAVAGGRALLRLRVEGQLRWKVAAWVTGRHALTVDCIAVVELQPTPTPSPSAIVGVLQPQDQAGSRCSTTVA

SEQ ID NO: 178949 - protein, 435 aa, Oryza sativa
  Clone ID: PAT_MRT4530_76458C.1.pep
MGRPPCCEKEGVKKGPWTPEEDMVLASYVQEHGPGNWRAVPPRTGLLRCSKSCRLRWTNYLRPGIRRGGFSHHEERLILHLQALLGNRWAAIASYLPHRTDNDVKNFWNTHLKKKLALTSSSSSPPTPTTPLVARGQWERKLQTDIDLARRALRDALSVDDAASPAMISSGPPAPAAAAAYALSERNISVMLSGWAAPPPARKGLSACNPAAATTTPGGAAAESASTAGTSLELTADCCSGGGDSSASNCLPSSMLLACDDGDATATAAGVAPLSAIESWLLLDDSGEPQLALDEQLLDKQVKEIDWADTFQPLVPKPHGTIYANIEQGLAATRRYPSITQDQNSTESRIDKILRKKKKKKHKAVGRCVDSRRAARRCADSRRAARHEAPRSAAAPQRRPPPRGRRPGLCPSACRREAAGRRPPDGMMEGEGEEL

SEQ ID NO: 178950 - protein, 690 aa, Oryza sativa
  Clone ID: PAT_MRT4530_76459C.1.pep
MAAGTAAAAAASSMSPQAGSATRAAHGTGERSALPRYVRAREASKHGTGAPSPGGGKGRGGTGMRSAQELASACTGAAVEEVELLRVVEANARDGMGGSRGESSSAPPPPPRSRVLRQGGLEEEYAKNSPSPLGFAPRLIRHDRQTSYELASTSRPPAPEMGEPLRIITKKAMSEKNRAYTGGNQGRSSSALLPQSRFWQGMCEEAKKVLGIAKYSSSPSRLAARILCDKQVLPESAGTSRPVLEFVDESYQQWLCSQKSTSLVADVIAAVYHDQSVLSPSASTGTLSSLLVPSEEKIQAILGNLGKSVLCTEALHQIRILCDSSKGAQSFLNKCPDMIQVLIDLTTEWKSIWTWALEEERLSIVLSLSIHRPNRERIAAQKKLPCFLKQTVEVAIESGASAAASLVKVASIVSILSEFDMFRKSVLDIGVVTLLCNLLNFENDAVRKEAAIAVLALCGYIGNNMVTDDVLLLLDYLPKGPCVLEVICNQTVVEQLVNIVMAEHESGLVTSQGIYSALSLILVITQNDVSKMKVEHMENFMKWLRELSSNELPMQTMFQLIEIISLLSQRLYSHKPKEFVVKWRDDDDQIWYPLYAEVTIGRPISTSKVARRREWTDIRIVRRLRPLRAQEKMLTKLEFCDRYQNYIQGKNTYKQLYRVAMDCNGSKIAPLSFVRKNHAVPGDNCNRPDF

SEQ ID NO: 178951 - protein, 113 aa, Oryza sativa
  Clone ID: PAT_MRT4530_7645C.1.pep
KKETRGHQGDTGGGGQAAEPDPARPAHKRGGGGGKEGPGGNRGKAGNRGKWGNGNKPEKKTGRPGRGKRRGNRKREKSGNRRGERGEPGGARKPEEPGKRREGAGRGEGARGE

SEQ ID NO: 178952 - protein, 149 aa, Oryza sativa
  Clone ID: PAT_MRT4530_76460C.1.pep
AARDWFLLPLSRIDPFSAASVRHHRGQQHLGFSSPARVDPLFPCSFSGPLRCCRAPPCPPSWAPWCRPCGWRAGARSPPAGCNTSPPPSSGDRREAVREGRRRARPRGREGKERRGRWLAFLHRPLSSLSPSPVRCAAVAASCSPLYAA

SEQ ID NO: 178953 - protein, 83 aa, Oryza sativa
  Clone ID: PAT_MRT4530_76461C.1.pep
GAGISVRQRSTDCFAELRTSYQVEPPRAILVSEGRWTHQINTAKDRKPGPLDGIQDAVLFVTTENDQRIARRLQLMKALKTEE

SEQ ID NO: 178954 - protein, 648 aa, Oryza sativa
  Clone ID: PAT_MRT4530_76462C.1.pep
MAIPRRLAAAAAAETTKRSAAGLAAALGGSGGKPATADLAAAATAAAAAGRASECQSLLLRMSRRRGACRREIVSSLLGSSPTPQPRVFDLLIRTYTQSRKPREAFEAFRLILDHRVPIPAAASNALLAALSRAGWPHLAADAYRLVFSSNSEVNTYTLNIMVHNYCKALEFDKVDAVISEMEKRCVFPDVVTHNVMVDARFRAGDAEAAMALVDSMVSKGLKPGIVTYNSVLKGLCRSGMWDKAWEVFKEMDDFGVAPDVRSFTILIGGFCRVGEIEEALKIYKEMRHRGIKPDLVSFSCLIGLFARRGKMDHAMAYLREMRCFGLVPDGVIYTMVIGGFCRAGLMSDALRVRDEMVGCGCLPDVVTYNTLLNGLCKERRLLDAEGLLNEMRERGVPPDLCTFTTLIHGYCIEGKLDKALQLFDTMLNQRLRPDIVTYNTLIDGMCRQGDLDKANDLWDDMHSREIFPNHVTYSILIDSHCEKGQVEDAFGFLDEMINKGILPNIMTYNSIIKGYCRSGNVSKGQKFLQKMMVNKVSPDLITYNTLIHGYIKEDKMHDAFKLLNMMEKEKVQPDVVTYNMLINGFSVHGNVQEAGWIFEKMCAKGIEPDRYTYMSMINGHVTAGNSKEAFQLHDEMLQRGFAPDDKF

SEQ ID NO: 178955 - protein, 584 aa, Oryza sativa
  unsure (1)..(584): unsure at all Xaa locations
  Clone ID: PAT_MRT4530_76463C.1.pep
MEPKNAIALDEHVLDSTIRKRKRVGATQCAEANDAPNLSQNGPKQNLALFPDSTGHKKSKMMCSADDILERYNNFKISGMPVRVMSHQHGGWRDFPEDVVNSVQQSFQLKRPITSAVFQNRHILLDFMQMVCLDSVMAISKPIAWIDDHGKCFSPDSCAGVIPSEPLQHGKNEFLKSFHDLSSSYEAHEHDGMSAAESSSSASFDAVLSDVQEVNNVVEDKQKVLNESGEVSGENKKGHLSHMNETADGAMQAPRNNQSVQRADSAVRNLLFQGSGHLFTEKDIIGIYRTPMLDQLGRSRYSLFQKEVQVTKNQRGNANERYAWLACTKGTMEEMMMNGALEIAKPLQGPMYGVGAHLAPANSSNICVGLSDIDENGIIRMMLCRVIMGNVEVVFPGSNQCQPTSESFDSGVDDLQRXKHYIIWDANVHKHIYAEYAVIIKVPYMNNGDTASNISEIRNSGALDNPTKDDSLQTIASSGDEQQACMLGRAPSPRSPSSPWMPFSMLFAAISAKVPRSDMDLVHKYYEEFKRRKISRPDLVKQLRQIVGDKLLVSTVVRLQQKLPPMAATEQAPRAPGRGGGASP

SEQ ID NO: 178956 - protein, 335 aa, Oryza sativa
  Clone ID: PAT_MRT4530_76464C.1.pep
MSSSSSSPAPPHVVEDCLGIVQLLSDGTVTRSGDYSSISLMRDVPIDLPVQWKDVVYDAGRGLRLRMYAPANHGGEEGKLPVLVYFHGGGFCIASFELPNFHAGALRLAGELPAVVLSADYRLAPEHRLPAAYEDAVAVLSWLRGQAAAAADPWLAASADFERVFVCGDSCGGNIAHHLTVGCGSGDIALDAARLAGCVMLWPYFGGEERMPSEAPPPPPEGDASPSAMGITLFDQMWRLALPAGATRDHPAANPFGPESPPLDGVAFPPVLIVDPELDVLRDRVADYAARLQAMGKRVELVKFEGQGHGFFVLDPMSEASGELVRVVRRFVHAG

SEQ ID NO: 178957 - protein, 89 aa, Oryza sativa
  Clone ID: PAT_MRT4530_76465C.1.pep
PIFSYVNLSTRYIRHLNVAELSALAMDIATALTAAEIIKTNGLAVEKNIMTWTADFKDDSKTLPMRNAKIEILLGTTSTIDELMTAAAK

SEQ ID NO: 178958 - protein, 105 aa, Oryza sativa
  Clone ID: PAT_MRT4530_76466C.1.pep
MGRDGDDVTGSNFHKSSSSLAALLAGGSSPTTRLSSVPPSSSFAAVMRCSSSPTATGSSPTPWASSSTSGPAAAASSPAARPTSSSLASPWQLPPHPPAALQNKS

SEQ ID NO: 178959 - protein, 38 aa, Oryza sativa
  Clone ID: PAT_MRT4530_76467C.1.pep
MAVMAVLTVKYYDLMTVNNTPTLNICSSRVKAMDSTTG

SEQ ID NO: 178960 - protein, 165 aa, Oryza sativa
  unsure (1)..(165): unsure at all Xaa locations
  Clone ID: PAT_MRT4530_76468C.1.pep
MARWSRSLKRAGLRWEGELGFGLYRGGEVGLGGNRPRRSRSGIWRSSVVTGATXGGDGGWKGKSKKEKGEGALLLAVFGXVEGGESAWEREALPPRLGRTRAAAXQRRRGRLRGAGGLGRTATEGGQPCRNTEEPRNGFKVDSDILESGQVFGEDSKEAIDLWNN

SEQ ID NO: 178961 - protein, 232 aa, Oryza sativa
  Clone ID: PAT_MRT4530_76469C.1.pep
MQIFVKTLTGKTITLEVESSDTIDNVKAKIQDKEGIPPDQQRLIFAGKQLEDGRTLADYNIQKESTLHLVLRLRGGMQIFVKTLTGKTITLEVESSDTIDNVKAKIQDKEGIPPDQQRLIFAGKQLEDGRTLADYNIQKESTLHLVLRLRGGMQIFVKTLTGKTITLEVESSDTIDNVKAKIQDKEGIPPDQQRLIFAGKQLEDGRTLADYNIQKESTLHLVLRLRGGMQIF

SEQ ID NO: 178962 - protein, 208 aa, Oryza sativa
  Clone ID: PAT_MRT4530_7646C.1.pep
MTESETKQKTAAKTLNPSSALLSSDRRTFSGTPPRSHLLDPTPPPPPPPPPPTDATAAVVVVAAGAAFSGTGFVSVPAWSSPERSLAMVRADSFCGDPVGDSAASAAFGGVGGIAFSVSVSASARASVMFSAWIPGTPVLGEKAAVMVVEKAVLVDREREREGAPPAAVEFGCRGGGEETDRRWEEGAVPGPAKEWGERDRRSDLVTE

SEQ ID NO: 178963 - protein, 268 aa, Oryza sativa
  Clone ID: PAT_MRT4530_76470C.1.pep
GRVRRLIFAGKQLEDGRTLADYNRGNESTVGGVLRLKGGMQIFVKTLTGKTITLEGESSNTIDNVKGKIQDKEGIPPDQQRLIFAGKQLEDGRTLADYNIQKESTLHLVLRLRGGMQIFVKTLTGKTITLEVESSDTIDNVKAKIQDKEGIPPDQQRLIFAGKQLEDGRTLADYNIQKESTLHLVLRLRGGMQIFVKTLTGKTITLEVESSDTIDNVKAKIQDKEGIPPDQQRLIFAGKQLEDGRTLADYNIQKESTLHLVLRLRGGQ

SEQ ID NO: 178964 - protein, 147 aa, Oryza sativa
  unsure (1)..(147): unsure at all Xaa locations
  Clone ID: PAT_MRT4530_76471C.1.pep
SDNPEPNQMSNNIVLLXXLSPXXNXQFIYKFQIQNSSQFQSLQIQRVPILLGLLFQPAQLTPQHKYVFAPSPALPLSCSQVYSPSFLASASRLTRRPPRARQNAESGEAGAPGHRATVPCRAAPPCVRRTALLHRAAPHRAQCRAVH

SEQ ID NO: 178965 - protein, 65 aa, Oryza sativa
  Clone ID: PAT_MRT4530_76472C.1.pep
RPSQSLILVLGRSEQKELKHSDYCFRFQEKAILSTAKVSGATVEIMDTPYLHGMYSPTGYRRPHV

SEQ ID NO: 178966 - protein, 53 aa, Oryza sativa
  Clone ID: PAT_MRT4530_76473C.1.pep
TYTDICITINHSMMFTVVRFQFYVERSTFSSYWSQEGYNNSSICLDKWINSGT

SEQ ID NO: 178967 - protein, 48 aa, Oryza sativa
  Clone ID: PAT_MRT4530_76474C.1.pep
MGYMYTLHLSCGEFRSRGEGAGLRQMMALALTRYRMGAESGYVENETK

SEQ ID NO: 178968 - protein, 143 aa, Oryza sativa
  unsure (1)..(143): unsure at all Xaa locations
  Clone ID: PAT_MRT4530_76475C.1.pep
VFFFFXXXETYNXSTCLPKSSRCQPIXXIXAXXXIXIXXXVDXXXMXPPXVVFVTRCXXATYGIYLLYIVXGNLEDTWXSSHDADXKLEYQXTPVXQFXXCLLLSXWYXRWIVLXYMIXALRPTGPXPSVXRLXWSLSXRHXX

SEQ ID NO: 178969 - protein, 142 aa, Oryza sativa
  unsure (1)..(142): unsure at all Xaa locations
  Clone ID: PAT_MRT4530_76476C.1.pep
HVFAVPLRLRGSRTIASGLXNNSWISDIRGALNVPIISQFLLVXDAVLHIQLSPGVGDRLVXRWTSDQCYSVRSAYQALFYGQHSFACADLLWHAKGPPEAWHRFXQRCRTADLLHKRGIDSHSACPFCAQELNASVPASTP

SEQ ID NO: 178970 - protein, 64 aa, Oryza sativa
  unsure (1)..(64): unsure at all Xaa locations
  Clone ID: PAT_MRT4530_76477C.1.pep
HSLVYXVQGHARVQVVSNLGKTVFNGVLRPGQLLIIPXHYVVLKXKAEHEGCQYISFKTKSTQV

SEQ ID NO: 178971 - protein, 1100 aa, Oryza sativa
  unsure (1)..(1100): unsure at all Xaa locations
  Clone ID: PAT_MRT4530_76478C.1.pep
MPELRSSTRQARLRSRKPDDQKPAEQAAKPALPAPQRAGKRVPPPAIRGRKGAAGRRGGAAPRGRRKAVEVVDLEAGQGRGDSPKPVVGQAVVGEAKNVKAPEVVANKGLRMDGESAEKLVAADDESSLPVPERIQVGNSPEYITDRKLGKGGFGQVYVGRRVSGGTNRTGPDAYEVALKLEHRNSKGCNYGAPYEWQVYHNLNGCYGIPAVHYKGRQGDYYILVMDMLGPSLWDVWNSLGQTLSLDAPFLIYVCRFVHGEVKPENFLLGQPGSPDEKKLYLIDLGLASKWRESSGQHVDYDQRPDIFRGTIRYASVHAHLGRTGSRRDDLESLAYTLIFLIRGRLPWQGYQGDTKSFLVCKKKMATSPEMLSCFCPPPFKQFLEVVTNMKFDEEPNYAKLISLFDSLIEVPASRPIRIDGALKVGQKRGRNHEEDEQPKKKVRLGSPAAQWISVYNARRAMKQRYHYNVADNRLQQHIEKGNEDGLYISCVASSANLWALIMDAGTGFLSQVHELSPVFLHKDWIMDQWEKNFYITAIAGSANGSSLVVMSKGTPYSQQSYKVSESFPXFKWINKKWKEGFHVTSMATAGNRWGVVMSRNSGYSEQVVELDFLYPSEGIHRRWETGYRITSIAATNDQAAFILSIPKRKPVDETQETLRTSAFPSNHVKFAGRSVQLLREKLAGIVGYDEFMLCVRTGLHGRLTPLLINLPRSQETLHIVLIRTNTTGDDKLLSSTLTDEMQPMNSMGAAGSSTATGAAGSNHTADSTVPPSLLSSEHHRSTESDPSAEHERHDITKNNLSGGMRAVDAEASSSSAVDMASGKRAKGKGRINTEVDNDRMVLWTNLEKAEDDLWLREEQLSIERLILCQKALEMEESERVHRRIQSCLFRWNTYALSGNEDLLSPLIFAPMPRPDKTSTPQIFSTENTVVAPSPTAQNTSADVTDTGDKDVWNKRQIGYVYILGTSLAVLFFLRPLLPAGYGIWMLAAFATIWGFGSVGLPAGMFGEKFPKIFSRHMGHVLYAAFSVLVIYSIYLLALSTPTSPLAPPPPSSPLAPAVHDNELWFWRLVFGFIGSVVLFGHLYLWARSCCTGVDQDPDL

SEQ ID NO: 178972 - protein, 258 aa, Oryza sativa
  Clone ID: PAT_MRT4530_76479C.1.pep
MKGSDLPPGGSGQKPPGGPPGNRKGKRGAEAPPATSSSTPTTARRSKRLAGAPPDHPAEAGPSSTNARRSSRLAGAPPATPGAAAAAPTSSSPTAARRSNRLAGAPPDPPAAVAAPPTSSSPTTAMRSNRLAGAPSDPPAAATAGPTSPSPTTARRSNRLAGAPPDPPAAATAGPTSKTARRSKRLAGEAPETPVEAGQTSPSSTTARQSKRSAAEALEEEELGIFEKVQEVEVSKEFGWWVIFCSRGSRKFREEFDV

SEQ ID NO: 178973 - protein, 156 aa, Oryza sativa
  unsure (1)..(156): unsure at all Xaa locations
  Clone ID: PAT_MRT4530_7647C.1.pep
GGGGGRSAARRQRRRRGRRRRGGGGIMMLQRIGARMATAYLAMVVAALIEARWLRVARDAGLVDRPDVATACLTMVVAALVEARRLRAARDAAAAPHRRSSPSPHPAATRLLRRTPPPXRRLIPRRSPPPPPPLPVARLPPCALSLARAPPPLIPL

SEQ ID NO: 178974 - protein, 52 aa, Oryza sativa
  Clone ID: PAT_MRT4530_76480C.1.pep
MTMMTAAQQLRATTTAVDLTRLRWRLRLDDDQTNWHALNPIDRIYTGAKKIS

SEQ ID NO: 178975 - protein, 143 aa, Oryza sativa
  unsure (1)..(143): unsure at all Xaa locations
  Clone ID: PAT_MRT4530_76481C.1.pep
PGCRNSARGATKTQTRRRGRSTARXRGEGYGDGDDTALFSGRHLLSNEHASLPPLPSSFXTSALAWGLGLGGFGFGSALSLFGSGGGIAGTREGSWTPERRGEEEKEEERVLGSWPVAFKVSAPSTSESESCSCSCRFHEIDW

SEQ ID NO: 178976 - protein, 43 aa, Oryza sativa
  unsure (1)..(43): unsure at all Xaa locations
  Clone ID: PAT_MRT4530_76482C.1.pep
RLLGXPYRRPIVFLHXFAVFSLVRLCSLAPAXFLVPESLSQLA

SEQ ID NO: 178977 - protein, 489 aa, Oryza sativa
  Clone ID: PAT_MRT4530_76483C.1.pep
MGGLGFRDLRLFNQALLSRQAWRLIQYHDSLCARILKAKYYPNCELIDAVFPADVSPTWKAVEHGLELLKKGLIWRIGDGRKVRIWKDQWIPRQSSLKLSPQNGRCRLRWVHQLINQDTNSWDADLIKNVCSPLDVNEILKIKLPHRGMEDFLAWHFEKTGVFTVRSAYHLALHNQLKANELGSSSSSTSGERKIWASLWTAPVPQKVKIFAWRLARECLATMENRKKRKLEIDSTCRICGLGGEDGFHAVISCTKAAALRSLIREVWELPDERFLIRSGPDWLLIILDSINAESRAKFLLLLWRAWFLRNDSVHCSGKASVLGSLLFLQSLWESLFMSTSQGKSSEPASAGFVIRDHTGSVLLTSWRIISHCGSAEEAEATACWEGVNLAAEWVKKPLILETDCANLVSMLTSSGFDRAQLCHVLRSIKLLLQALPDFRVQRIRRECNRVAHDLAKFAMRTNHSAVWRMQAPSCVFGALANDSNHIDE

SEQ ID NO: 178978 - protein, 189 aa, Oryza sativa
  Clone ID: PAT_MRT4530_76484C.1.pep
MDGPPSLNDGSELSNVTLEDVSPRLEHLGHHLQHPPTPITPSCRPEDEVVSHGYPNLELRLLSLQALTLKESLRYTSDRLDLTSLAHRLLNHPPCHLDSSPAWRESRLYSQSSVPLIRGKLLCTARGLAGLQPLVQPRPPHGLRPCRLLVLDRRRPWPSSPLPLYRGLRVCPVLKFRVLPIPELAKPDY

SEQ ID NO: 178979 - protein, 407 aa, Oryza sativa
  Clone ID: PAT_MRT4530_76485C.1.pep
MASVNSPAAAAWVGEERRMGAGGVVVVDAVDGVGRAGPAGEWASAGWRPTTARAEGSTGDEPIIMAGPVPFVDVVVDNAGGAVANKADPGVVLPQEEEYESFVSSLPSNPKLQLLRYQGKWLLQSWVPGIIAIQRGGFAPRRGGGDVVLASLPKCGTTWLKALAFATMARRAHPPAGDEQHPLLRLNPHDCVPSMEKLFAAGLGSKIMDALPSPRLMATHVHHSLLPASITDNPHCKIIYICRDPKDMIVSLWHFVRRRLPEIPFLELFESACEGRCLSSPIWDHILGYWNASKTRPETVLFLRYEELLHDPADSVRKLARFVGQPFSPEEEEASDVEDIVRLCSFEQMKNLEVNRAAGLSPALQQNAYTNGLGGAGDWTNHMTPEMARRLDAIMNEKLHGTGISFS

SEQ ID NO: 178980 - protein, 577 aa, Oryza sativa
  Clone ID: PAT_MRT4530_76486C.1.pep
MATTPASLAAAAAAATAAPEPRGIRPPRAPVHRLRLRHHATRVGCSTVSVSTRPATTTTTTTTRSQPPPPQPPQAAEPLQRRWGPTERRKGADILVEALGRCGVRDVFGYPGGASMEIHQALTRSPAIRNHLLRHEQGEAFAAVRETPIVELTRSITKHNYLVLDVDDIPRVINEAFFLATTGRPGPVLVDIPKDIQQQMPVPSWDAPMRLPGYISRLPKPPSAKLLDELTGIPVTTTLMGIGNFPSDDPLSLRMLGMHGTVYANYAVDNADLLLALGVRFDDRVTGKVEAFASRAKIVHVDIDPSELGKNKQPHVSICADVKLALQGMNATLEQQQRKNLDFSAWRSELEKKKAEFPLGYRTFGEEIPPQYAIQVLDEVTNGEAIVATGVGQHQMWATQHYTFRRPRQWLSSAGLGAMGFGLPAAAGAAVANPGATVVDIDGDGSLLMNIQELAMVRVEDLPVKVMVLNNQHLGMVVQWEDRFYDANRAHTYLGNPAANGGGEVYPDFVAIAGGFGIPAARVTRKGEVRAAVEEMMAAPGPYLLDVVVPHQEHVQPMIPSNGAFKDIIVDGGGRRT

SEQ ID NO: 178981 - protein, 77 aa, Oryza sativa
  Clone ID: PAT_MRT4530_76487C.1.pep
MSTHRSRHTGQLERLASATTTLCNREPPRTVAVVAQEATGSQAGGSNAALADGDHLIRRQALEPKGGLTNSRSPVED

SEQ ID NO: 178982 - protein, 263 aa, Oryza sativa
  Clone ID: PAT_MRT4530_76488C.1.pep
MARRGHVFAVVAFVSYALLAAASTTVEAFAASGWSKGTATFYGGSDASGTMGGACGYGNLYTQGYGTRTAALSTALFDDGASCGQCYALTCDARADPRWCRAGASVTVTATNFCPPNYALPSDDGGWCNPPRPHFDMAQPAWERIGVYRGGIVPVAFRRVPCRRRGGVRFTVAGRDYFELVLVTNVAAAGSVRSMEVRGSRRGAGWMAMSRNWGANWQSLAYLDGQGLSFRVTATDGQTIVFAGVVPPSWRFGQTFASTQQFM

SEQ ID NO: 178983 - protein, 214 aa, Oryza sativa
  Clone ID: PAT_MRT4530_76489C.1.pep
MAGEADGKAPLGSRYPPAALNERILSSMSQKHVAAHPWHDLEIGPGAPAVFNCVVEIPRGSKVKYELDKATGLIKVDRVLYSSVVYPHNYGFIPRTLCEDGDPMDVLVLMQEQVVPGCFLRARAIGLMPMIDQGEKDDKIIAVCADDPEYRHFRDIKEIPPHRLQEIRRFFEDYKKNENKEVAVNEFLPAEDAINAIKYSMDLYGAYIIESLRK

SEQ ID NO: 178984 - protein, 213 aa, Oryza sativa
  Clone ID: PAT_MRT4530_7648C.1.pep
MSLTNAPSSMVSIVTPVTDRDSGRTVAGVPPVLVGASVSSAPELRGRAYLVHHVFYEDGSASADGGGGVAPASRASIAALREVEEEDDDGEEASDCAICLDDGEESRETCGSGRRKEMPCGHRFHGECVERWLGIHGSCPLCRHEMPPATAAEAEEEEVVVAMVHGERVVMRGRRVVLSVLVMGRAHDDGEGPEQRGTDPIPPLPRVLIDDVD

SEQ ID NO: 178985 - protein, 311 aa, Oryza sativa
  Clone ID: PAT_MRT4530_76490C.1.pep
MAVFYRYRSRVDTFSVPVPEPFVSVGELKRLITATARHGHGRSRGRGPGTASRCAATRLARTQVGGPDVTRRPASGESDGVIPAELYCKICRNVMADAVVTSKCCFDSFCDGCIRDHIASKSKCACGAQARADDLIPNTTLRTTIANLLATTTGAAASASSGTDKTRSSAGSNAAHPAAPLSPAASQASRSSNVSSEKAEHSDGGASTSKKIATISGALGPRKAQETVAGDHSAESGARAVHGGDHYGVPFCPATGYVDPFFFGGMPFGADPYMYYGGVPYGCGGAPNGYYGGEELRDRKRARVSPGTGCW

SEQ ID NO: 178986 - protein, 245 aa, Oryza sativa
  Clone ID: PAT_MRT4530_76491C.1.pep
MAGLKLSSCVLVALLFVSSHVVRHGEARRLTAGVAAPASKGGEEEAPQYASARGGQPAAAAGGGVTAASKMASTDGRPTSPGHSPGIGNKATGNGGGHSFPRDWMEEAALQCHVALSRGGSGPRCPPTRIYGDPSGRTTPHLMRCAVHSTGGAFVIFEVLSSAGVISAAPPMRCKAQPPQECRATPGRGLGPRHPHRIHTTIIEETGGDDRVMANFFPMALRGQARGWLMNLLPASVHSWEDPCS

SEQ ID NO: 178987 - protein, 60 aa, Oryza sativa
  Clone ID: PAT_MRT4530_76492C.1.pep
MVGGSRLFLLLLLPLLLLLLGAGCRDGRRCAAAAAQTQRLPQQEELITVVSMRLSVFSLS

SEQ ID NO: 178988 - protein, 144 aa, Oryza sativa
  unsure (1)..(144): unsure at all Xaa locations
  Clone ID: PAT_MRT4530_76493C.1.pep
ILRHLARQVGGAFVIFEVLSSAGVISAAPPMRCKAQPPQECRATPGRGLXPPTSPPGKASGQFFVASLRNVRWPSKFRPSLTEKYDDSVKXSESLQIHTTIIEETGGDDRVMANFFPMALRGQARGWLMNLLPASVHSWEDPCS

SEQ ID NO: 178989 - protein, 65 aa, Oryza sativa
  Clone ID: PAT_MRT4530_76494C.1.pep
PQPEKTVDCYELRRRGPASQGFKDPTNKNIVKCDEKLKTVLLGRSKVQLSELPMIVKLHFPKLPK

SEQ ID NO: 178990 - protein, 72 aa, Oryza sativa
  unsure (1)..(72): unsure at all Xaa locations
  Clone ID: PAT_MRT4530_76495C.1.pep
SNASVAMRAHIFAEQTITCKQDPKIYGNKLFAEQTITCKQDPKIYGNKQKSTSCIHGKYFSXKKKKKKKKXX

SEQ ID NO: 178991 - protein, 382 aa, Oryza sativa
  Clone ID: PAT_MRT4530_76496C.1.pep
MEATVEGRKVVGRAEASPERGRPAYAPPVRSAPARPMRKVQIIYYLCRNGQLEHPHFMELAQHPHQPLRLKDVMDRLTLLRGKGMPALFSWSCKRNYKNGYVWNDLSENDVIYPSDGVEYVLKGSEIFPGCSSDRFPHLRVTDRSPAKRLALPPSHKQYVDSYRDDAAEDPEDDELGYGYHRRAGGARLAAKPVSARTNRSRPVELPVEETSPPSSTSSDKPPAAPQLQPGGGRGSDETESNRAGSMLLQLIACGSAAGGGSAKCRTEPRRSCGLVSRLAAASRAGTEVDDDEEAGGGGELSRRFGHLAVEEKEYFSGSIVESGVRGTPLPSSSLKRSNSYNEERSSRLGVSEERSTTDEQMEGEEGMIRGRCIPGRKKQHK

SEQ ID NO: 178992 - protein, 415 aa, Oryza sativa
  unsure (1)..(415): unsure at all Xaa locations
  Clone ID: PAT_MRT4530_76497C.1.pep
MKVIPYVFEQLLELKINFHKSEIFCFGEAKEVEDQYRQLFCCNSRSFPFKYLGFPIHYRKLRNVDWKGVKDRFERKLSTXKGKNISYGGRLVLLNSVISSLSLFMLSFFEIPLGVFXKIIFLYVTFFWSNDDRKXKYRLTKWENICRPKHQGGLCVHNIDIKISYLLSNWIFXLLNGEGVWQDLLQNKDLNGKSFSGMSSKIGISXFWAGLMKVKDQFLRFGSFRXCNGTDIRLWEDTWLESRALEVQYPTLYNVARKKQSTVAEVMGTMSQDISFRRAIVGXKSNRXNDLIPRLSNITLSNEKDCFVWSLHKNGQFSVNSMYTTIMNSNVRIQKRILWDFKVPLKIKVFMWFFHKKIILSKDNLTKRKFVXEGDKHYSFCYAXKTIQHLFFECHEEHDTRRNDATLLESVAKGL

SEQ ID NO: 178993 - protein, 959 aa, Oryza sativa
  Clone ID: PAT_MRT4530_76498C.1.pep
MERTLLNPPPSLRSPACRTTTATRIRPSSSMATMIPTPPPMRHARLVKASAAGRRELHAPPIAPPILLGLRSPAAASYGRASGGGGRRRGARVVARMGFDMFTDKAIKAIMMAQEEARRLGHHAAGSEQLLLGVIGEGTGIGAKVLRGAGLSLKAVGAEVEKMAGRGPGMVPMEIKFTPAAKNVLQASQEEAHQLGHNYVGSEHLLLGLLREHGAALVVLKNFQADPSNIRSEVIRMISDTSEDHQPVSAAVGGGSSTTKIPTLLEYGTNLTKLAEEGKLDPVVGRQNQVDRVVQILGRRTKNNPCLIGEPGVGKTAIAEGLAQRIAAGNVPETIDGKTNLQFEHYEIAKSYLSRLPERKHGNPFQVITLDMGLLVAGTKYRGEFEERLKKLMDEVKQNGEIILFLDEVHTLVGAGAAEGAIDAANILKPALARGELQCIGATTIDEYRKHIEKDPALERRFQPVKVPEPTVDETIGILKGLRERYEIHHKVQYTDESLIAAARLSYQYISDRFLPDKAIDLVDEAGSLVRLRNAQLPDEAKELEKKLKKIMAEKSEAIRSQDFEKAGALRGEEVELKSEIMSLVDKSKEMSKAAVDSGESPGPTVTEADVQHIVSSWTGVPVEKVTVDESSRLLAMESSLHRRIVGQDEAVTAISRAIRRARVGLRDPRRPIASFIFAGPTGVGKSELAKALAAYYYGSPEAMVRLDMSEFMEKHTVAKLVGSPPGYVGYAEGGQLTEAIRRRPYAVVLFDKVEKAHPDVFNMMLQILDDGRLTDSKGRTVDFKNSLIIMTSNVGSGVIEKGGRQLGFAGDGSGDGGYGVIKNMVEEEMKRYFRPEFLNRLDEMIVFRQLTKLEVKEIAGIMLAEVTGRIGGKGIGLQVTERFKELVVEQGFDPSYGARPLRRAIMRLLEDTLTDKMLAGEICAGDSVIVDADGDGNVVVVGRRSAGLPDLKSPAFTV

SEQ ID NO: 178994 - protein, 150 aa, Oryza sativa
  unsure (1)..(150): unsure at all Xaa locations
  Clone ID: PAT_MRT4530_76499C.1.pep
RPVPTRGNGSERRLEARRRAAEHGVTRGARERARGARVNGGNERGECGEEFYSAQGRRGGRAXMDLGRQPLATWATLWAKWSSILARFLGETSGECRXPISLGLGARXERERPESGATWAATAGHGGLCSGXPKVEEGPDRWGRRAHLSG

SEQ ID NO: 178995 - protein, 208 aa, Oryza sativa; identical to SEQ ID NO: 178962
  Clone ID: PAT_MRT4530_7649C.1.pep

SEQ ID NO: 178996 - protein, 134 aa, Oryza sativa
  Clone ID: PAT_MRT4530_764C.1.pep
YLFNRDLELCPPFSKLKTLVLKSWFVPPDLSALTWFLQHAPLLEKLTLNLSKVPNNLGVMDDSYNPWEQSFAASHLQKVEIECKNVDGIVLKILKILNANGVPLENISIQCSDCELSINTHASYYSVTKPVSTI

SEQ ID NO: 178997 - protein, 103 aa, Oryza sativa
  Clone ID: PAT_MRT4530_76500C.1.pep
MPPSVIVDTTSAHRVVTGSPSHRSPCQRLWCADSCRIQHGGAESNNACKIQAPRHRIRGLRHRHRRTITIPAAIKAPAAAETRPAPSRPPRLYRCRRLSRHRC

SEQ ID NO: 178998 - protein, 137 aa, Oryza sativa
  Clone ID: PAT_MRT4530_76501C.1.pep
MEETGAAEANVMESPPSPTTAMANSGSCVVDMDRMVSHDNGSEPSSGEKSMVRPQWESRHSIYRVPEYMKDMTNQDAYRPRMVSLGPFHHDDSSLLHMEVHKQRAVAQVVSRSGKPREEFTAAVEEIAEQLRAAYED

SEQ ID NO: 178999 - protein, 68 aa, Oryza sativa
  Clone ID: PAT_MRT4530_76502C.1.pep
RWLNRSLLCLNRHPLRCRRSRDLGAATRRRAARRVAAVPRRRRRWVSSDAPLPFSTARRAVPARAVGP

SEQ ID NO: 179000 - protein, 37 aa, Oryza sativa
  Clone ID: PAT_MRT4530_76503C.1.pep
KTGNHTYPLQIFLTNNHSNFKSSIQNLKSPMSHFYKP

SEQ ID NO: 179001 - protein, 334 aa, Oryza sativa
  Clone ID: PAT_MRT4530_76504C.1.pep
MEKNPLQASNPRSNLGCICVNLGSVIFLQVLGFVASNILLILMGDPSHDRDAAGSSMIREILGILLPKQALHLKATLRASGSKFSTASLYFNDFCGIYIFLQELKLSDDNFIASMAVPMAEKIEKYWETCNKLLSIATILDPRYKLKSIEYFYGLLYPSEKDVKFEHMRRCFSELFDEYSKQATMQSSSVVDTSRNFQECSSQSHESSLSLFSTIVGLEKYIQDSNSSQQTTSELNVYLDDPPHPGISDTSFDILAWWKLYGSKYPIISRMARDILSVPMSTVASESCFSLANQALDEKRCSLLPETLEDEFLEQMIAEDVSFTQEQAVVDQLE

SEQ ID NO: 179002 - protein, 37 aa, Oryza sativa
  Clone ID: PAT_MRT4530_76505C.1.pep
SVADGAVDITWLASFIFSISKEDHHSNKCKECPSRSH

SEQ ID NO: 179003 - protein, 163 aa, Oryza sativa
  unsure (1)..(163): unsure at all Xaa locations
  Clone ID: PAT_MRT4530_76506C.1.pep
RKGFFKGEIFXXFPXXGKIRAKNWFQKAQPNXPXCLXXFXXGPPFVLFXNPKXLXPIKGLGSWXWGFKXXFXRXQGLXFPPXXGRKXSXPXPVLXTNLGAXXXNFXFWXLEXKXXENPXXXQPGPLWKLXSLTNPXTAWLKXFWNGFPQKWXGTKGRWPFSSG

SEQ ID NO: 179004 - protein, 110 aa, Oryza sativa
  Clone ID: PAT_MRT4530_76507C.1.pep
GGGKAPGGGPGAPGGPVDEQPRQESSRQLPPGTTKWGRGPAPTPRGGGTHRGPGPPHVGPPRAQVFPAPRKGDLERPAASLPGFCNGGTPNGPGGVCPRVGYPRAPRTGP

SEQ ID NO: 179005 - protein, 62 aa, Oryza sativa
  Clone ID: PAT_MRT4530_76508C.1.pep
WICARGGRICAAAAICTCRRSPCLPPQCHLPRPLPPTRARHQLRARESGGGHRRRPHLLLRE

SEQ ID NO: 179006 - protein, 220 aa, Oryza sativa
  Clone ID: PAT_MRT4530_76509C.1.pep
MSMQEMLRIGDDDGRSDALERELKEKLRLRGDASPAKCTRQEQRWRSDHGIVDARERFVQAYGRLRDDLVGDDSCELTDEARRWLAQMIDYNVPGGKLNRGLSVIDSYLLLKQGSEVTEDDFFLACVLGWCVEWFQACALLLDDIMDDSHTRRDQICWYRRPEVGLRGINDGIILKCHILIMIKKYFREKPYFLDILEIWSEIALQTSLGQMLDLYSTHT

SEQ ID NO: 179007 - protein, 95 aa, Oryza sativa
  Clone ID: PAT_MRT4530_7650C.1.pep
MSANSVPVYHLDVDKTMCSFVPVEGAMSLAGNRDGSELRDDGQALRRRPTSSETKTKTDDADKQTEWHEMKNFACLVKGVLVSLSVSPEPIGMDP

SEQ ID NO: 179008 - protein, 243 aa, Oryza sativa
  Clone ID: PAT_MRT4530_76510C.1.pep
MASMLRSASVPSSPCSNEANVEEQLQSLRATISSPSATVETMLDGFSRIGGEYRNIEEIMCFPSSQVLLWQPQQRKAAEQELERSLVLLDLCNAMQESICELKASIQDMQLAIKRADDAAVQAKVQSFIRLSKKAQKQSKKISKKSASDDQEGCRVLKLSAEAREVAISMVESSLHLLLKQIVMPNSSRWSLVSKAFQKARIACQEEQLQALELDISDLESGVETLFRRLIQSRVSLLNALSL

SEQ ID NO: 179009 - protein, 535 aa, Oryza sativa
  Clone ID: PAT_MRT4530_76511C.1.pep
MIVGAGYFEDSHDQSLMAGSLIHDSNQAPASSENTSIDLQKFKVHPYSTEALSNTANLAEAARAINHLQHQLEIDLEQEVPPVETANWDPAICTIPDHIINHQFSEDPQNILVEQQIQQYDSALYPNGVYTPAPDLLNLMQCTMAPAFPATTSVFGDTTLNGTNYLDLNGELTGVAAVPDSGSGLMFASDSALQLGYHGTQSHLIKDICHSLPQNYGLFPSEDERDVIIGVGSGDLFQEIDDRQFDSVLECRRGKGEFGKGKGKANFATERERREQLNVKFRTLRMLFPNPTKFISMMFFTDNSAMLLRVVLVLSQIMPYQIVGILKSYLAKFGLPPKLVKFWHYQYIDMVTNQNTPNCVHPNQNDRASIVGDAIEYIDELNRTVKELKILVEQKRHGNNRRKVLKLDQEAAADGESSSMRPVRDDQDNQLHGAIRSSWVQRRSKECHVDVRIVDDEVNIKLTEKKKANSLLHAAKVLDEFQLELIHVVGGIIGDHHIFMFNTKVSEGSAVYACAVAKKLLQAVDVQHQALDIFN

SEQ ID NO: 179010 - protein, 265 aa, Oryza sativa
  Clone ID: PAT_MRT4530_76512C.1.pep
METLMAAELPQQKAGGGLARRLVRLLRRKRSTSGSVAGGGEYDESSMDSSINSLSKLKLSAAKLDVLFRSAAQPAASPAVDAAAAHALVASLFAGVSAVKAAYAQLQQAQHPYDSEAIQSADAAMVAELTKLSDHKRRFARDPAAAAKSAAAGPAALAAHADEQRHLLRTYEITAGKLGRELRARDAEAERARAALADDLRAARALEERAHPGRTLAALDGLHLSGLNATHFLAALRHAARSVRSFAKSMLGEMRRAGWDPVAPP

SEQ ID NO: 179011 - protein, 271 aa, Oryza sativa
  Clone ID: PAT_MRT4530_76513C.1.pep
MSPPLEPHDYIGLSAAAASPTPSSSSCSSSPNPGGEARGPRLTLRLGLPGSESPEREVVAAGLTLGPLPPTTTKAASKRAFPDSSPRHGASSGSVAAAAACQDKAAPAAAPPAAKAQVVGWPPVRNYRKNTLAASASKGKGEDKGTAEGGPLYVKVSMDGAPYLRKVDLKMYSSYEDLSMALEKMFSCFITGQSGLRKSSNRDRLTNGSKADALQDQEYVLTYEDKDADWMLVGDLPWDLFTTICRKLKIMRGSDAAGIAPRSIEQSGQSR

SEQ ID NO: 179012 - protein, 51 aa, Oryza sativa
  Clone ID: PAT_MRT4530_76514C.1.pep
MIGCREWLQNRHESTPFSLIKNPMGGRAGCGTKMTVILLAWTMDTHTRTMT

SEQ ID NO: 179013 - protein, 164 aa, Oryza sativa
  unsure (1)..(164): unsure at all Xaa locations
  Clone ID: PAT_MRT4530_76515C.1.pep
PFALSPPPSLPTATVATAPRPPPXPHPQLLPLPFATSPPPPLPTIIAIAAPHLRSPPPLPTPXPPPLPSTSSPPPPLPIAAXSPPPQPPPLPXPLPRPHRHHCRSPPPLPPPLSSTSSPPPQPLAPWPWRRCSRPPSSCPPPPPGWRPLHPRTATAPLGAPWPG

SEQ ID NO: 179014 - protein, 78 aa, Oryza sativa
  Clone ID: PAT_MRT4530_76516C.1.pep
MRTLGKTSTADGLREEELADGGHPWRTSAAGCARRQPDTRVYVLAGRRSAGRTSSADGTSELLPARWTNDSACTDQLT

SEQ ID NO: 179015 - protein, 104 aa, Oryza sativa
  Clone ID: PAT_MRT4530_76517C.1.pep
MRWEIDRAINRIPLLRFLPPQWQLRLRLSSTSGFPQSPFDPLTLASPRLGESDSEHSQPDRSEFHGLNHSSTSGFPQNPFDSLNLASANRIPSTHNRIGASSMA

SEQ ID NO: 179016 - protein, 132 aa, Oryza sativa
  Clone ID: PAT_MRT4530_76518C.1.pep
CNGGCFFFSFGTKKENKGFRRRGAQKKGCLKGFLNTNERTIFFFLQKKGRGGPPTTPEVEVVSLIKVAVFTAGAEKGATAIKRRKTWQGGPNTEISAPSGKVTYLCIGATILRGLWNKQEVRQEILSHFEFL

SEQ ID NO: 179017 - protein, 646 aa, Oryza sativa
  unsure (1)..(646): unsure at all Xaa locations
  Clone ID: PAT_MRT4530_76519C.1.pep
KSIVILCVKNPKTQDRIKGLLFLTTSVIFLSFLVSTDGLEPDPCKAVSITNWPAPRVLTEARSFHQLAXFYQRFIRNFSIIVIPFTDCMRHAHEAFEEINTIIASAGYLALPDFDKXFELDCDAYRIGIGAVLSQGSHPVAFFNENLTGAQLRYSTYETELYAVVXSLEIXMHYLLHQEFILYGDHEALXNIQSQPTFSQKHARWANFLEEYSFDLKYKPEVRNKEAGAXLSRRTHCLSMTXEKVIEFKFLLELYPNDAYFGVIYHSMQAKRSAQYTVHDGILFRESQLYILDCFVREPTIKDIHNXGQHGRDKSIELLLRQYFWLHVRKYIERFVQQSYICKVSKGASTNAGLYMPLLIPDGLCTYLSMYFVLGLLRTQHHVDSIFTVVDRFSKKAXFIAYGKTSDAXSISHLFFCEVVCLHGIQRDTKFMSXFXRSLWRQMGTSLNFKXAYHAQTNGKIDMLWAYQVVNRSLGNMLRALVGDKTKRXDTILSYVEFAFNHTPNRSRFSPFEVVCGXVPNVVLELTHLPSLGEKNQHVDVLVGELGMIHKLDQQLPSDDMXKYKVATDKPRHRVVFEAGDYVWVVLTKNHFPTGQYNKLSHQKIEPCKLQKKINDNAKYRLQPQRHLQTSDVFNVKHLIPYNGDP

SEQ ID NO: 179018 - protein, 46 aa, Oryza sativa
  Clone ID: PAT_MRT4530_7651C.1.pep
TLIYPAMVELSRTCGDVDLLLGGRYVCSGRGHLITDILRYNQVKVT

SEQ ID NO: 179019 - protein, 667 aa, Oryza sativa
  Clone ID: PAT_MRT4530_76520C.1.pep
MEMQHVVEVEQGRAAADGRPSVGPAYRSAFARGGFPPPVAGLDCCYDIFRMAVEKFPDNRMLGHREIVDGKAGAYVWKTYKEVFDLSTKIGNSIRSRGLAKGSRCGIYGANCPEWIITMEACNAHGIYCVPLYDTLGAGAVEFILCHAEVEIAFTEEKKIEQIFKTFPKSAEFLKTIVSFGKVTQEQKENASKYGLEIYSWDEFLSLADQEFDLPVKAKTDICTIMYTSGTTGDPKGVLISNASIICLVAGVDRLLNCVNEQLEQTDVYMSYLPLAHIFDRVVEELFMFHGASIGFWRGDVKLLVEDIGTLKPTILCAVPRVLDRIFSGLQAKIASGGFIKSTLFNLAYKLIEYDLGIIFCSKQFRMMKGAKHNEAAAICDKVVFSKVKEGLGGNVRVILSGAAPLATHVEEYLRVVTCAHVLQGYGLTETCAGSFVSLPNQMCMIGTVGPPVPNIDVCLESVPEMNYDALATRPRGEICIRGETVFSGYYKREDLTKDVLIDGWFHTGDIGEWQPDGSMKIIDRKKNIFKLSQGEYVAVENLENIYGLVSAIDSIWVYGNSFESFLVAVVNPNKEALESWAAANGISGDLEALCENPKAKEYILGELSKVGKEKKLKGFEFIKAVHLEPVPFDMDRDLITPTYKKKRPQLLKYYQGTIDNMYRSAK

SEQ ID NO: 179020 - protein, 425 aa, Oryza sativa
  unsure (1)..(425): unsure at all Xaa locations
  Clone ID: PAT_MRT4530_76523C.1.pep
LQQGDLVILHSRSIAQKYGITLLSGPNLYKSLVSLLSRKPRISPAALGQTEKGGSHDLPLERITSRXLARQVGXAFVIFEVLSSAGVISFVPPMRGKVQPPQKCRTTPGRGLGPPYLHRVRLAARSLLRVFGMSDDPQSSAQPHRKVXSSVNPSESLQIHTTIIEATWGDDRVKANFFPMALQGQAQGSLMNLPPALWLALVLPAGYGARPGSTNRPFKLQRLALVPPAGYGAXLAQLWTGIAGSRVFRLSHSCESSRPCKRERYWKEATERKEQTKCVTWGHRLVGTSWXSVVVGFGPAGWLQRPAWLATPRMIGQNIGPTCQLTSRVASTMTTWERFWSGLTPGATVGDMGARACSVLNRSVSGRMTDGTRXAPVRCSCVRRRAAXHVPSNNDGESACVPNKMIGVRFHSRSRSLVDCLWYVN

SEQ ID NO: 179021 - protein, 72 aa, Oryza sativa
  unsure (1)..(72): unsure at all Xaa locations
  Clone ID: PAT_MRT4530_76524C.1.pep
DSAVAAARRRRSSARLARXRAXXILRLEDEGLGEGLLXSPADKSGCVVWVLHCLFYRQRLASSSMQTPSASS

SEQ ID NO: 179022 - protein, 518 aa, Oryza sativa
  unsure (1)..(518): unsure at all Xaa locations
  Clone ID: PAT_MRT4530_76525C.1.pep
MAVTRLAVAAALSAAPPSSRRRRAFFHHSCRPLPSSAVAAKALRASAAPAVDEEAPASPPPSDLGKGVENLVIIGSGPAGYTAAIYAARANLKPVVFEGYQVGGVPGGQLMTTTEVENFPGFPDGVTGPDLMDKMRKQAERWGAELHQEDVEFVNVKSRPFVIRSSDREVKCHSVIIATGAAAKRLRLPREDEFWSRGISACAICDGASPLFKGQVLAVVGGGDTATEEAIYLTKYARHVHLLVRKDQLRASKAMQDRDXNRVLNNPNITVHFNTEAVDVVSNPKGQMSGIQLKRTDTGEESVLEVKGLFYGIGHTPNSQLLQGQIDLDDAGYILVEEGTAKTSVDGVFAAGDVQDHEWRQAVTAAGSGCVAALSVERYLVANDLLVEFHQPVREEKEKEITDRDVEMGFDISHTKHRGQYALRKVYHESPRLVCVLYTSPTCGPCRTLKPILSKVIDEYNEHVHFVEIDIEEDPEIAEAAGIMGTPCVQFFKNKEMLRTVSGVKMKKEYREFIESNK

SEQ ID NO: 179023 - protein, 86 aa, Oryza sativa
  Clone ID: PAT_MRT4530_76526C.1.pep
MAALPDVRRQAASCGCAISAPGGPASIGRGLRGIGDGGGLAARSFSSGQINGALAAGPPWRADTATTGKIRDVAIEEKAYHQQPIV

SEQ ID NO: 179024 - protein, 56 aa, Oryza sativa
  Clone ID: PAT_MRT4530_76527C.1.pep
KDQPIMVTTTFGGGNGEDLLIPPYAGTRQFLTKAICSDNMVAQLTNIIHTKITRTL

SEQ ID NO: 179025 - protein, 90 aa, Oryza sativa
  Clone ID: PAT_MRT4530_76528C.1.pep
PKGDALDPLGLGRFSPRRMLLAPVAPPGRFPPSPPLEKPQPPGLVFPPCPRTLVPFSPCSPMFPGIFFLIPVAFQLWNCSPDFQLWKLFN

SEQ ID NO: 179026 - protein, 57 aa, Oryza sativa
  Clone ID: PAT_MRT4530_76529C.1.pep
RRGRPGRRLAPLMLLLLPLAIYWCAPCSVTTGHRRNHGAWYNLSKKRGDDRTISNSQ

SEQ ID NO: 179027 - protein, 201 aa, Oryza sativa
  Clone ID: PAT_MRT4530_7652C.1.pep
YGRKCRTPLIWTETRERSIFGTDLLKEAEEKVRLIRNRLKVAQSRQKSYEDSRRRELTFDIGDYVYLKVSPLRGIKRFKVKGKIAPRYIGPYQIIAKHGEVAYQLALPDYLSDVHPTFHVSQLKKCLRISEEEISVSTVELNQDLTYPEYPIRILEEAQRTTRTKAIRMFKVQWNHHTEDEATWEQEDYLQFEFPYLFEDS

SEQ ID NO: 179028 - protein, 148 aa, Oryza sativa
  Clone ID: PAT_MRT4530_76530C.1.pep
NVMDMNTVYGGFAASLIKDPVWVMNVVSSYGPNSLGVVFDRGLIGTNHDWCEAFSTYPRTYDLLHLDGLFTAESHRCEMKFVLLEMDRILRPTGYAIIRENAYFLDSVATIAKGMRWNCDKHDTEHKADKEKVLICQKKLWSGKNTQH

SEQ ID NO: 179029 - protein, 61 aa, Oryza sativa
  Clone ID: PAT_MRT4530_76531C.1.pep
DVQHRQSCRPSEPKLAVSGLAVSGGRLYTDFQLRGLLFCLYLSCKGGHLGNAAAYFNIAII

SEQ ID NO: 179030 - protein, 166 aa, Oryza sativa
  Clone ID: PAT_MRT4530_76532C.1.pep
IGRQADLRVAAAAAAAAIRPTAALLLLFPPHRRTTSLRRSSLPFARPRRHSTTTTTGESHPEPNESNAARRRRARDSPEGLLKAKLDMCSRDNDLPTGLALYEAAISPDSLIPLCLGHYNWLLYLCANAARADSSSPGAAQRGFNIFSRMEADGGQPNEGALTILG

SEQ ID NO: 179031 - protein, 115 aa, Oryza sativa
  Clone ID: PAT_MRT4530_76533C.1.pep
EICMAVRYINVLYDEEKIPLKALDLDESKIFYQSKAKGDYHVLLTDIKMEISPTGNVRKNRRAKGKVSSTGVPTVDDVKTANWNGLGQFLKKLHKDLKLHIELSHLSEELGKESV

SEQ ID NO: 179032 - protein, 905 aa, Oryza sativa
  unsure (1)..(905): unsure at all Xaa locations
  Clone ID: PAT_MRT4530_76534C.1.pep
MRLHYHHLAVVLLAAVAAAATAAAGGETDALLAVKAALDDPTGALASWTTNTTSSPCAWSGVACNARGAVHLARLDLAANALSGPIPAALSRLAPFLTHLNLSNNGLNGTFPPQLSRLRALRVLDLYNNNLTGALPLEVVSMAQLRHLHLGGNFFSGGIPPEYGRWGRLQYLAVSGNELSGKIPPELGNLTSLRELYIGYFNSYSGGIPPELGNMTDLVRLDAANCGLSGEIPPELGNLANLDTLFLQVNGLAGGIPRELGKLASLSSLDLSNNALAGEIPATFADLKNLTLLNLFRNKLRGDIPEFVGDLPSLEVLQLWENNFTGGIPRRLGRNGRFQLLDLSSNRLTGTLPPDLCAGGKLETLIALGNSLFGAIPASLGKCTSLTRVRLGDNYLNGSIPEGLFELPNLTQVELQDNLISGGFPAVSGTGAPNLGQISLSNNQLTGALPAFIGSFSGVQKLLLDQNAFTGEIPPEIGRLQQLSKADLSGNSFDGGVPPEIGKCRLLTYLDLSRNNLSGEIPPAISGMRILNYLNLSRNQLDGEIPATIAAMQSLTAVDFSYNNLSGLVPATGQFSYFNATSFVGNPGLCGPYLGPCHPGAPGTDHGGRSHGGLSNSFKLLIVLGLLALSIAFAAMAILKARSLKKASEARAWKLTAFQRLEFTCDDVLDSLKEENIIGKGGAGTVYKGTMPDGEHVAVKRLPAMSRGSSHDHGFSAEIQTLGRIRHRYIVRLLGFCSNNETNLLVYEYMPNGSLGELLHGKKGGHLHWDTRYKVAVEAAKGLCYLHHDCSPPILHRDVKSNNILLDSDFEAHVADFGLAKFLQDSGTSECMSAIAGSYGYIAPEYAYTLKVDEKSDVYSFGVVLLEXDHRKEAGRGVWGWRRHRSVGQDDDGLEQGTCDQDLGP

SEQ ID NO: 179033 - protein, 46 aa, Oryza sativa
  Clone ID: PAT_MRT4530_76535C.1.pep
MEIRTADTRSTVEAGGESDVSVAGRWGRIESADEADRWGWEGGSWA

SEQ ID NO: 179034 - protein, 928 aa, Oryza sativa
  unsure (1)..(928): unsure at all Xaa locations
  Clone ID: PAT_MRT4530_76536C.1.pep
MRLHYHHLAVVLLAAVAAAATAAAGGEADALLAVKAALDDPTGALASWTTNTTSSPCAWSGVACNARGAVVGLDVSGRNLTGGLPGAALSGLQHLARLDLAANALSGPIPAALSRLAPFLTHLNLSNNGLNGTFPPQLSRLRALRVLDLYNNNLTGALPLEVVSMAQLRHLHLGGNFFSGGIPPEYGRWGRLQYLAVSGNELSGKIPPELGNLTSLRELYIGYFNSYSGGIPPELGNMTDLVRLDAANCGLSGEIPPELGNLANLDTLFLQVNGLAGGIPRELGKLASLSSLDLSNNALAGEIPATFADLKNLTLLNLFRNKLRGDIPEFVGDLPSLEVLQLWENNFTGGIPRRLGRNGRFQLLDLSSNRLTGTLPPDLCAGGKLETLIALGNSLFGAIPASLGKCTSLTRVRLGDNYLNGSIPEGLFELPNLTQVELQDNLISGGFPAVSGTGAPNLGQISLSNNQLTGALPAFIGSFSGVQKLLLDQNAFTGEIPPEIGRLQQLSKADLSGNSFDGGVPPEIGKCRLLTYLDLSRNNLSGEIPPAISGMRILNYLNLSRNQLDGEIPATIAAMQSLTAVDFSYNNLSGLVPATGQFSYFNATSFVGNPGLCGPYLGPCHPGAPGTDHGGRSHGGLSNSFKLLIVLGLLALSIAFAAMAILKARSLKKASEARAWKLTAFQRLEFTCDDVLDSLKEENIIGKGGAGTVYKGTMPDGEHVAVKRLPAMSRGSSHDHGFSAEIQTLGRIRHRYIVRLLGFCSNNETNLLVYEYMPNGSLGELLHGKKGGHLHWDTRYKVAVEAAKGLCYLHHDCSPPILHRDVKSNNILLDSDFEAHVADFGLAKFLQDSGTSECMSAIAGSYGYIAPEYAYTLKVDEKSDVYSFGVVLLEXDHRKEAGRGVWGWRRHRSVGQDDDGLEQGTCDQDLGP

SEQ ID NO: 179035 - protein, 926 aa, Oryza sativa
  unsure (1)..(926): unsure at all Xaa locations
  Clone ID: PAT_MRT4530_76537C.1.pep
MRLHYHHLAVVLLAAVAAAATAAAGGEADALLAVKAALDDPTGALAWWTTNTTSSPXCAWSGVACNAXRGAVVGLDVSGRNLTGGLPGAALSGLQHLARLDLAANALSGPIPAALSRLAPLRAHLNLSNNGLNGTFPPQLSRPRALRVLDLYNNNLTGALPLEVVSLRKLRHLHLGGNIFSGGIPPEYGHGGSFKYLALRQTSLSGYPPGGLGNLTSLREFYIGYFNSYSGGIPPELGNMTDLVRLDAANCGLSGEIPPELGNLANLDTLFLRVNGLAGGIPRELGKLASLQPKVDLSKKGLAGEDPAKVRRLQRTFTLLNLFRNKLRGDIPDFVGDLPSLEVLQLWENNFTGGMPRRLGRNGRFQLLDLSSNRLTGTLPPDLCAGGKLETLIALGNSLFGAIPASLGKCTSLTRVRLGDNYLNGSIPEGLFELPNLTQVELQDNLISGGFPAVSGTGAPNLGQISLSNNQLTGALPAFIGSFSGVQKLLLDQNAFTGEIPPEIGRLQQLSKADLSGNSFDGGVPPEIGKCRLLTYLDLSRNNLSGEIPPAISGMRILNYLNLSRNQLDGEIPATIAAMQSLTAVDFSYNNLSGLVPATGQFSYFNATSFVGNPGLCGPYLGPCHPGAPGTDHGGRSHGGRSCQELVNSATSMLHLLLATQACVDRTSGHPDLAWVAPTMMVIVLAGYPMVSNCLLDWVKEDNLMGKGGAGIVYKGTMPKGEHVAVKRLPAMSRGSSHDHGFSAEIQTLGRIRHRYIVRLLGFCSNNETNLLVYEYMPNGSLGELLHGKKGGHLHWDTRYKVAVEAAKGLCYLHHDCSPAILHRDVKSNNILLDSDFEAHVADFGLAKFLQDTGTSERMSAIAGSYGYIAPEYAYTLKVDETSDVYSLGAVLLEXDHWKDPRWRRLEVAQCSFIWIHCSRTQINTQ

SEQ ID NO: 179036 - protein, 64 aa, Oryza sativa
  Clone ID: PAT_MRT4530_76538C.1.pep
MARRAVEEAVGEGLRQIRSLAGLAAATTSYEYEYRWRRNPRRWAMCTKYAHVDKDGQVTHLRRV

SEQ ID NO: 179037 - protein, 90 aa, Oryza sativa
  Clone ID: PAT_MRT4530_76539C.1.pep
VEASCDVYPVFVFITACLISRPFFISLLDGLSNNALCFPSHSFFSSASPSFSYVSATFRPKSFLVGLWVVARGFFYIVATGFSLLFPKHP

SEQ ID NO: 179038 - protein, 114 aa, Oryza sativa
  Clone ID: PAT_MRT4530_7653C.1.pep
AGEARREILFFLFDSFLFCFDLRPASFWLVNVVGRGLILNGSSVVVIPHHPWEFWNFVQAEEARTALGRKDSDSDFISIWIPCSIFGAISINCCCHCSPSPPLVSVTPLVLLCT

SEQ ID NO: 179039 - protein, 69 aa, Oryza sativa
  Clone ID: PAT_MRT4530_76540C.1.pep
IRATVRIAPLNHEIRHSSPSNFYIGQIISLTCFGAILVLSCDLSSTPRFLSSNLHRSEFQIGLFVGLSS

SEQ ID NO: 179040 - protein, 77 aa, Oryza sativa
  unsure (1)..(77): unsure at all Xaa locations
  Clone ID: PAT_MRT4530_76541C.1.pep
MSFVISLTLLIIIKGALIGNNLISSWFGMVYSWFGDRTVQPGWLFRMVXPIQQGMLYSVGLILSXYLTVLLNSEMFY

SEQ ID NO: 179041 - protein, 63 aa, Oryza sativa
  Clone ID: PAT_MRT4530_76542C.1.pep
VCSSSHKPFPLPLTKVQADSWGSNTPTRDLDGAGWHHSCSPSARWALCCRRRRRRGYLRRGGG

SEQ ID NO: 179042 - protein, 372 aa, Oryza sativa
  Clone ID: PAT_MRT4530_76543C.1.pep
MPRRVERKKKKKKKKKKKKKKKKKKKKKRRRRRRRRRIELDRPRDRPMLPAPTSCCRAAPPPSRPSCLSPAAAAAARRRRMAAVRSAAASASRVSREEAVARMPPLAHREVMLAVAGEAEARLGARLLPSEVPADVAWFGNAAGDAVGSVDVRRGAPGSSIAFMLEAWFHRELPGGGGGAIDITALIVNLNGATDAPHLVMEFIQGGPASLIVLLDLLPRVDLPLHPSYIHRYYAATGLDARARRRVAGLVPQSRPYVSPSLLVRSLWSPAAVVADVQCGEGPGGAAALDGIVRGELAATAMDVLGVWLEHCAGGGGGGEMEAAERERMVARDRKVAAAELEVNLAANLPRMFDAGVADRVVAEIRKAFMGS

SEQ ID NO: 179043 - protein, 59 aa, Oryza sativa
  unsure (1)..(59): unsure at all Xaa locations
  Clone ID: PAT_MRT4530_76544C.1.pep
LGGDLVCVPLLAXWRSVTLSGSRSGVSLLLALCDGDVVVWVVVYFFLFLGYDPRSTLCH

SEQ ID NO: 179044 - protein, 54 aa, Oryza sativa
  Clone ID: PAT_MRT4530_76545C.1.pep
QHANGFQATPHTSFQCALHWHLQSSHCAPSRVSVQHLSIAFLATVPQLVAFSLA

SEQ ID NO: 179045 - protein, 528 aa, Oryza sativa
  Clone ID: PAT_MRT4530_76546C.1.pep
MAGSQLNVLVKLDQAKTQWYHFMAIVIAGMGFFTDAYDLFCIALVTKLLGRLYYTDITKPNPGTLPPNVSSAVTGVALCGTLAGQLFFGWLGDKLGRKSVYGFTLILMVVCSIASGLSFGHTPKSVIATLCFFRFWLGFGIGGDYPLSATIMSEYASKKTRGAFIAAVFAMQGFGILFGAIVALVVSAGFRHAYPAPSYAQNPAASLAPQADYTWRLILMFGTIPAGLTYYWRMKMPETARYTALVARNAKQAAADMSKVLHAEIEERPEVVESQVVAGETWGLFSRQFMKRHGMHLLATTSTWFLLDIAFYSQNLFQKDIFSKVGWIPPAKTMNALEELYRISRAQALIALCGTIPGYWFTVAFIDIVGRFWIQIMGFFMMTVFMLALGVPYDHWTHPAHHTGFVVLYALTFFFANFGPNSTTFIVPAEIFPARLRSTCHGISAASGKAGAIIGAFGFLYAAQDQHNPDAGYSRGIGIRNALFVLAGTNFLGMLMTLLVPESKGLSLEEMSKDNVVDETAQEAIAQA

SEQ ID NO: 179046 - protein, 91 aa, Oryza sativa
  Clone ID: PAT_MRT4530_76547C.1.pep
SDIIIIIIIIIIIIIIIIIIIIIINQRYDLFYLRKQNIHETFWLRRRIYKLAFFSPSCPSTSAGADGRWMRRRLVDARKTTQGSARDVVHP

SEQ ID NO: 179047 - protein, 88 aa, Oryza sativa
  unsure (1)..(88): unsure at all Xaa locations
  Clone ID: PAT_MRT4530_76549C.1.pep
LRAWQMAASGRHGSVWRRGRRPAWCREARPMAAEAGXQEARAAEMEAGLAREAXWCEEELPVGVARSSVHEGLPAGGAGAGVPHISKG

SEQ ID NO: 179048 - protein, 133 aa, Oryza sativa
  Clone ID: PAT_MRT4530_7654C.1.pep
PGGHAILGAGKYSREGHKVGSVVPNKAEGDSKQQAPLLCRRIRHQQRKKTPPLKTKLVQGPFCILQNQKWPFCLRSFLWNSTSRGLPPKSFSIKSLKKTTRFFFLFLKKAPQLQLQNAQIFFSFEGFKKKRKP

SEQ ID NO: 179049 - protein, 168 aa, Oryza sativa
  unsure (1)..(168): unsure at all Xaa locations
  Clone ID: PAT_MRT4530_76550C.1.pep
GGKSSPLVAKSGGSGAGRATSKAGGGDRVAVGGGRGAGGRGGRGDGGGAEERRRRVWRRGRRPAWCREARPMAAEAGXRQEARAAEMEAGLAREALPMEGGRIGARGTGAAGGGGGDLGARRSCRWVWRGLRCTKACQRGAPVQGSHISAKVEWWWSIGASTVDSQVV

SEQ ID NO: 179050 - protein, 89 aa, Oryza sativa
  Clone ID: PAT_MRT4530_76551C.1.pep
IEIQYELNSDRDPNRSPTGLGGPSDGSYIFVRGVAGGGIASPWEYGEENARGGEGRAGAIDYFLYIDARYFARFPSTSQRLLPLRSASS

SEQ ID NO: 179051 - protein, 216 aa, Oryza sativa
  Clone ID: PAT_MRT4530_76552C.1.pep
MWILRVSMPRGARPAGRGRTAAAGEGATAIPEGRPEQAKRRRRQVSAVGSGGPADGFGGVGTLYIVANGLTYGDIEQATGIPHADLKRCLQSLACVKSKNVLRKEPMSKIYLKMTLTTMTSPQASWSRQIVNLAGHVLSGNSSSDNATVAAHVGDRRGPPRAAARRQGVRRHGEALRHLAELCRDEYPGWGVSGRARLRPAAAASGGQTRPQAGEL

SEQ ID NO: 179052 - protein, 54 aa, Oryza sativa
  Clone ID: PAT_MRT4530_76553C.1.pep
KCLSIDGLFPVLFGRLEHYLRVKRSVTSEEKAQLVFWIIRLNLLMILCLRSLIC

SEQ ID NO: 179053 - protein, 90 aa, Oryza sativa
  Clone ID: PAT_MRT4530_76554C.1.pep
RHRHTEVHVSSYSLPCRCSLSVGYRGVEVHPAGLLHLPPARSINGPEQEVHLQHHRGREREKRAADRPPTPTSVSHAMHQQCGLEREADR

SEQ ID NO: 179054 - protein, 98 aa, Oryza sativa
  Clone ID: PAT_MRT4530_76555C.1.pep
MEKVGVLGEERGTPSPRSSSARGGNTIFWFLLGFQLGNGDDGVTLGVLRDIQKVRTGIMAWGSPDPSAGREAAASIGAGIGGQARGSGVTGQARDATG

SEQ ID NO: 179055 - protein, 53 aa, Oryza sativa
  Clone ID: PAT_MRT4530_76556C.1.pep
NGFGPQLIDRNWQTLGNQRQVLVCPGYDYRGYLAKGNHLINSCRRSTRAIAAQ

SEQ ID NO: 179056 - protein, 532 aa, Oryza sativa
  Clone ID: PAT_MRT4530_76557C.1.pep
MADRLDRWRELLRGAAGSAGICDVIENAILVAAADAPQELLRRRDRICEILFTAPRAPPCHHGCGSAATPTPATPVEEDKGSVRRVPEKQSKVDSSSNGALGGGGGRRDDVDDDSDSDSDDERLRRAAASNYGHNYDDDDEEEEEEQEAAPAEEDEEQELDPEAVELEALTNEIDEESQVVGEVLRIKDLFLHKEDHSDATLFESLRRLQLMQLSVSTLKATEIGRAVNGLRKHNSQQIRHLVRTLIEGWKILVDEWVSTTNVALTDNSPGSSKTSVVDDADDEGLPSPPLDEGAFFATQTTAIQLSEFFDEMDEDGNLRHNNDGSLGNKRENYGRRPTSHPALTKQEPPRNMGAVEKVQSRRPELARQEPSMRQANPQTPQNSSLQVKQQAMLHKQSKPLSSDSGPGRPLRAAPQQKPFVEMKSRLAREQVAVERKPAASHVDKSRLPAQPSAGVKLESAKPKIYDGLESNSRLEAAKRRLQERYQEAENAKRQRTIQVMVLGDIPKPKHQNRQPMMKSRNHIRSWANGRR

SEQ ID NO: 179057 - protein, 79 aa, Oryza sativa
  Clone ID: PAT_MRT4530_76558C.1.pep
LLSLVPAVEVIVLGEAKICAVWRPDVLLSSDLFQAQVRSSSDQFGSITIVFAIPTALRVYAFISQVRCISIDRSKLRIA

SEQ ID NO: 179058 - protein, 140 aa, Oryza sativa
  Clone ID: PAT_MRT4530_76559C.1.pep
FFFFFFEENVALCSLFFWPVMLFLSMQSEYYIIYLNGIMHDISKRKCLGSMDLQHDIPLSRTDKINKDETSLSNNLEKEAQKIGTCLGSITSNHTDLSCQVSCLWTMSWFFLADIVPYFLTWKLSQHAASNPTKWNFIAQ

SEQ ID NO: 179059 - protein, 67 aa, Oryza sativa
  unsure (1)..(67): unsure at all Xaa locations
  Clone ID: PAT_MRT4530_7655C.1.pep
HRXRPRRGFAAFLRRRXVPEQASVVSXXXRGVVVALXMGLWRLRWXWAXAEVEFAVRYXSQPLEXXG

SEQ ID NO: 179060 - protein, 46 aa, Oryza sativa
  Clone ID: PAT_MRT4530_76560C.1.pep
SFPAIFFLLLVLAHHCLDLTLVLNPKMQILFLQGTLVAVSEYCSVA

SEQ ID NO: 179061 - protein, 234 aa, Oryza sativa
  Clone ID: PAT_MRT4530_76561C.1.pep
MAARDAHAYARAPADHRHAPRIASEHRMNFRCSAVRAQDSSRDGPRTGTCGAVAAGERSSRERDRPIRSADRWITNGWPLDQPTCRVAARNGVRVKSAKGRIRWIGPKADRIPDLNSDMSLSPPIQPIRRPTSSCVTRQTVPNFRKLPAKTPTSRTYRSRRYVPEARVRVAYLPCRHMRFQTKSTHSRLPYIIRNSGLRRRRKRDSGSLRSRSLARCPSSRRPLAGGKWKQPRN

SEQ ID NO: 179062 - protein, 93 aa, Oryza sativa
  Clone ID: PAT_MRT4530_76562C.1.pep
MEDSPVAVAIPWFALAAATAVLAGAAWLIIRACKADESCCRLPPGSRGLPLLGESVEFFARSPSLELLPGIPHPLERLPKYYIKSHNQILGLI

SEQ ID NO: 179063 - protein, 96 aa, Oryza sativa
  Clone ID: PAT_MRT4530_76563C.1.pep
MAELHESRRNTAVAYDTGTYKRTHHDKKRRDFLLQWLICDEEPVERVGVRESPHEKVFERLSRDGAISTVAATVTVTVTAAASVSLDVAWVSDLIN

SEQ ID NO: 179064 - protein, 592 aa, Oryza sativa
  Clone ID: PAT_MRT4530_76564C.1.pep
MDGRDELTTKPIEIKFSSCRGVTFEPKPSPASPFAIAAAAAAACPAKPPPAAPSTGRWIWLPLLSSSRYSSFSRIIPAKPDCGVGRSQSRASSHFCDLDVAGDEEEDDGVSVFDGHDEEMAVAAAAAADVEDDLKGKKKPSVSAAAAAAPATARRSRLAVILFDQGLFTVYKRLFVLCVALNAAAVALAASGHFPYAERRAAVFAMGNILALTLCRSEAALRVVFWLAVALLGRPWVPVVAKTGVTAILQSLGGVHSGCGVSSVAWLAYALVQALRRRDEMPPEIVAVASAILFLLALSCAAAFPLVRHLHHNVFERTHRFAGWGALALLWTFVVLSAGYDREARSYVPLAGAVLAGREDIRLAAAITFFTTLPWLTVRRVPVTVTAPSTHAAILTFQGGVRAGLLGRISRSPLSEWHAFGIISDGRRTHAMLAGAVGDFTRGLVADPPTHLWVRGVHFAGLPYLIGMYRRATMVATGSGICVFLSLLMQPSTTTATELSLVWVAKGVEANYGEEIRAAVAAAAGGKSMAGRVVVHDTAVMGRPDVRELAVAAARRWGAEVVVVTSNPEGSRDVVSGCRKAGIPAFGPIWDS

SEQ ID NO: 179065 - protein, 71 aa, Oryza sativa
  Clone ID: PAT_MRT4530_76565C.1.pep
LLINFKKNYCCHKINSIYKDSIIIIELLLMNPLSKEKELRSTGSAETARGGGGGGDERHWCVVSCARADAW

SEQ ID NO: 179066 - protein, 264 aa, Oryza sativa
  Clone ID: PAT_MRT4530_76566C.1.pep
MHPPAAAGGDHATAAPAPATGAAAATASDYAHYPRLSPEDVAPPPPPSYHAAASSAPPYSGNPYVSSPAGGVAPASKNTMDTVKDVLGKMGKRFGEAARKTETLTGNFWQHLKTGPSITDAAMGRVSQITKVIAEGGYDKIFHQTFDVLPDEKLKKPYACYLSTSAGPVMGVLYLSNKKLAFCSDNPLAYKVGDKDEWSYYKVVIPHTQLRSVNPSTSRTNASEKYIQVVSVDNHEFWFMGFVYYDSAVKNLQEALQEAQNLRA

SEQ ID NO: 179067 - protein, 91 aa, Oryza sativa
  Clone ID: PAT_MRT4530_76567C.1.pep
MAIPFFIPPGVPVGMCIGNLVGSLWEKMDPGPGRMLSPALGWGVIFGDGVGSIFLSMLTLMGARGPICIKFLFPGANVKLGPFLAPLPAMR

SEQ ID NO: 179068 - protein, 401 aa, Oryza sativa
  Clone ID: PAT_MRT4530_76568C.1.pep
MAARTRPQAQGLDLPLARALVLLDAPPHPRHRRCRASSRPVPPHAVTSPVVVARGGPGVAFSFDGLCDLILLMAVVVDISNGGATVAVLYRREREFAIARTGERSWRLINNKLDRIVDMARHGDGKLYTVHLSGKVARWKFNCNVCRSPKILESVLVIDSPYHYVVKADGNGNAIIMSREYEHDHRDRASECCYLAGAPRGTLYLLKRVYKHKQGGGGGGGGGGTSSPGVIRMTIIVGGVVIDPSSHHATIRSSLIPHLSITPPPATGTPRTRRSLIPHANKINQRKQWQMALGVQWQVCTNKIMCYDYANSCHMTHLQTHLNGGEQWHFPYRFHDNRAEFWHHVTMNSLQWLLWLLLRLVPFLCPDAVHTKNFMEGTLLQYGGHEELQMVHEMELLTPYC

SEQ ID NO: 179069 - protein, 838 aa, Oryza sativa
  Clone ID: PAT_MRT4530_76569C.1.pep
MRMMMMMMISHPTSGVIFFRPLERSTFRSSVTAPNDPYCFPPFIAGGARVGAEAGAADPDAARHRSSDDAASDRPHPAAGEGDAAPAPAEEAETARRGGGAGPPARGCGEAEAEEAGGRVGGGAGAATPAPQWLPPSPSSTPPPPPPPPPLAVTTPRARRTCTSTSRSTTSLRRPAAGSLPRYSRTPVLNPRILREMDERLSECDAFRSRTPQFAVGGADGGTGGGGGRRARGGGDVDVAAVGAALRDARTADEVETLVKGFLDDGGGGEEHLPLQVYTSVIRGLGKERRLDAAFAVVEHLKRGSGSGGGGGGVNQFVYNCLLGAVKNSGEFGRIHDVLADMEAQGVPPNIVTFNTLMSIYVEQGKIDEVFRVFDTIEGSGLVPTAATYSTVMSAYKKAGDAFAALKFITKLREMYNKGELAVNHEDWDREFVKFEKLTVRVCYMAMRRSLVGGENPVGEVLKVLLGMDEAGVKPDRRDYERLVWACTGEEHYTIAKELYQRIRERGDGVISLSVCNHLIWLMGKAKKWWAALEIYEDLLDKGPKPNNLSYELIMSHFNILLNAAKRRGIWRWGVRLLDKMQQKGLKPGSREWNAVLLACSRAAETSAAVDIFKRMIDQGLTPDVVSYGALLSALEKGKLYDEALRVWEHMCKVGVKPNLHAYTILVSIYIGKGNHAMVDSVLRGMLSAKIEPTVVTFNAIISACVRNNKGGSAFEWFHRMKVQNIEPNEITYQMLIEALVQDGKPRLAYEMYMSACNQGLELPAKSYDTVMEACQDYGSLIDLNSLGPRPVKKVEPIRIENKFSSSYYVGDLPSSTKHFGSTGTSSLYRYRTERWIM

SEQ ID NO: 179070 - protein, 80 aa, Oryza sativa
  Clone ID: PAT_MRT4530_7656C.1.pep
MHRMVKLLCTLLLALSLTAHYSDMSMKVSADCQSVNVPGPCSPTTCDDNCKSQIGAGAVGECTSGGCQCTFCTLPPPKKN

SEQ ID NO: 179071 - protein, 73 aa, Oryza sativa
  unsure (1)..(73): unsure at all Xaa locations
  Clone ID: PAT_MRT4530_76570C.1.pep
GYKYKPPGRRGDEPQDTTYTQANTPPDIDIXSLDLPHPVSTETGKRNLAPSLISTGSYSRRKTXPVVDYELVI

SEQ ID NO: 179072 - protein, 375 aa, Oryza sativa
  Clone ID: PAT_MRT4530_76571C.1.pep
MATTQHSNGGAAGDNGEAAPPSVPPSLAPPRKVALVTGITGQDGSYLTELLLGKGYEVHGLIRRSSNFNTQRLDHIYHDPHSQPSTPRPPMRLHYADLSDSSSLRRALDHILPDEVYNLAAQSHVAVSFEVPDYTADVTATGALRLLEAVRLASKRIRYYQAGSSEMFGSTPPPQSESSPFHPRSPYAAAKVAAHWYTVNYREAYGLFACNGVLFNHESPRRGENFVTRKITRAVGRIKVGLQTKVFLGNLSAARDWGFAGDYVEAMWRMLQQDKPGDYVVATEESHTVEEFLQAAFGYAGLNWKDHVVIDKKYFRPAEVDSLQGDATKARKELGWKPKVGFQQLVEMMVDNDIELAKKEKVLVDAGYRDPKQQP

SEQ ID NO: 179073 - protein, 122 aa, Oryza sativa
  Clone ID: PAT_MRT4530_76572C.1.pep
MARHRHRNVVFAFHRFHQSAYAGDSNGLGKRLRQRSRQRTAARRPQQGTALVSVADDGGVGSERRRGGLGKRRQRLQGRPLHHNAPDTLADHKIVNALNLLVQDVSRAAPVGVRLTADGLAA

SEQ ID NO: 179074 - protein, 78 aa, Oryza sativa
  Clone ID: PAT_MRT4530_76573C.1.pep
KLLGRWTASSATMTCALWMSKSCATVFSISMSMFVFGFRRGSLARSCVVLRVLCGLYRPRLRYLASFYSPSGCIFLFL

SEQ ID NO: 179075 - protein, 66 aa, Oryza sativa
  Clone ID: PAT_MRT4530_76574C.1.pep
LLHVLARTAGSEASDSPVFTKNCPEPLSLHFEEAYGFFGDLEGAGDPCCDLIEDWLNIRLAHPSKK

SEQ ID NO: 179076 - protein, 91 aa, Oryza sativa
  unsure (1)..(91): unsure at all Xaa locations
  Clone ID: PAT_MRT4530_76575C.1.pep
CARTGAGSSAARRPRTSAPSATGTNSRRRRRQRRLPPRRLTSRTRRRRRARPXRRRRRAASAVREQLATATTSRRRRRPPPPPPLPTSSSP

SEQ ID NO: 179077 - protein, 63 aa, Oryza sativa
  Clone ID: PAT_MRT4530_76576C.1.pep
VSLAGYKLGVVLASPWSRIEAPIVISRHHISSIGPLLSRNISGTALVILFLGQLSISCVRGAR

SEQ ID NO: 179078 - protein, 306 aa, Oryza sativa
  Clone ID: PAT_MRT4530_76577C.1.pep
VNLCSWCLTSKRFETEAYAKIDLRIQNRALLMTHLHKFYSKAHVPWVNLIWSSYYKDTVPHRLYAFATPAVHGNDSIAQHLARGPQDQFFLPLSQQAFDEYMDMQENLQSLTLPEVDDSWTFVWGSGKFTSRLCYKLSFLALTPPPTIKWIWQSKVNMKIKVFGWLFFMDRVNTRDLLDRKHCAPPNTSVLCLSCSANARETRDLLFFLCPFSAACWSRLGWTWNPNLDFHQRIQAQKVAVLHPCFMELFLIASWNIWKERNGLIFQGIQPSVQNWLMNLKLDLSLHLIRLKECYRPLVQSWIDQL

SEQ ID NO: 179079 - protein, 48 aa, Oryza sativa
  unsure (1)..(48): unsure at all Xaa locations
  Clone ID: PAT_MRT4530_76578C.1.pep
XLXXYIXCDXMMFXDLLLLFXXFDQSMSFAEGSYVCVAGDRFMCNYVV

SEQ ID NO: 179080 - protein, 485 aa, Oryza sativa
  Clone ID: PAT_MRT4530_76579C.1.pep
MVAMEKKTKLVEEEDGCYYYDYGGYGDGVVDDEGRATELRPMALSRPHTQAFHLAWMSLFACFFAAFAAPPILPAMRPALVLAPSDASAAAVASLSATLVGRLAMGPACDLLGPRRASGVASLVCALALALAAVFASSPAGFVALRFVAGLSLANFVANQHWMSRIFAPSAVGLANAVAAGWANVGSAAAQVVMPVAYDAVVLRLGVPVTVAWRVTYLLPCAMLVTTGLAVLAFPYDLPGGGGGRCPGGGGGRRRSFWAVVRGGVGDYRAWLLGLTYGHCYGVELIMENVAADFFRRRFRLPMEAAGAAAACFGAMNAVARPAGGVASDEVARRFGMRGRLWALWAVQSAGAALCVLVGRMGAAEAPSLAATVAVMVACAAFVQAASGLTFGIVPFVCKRSLGVVSGMTASGGAVGAIVTNRLFFSGSRYTVEEAISCTGITSLLCTLPVALIHFRRQGGMFCGPSATIDGDGDVDDDDDYMLLK

SEQ ID NO: 179081 - protein, 71 aa, Oryza sativa
  Clone ID: PAT_MRT4530_7657C.1.pep
PMQMHPSDQRSALSGTTKYCTTSMGTVKEISSKCTVHSYWCSIQCVLLIRDTRKTTYMSKPIRGGGGALPI

SEQ ID NO: 179082 - protein, 451 aa, Oryza sativa
  Clone ID: PAT_MRT4530_76580C.1.pep
MARRSKGGGAEGDGMRMQVVWRKGAVRLVLVSAIAWALLVILALAFHLWSCNSDVPFLSGCPIPVADDPDSITIPKRTPNTIVNKLSYITVDKQDKDPSPLFGGRQSWKQREDSFKLNATMKATTFLYCVHCGFMKNSGADMDDVDVKYIQKCKFVVASGIFDGYDIPHQPSNISIRSQKLFCFLMVVDEVSLDFIEKNTTVKFDKAGGKWVGIWRLITLHRLPFDEPRRNGKVPKILTHRLFPQAWYSIWIDGKMELIVDPLLILERYLWRGKYTFAVAVHKHHKSIYEEGDAIKRRKRYARPLVDLQMKMYYHEGMEPWNPKKRMPSDVPEGAVLIREHTTMSDLFSCLWFNEVNLFTPRDQLSFGYVVYRLGDALKFFMFPNCEYNSLFILHRHTREHSSKVEWAKTIDEIVKKGLKESKGGLGLWTPYPADLSSVELPSVKRTSPAG

SEQ ID NO: 179083 - protein, 151 aa, Oryza sativa
  unsure (1)..(151): unsure at all Xaa locations
  Clone ID: PAT_MRT4530_76581C.1.pep
MARRSKGGGAEGDGMRMQVVWRKGAVRLVLVSAIAWALLVILALAFHLWSCNSDVPFLSALCKKDSKVLYALDSIRSSSKPLHRCPIPVADDPDSITIPKRTPNTIVKRLSYITVDKQDXDPSPLFGGRQSWKQREDSFKLNATMKATTFL

SEQ ID NO: 179084 - protein, 121 aa, Oryza sativa
  unsure (1)..(121): unsure at all Xaa locations
  Clone ID: PAT_MRT4530_76582C.1.pep
EKVRITPPPELSRSYELPPKPQNRTFFXPNYANRTNYPPRTNSERFCPTWRTRGNPVSFSLSRLAGTARGRRGWRRRRXRWRRRRQRARGGEWRGWAAEEASGGGSSCCSRRRRGGGGGSF

SEQ ID NO: 179085 - protein, 160 aa, Oryza sativa
  Clone ID: PAT_MRT4530_76583C.1.pep
MYYLILIMWRIKDGVVKIGMFGATTNGTMRDIDVAPVSLKSVTVGSIDTVDCISFNFEDKDGNELAVGPWGGTLGRDHTFVLKSNEYVREVSGTFGPFATQHLDRTVNSLTFVTSQGTIYGPFGTPNGTSFRIPVEKGSIVGFYALADGFVSAIGFYVRQ

SEQ ID NO: 179086 - protein, 92 aa, Oryza sativa
  Clone ID: PAT_MRT4530_76584C.1.pep
MWTMSCNGKKVGYPVRQNPPGEDIPVLKTLWAVSMGDGVPPGISAMDGKNGKMGSMRGSFEPIMGSRNSESLYMISPPGGDCPELPVFFVRL

SEQ ID NO: 179087 - protein, 118 aa, Oryza sativa
  unsure (1)..(118): unsure at all Xaa locations
  Clone ID: PAT_MRT4530_76585C.1.pep
MSDMKDTNAAGPETVGNPDPMDQTEDNSMPSAQEQELAIKKKFGGLMPKKPPLISKDHERAYFDSADWALGKSGQQGAAKPKGPLEALRPKLQPTRQQQQRSRRLXNTSSDNEDGDGA

SEQ ID NO: 179088 - protein, 126 aa, Oryza sativa
  Clone ID: PAT_MRT4530_76586C.1.pep
MSDMKDTNAAGPETVGNPDPMDQTEDNSMPSAQEQELAIKKKFGGLMPKKPPLISKDHERAYFDSADWALGKSGQQGAAKPKGPLEALRPKLQPTRQQQQRSRRLINTSSENEDGDGAGAEDMNIN

SEQ ID NO: 179089 - protein, 61 aa, Oryza sativa
  Clone ID: PAT_MRT4530_76587C.1.pep
NMFLFYAQNWEQASSTREKRASLQQSEDSHLHVTVREKDNLFRGIIYTCLVLIHVHQTCLV

SEQ ID NO: 179090 - protein, 122 aa, Oryza sativa
  Clone ID: PAT_MRT4530_76588C.1.pep
MCVCVYVYIYIYVYICVYMYTYIYICIYMCIYVYICVYMYICMYIYIYIYIYIYIYIYIYIYIYIYMYVCIYIYMYVCMYVYICMYVCIYIYICIYIYIYIYIYIYIYMYVYISYNCEIKQD

SEQ ID NO: 179091 - protein, 88 aa, Oryza sativa
  unsure (1)..(88): unsure at all Xaa locations
  Clone ID: PAT_MRT4530_76589C.1.pep
GQRGHGGGALHFVLXPLPAQGHVIPMMDMARLIAGHGGGGARVTVVLTPVMAXRQRAAVAXAARXGLAVDVSVLEFPGPAXGFPPVSK

SEQ ID NO: 179092 - protein, 169 aa, Oryza sativa
  Clone ID: PAT_MRT4530_7658C.1.pep
MASYVLDLRRGLAVFAGTGRPEEAVLRKNVAWADARRAALAGEGAQDSGDDAVRSRKAGLLDSAIKFEDAVVGKMTALKEKLTRGAAAFVGEEEIVQALNKHAATAEAEIAESQAFSAVLLADANRAAILVVVVHKRPAPETETETEEEEEPPRQRRGTGDAGDSAAQD

SEQ ID NO: 179093 - protein, 244 aa, Oryza sativa
  Clone ID: PAT_MRT4530_76590C.1.pep
KLVLNRNCTKTRLKIHSKLSDRLADMCVGSGATKIAGGSAGGAASSSAWRNPQFADVFDLRLAGAAHPGELVRLRGGKVDHQLLVLLLQGRHDGAHVRHRAVRGYLQWHDGWRDEVAAAHARCMLGEGDRTATEAGMEGNSVVGVELNLNPTIKDDQRLRLLSTPSTKHRSRTSVFLTNWSLQKTYFETSPYQKLYPEIGRRISAKAVGAEVVLICANGTGADIAPAWRARRDVAGPQRQCTWR

SEQ ID NO: 179094 - protein, 50 aa, Oryza sativa
  Clone ID: PAT_MRT4530_76591C.1.pep
SNESRKGFVGAEHMPSAVPMESTHTKHETLGIIAKITTSDPHSLGPCVTV

SEQ ID NO: 179095 - protein, 39 aa, Oryza sativa
  Clone ID: PAT_MRT4530_76592C.1.pep
ACPAFRAGSRNFSPRSHCHGSLLSVIIPFLPSPFFGPKN

SEQ ID NO: 179096 - protein, 115 aa, Oryza sativa
  Clone ID: PAT_MRT4530_76593C.1.pep
LTRRVKAHVHVIDTPPCHASRNVSGSYELVSIIVLVRGTHVQVLDCSHCASDVQQMCLCRSYCNLGICWAEPPKCLRERIVFPFKLSLFEAMCLCVQIKTHLNFVWLELRKVFKP

SEQ ID NO: 179097 - protein, 101 aa, Oryza sativa
  Clone ID: PAT_MRT4530_76594C.1.pep
MDEREASAARSSVQLSELPDPETSRIRVEETKQLVADMQSIIEALLVFVDAGCSPVPVDEIHEMIRHMREVGCPLVRRSLDQIRRDTEALLAAAAALEPRP

SEQ ID NO: 179098 - protein, 108 aa, Oryza sativa
  Clone ID: PAT_MRT4530_76595C.1.pep
MPACMILGRTTKLLKWKDVITCRLRVWVDINVAVASGNQPLARFAGRGRSLSGEALRHAYARVPVGRVVIAGWPRLVGWIDRAFEHAGRGVLEEEDWAGPAYRLRPGK

SEQ ID NO: 179099 - protein, 44 aa, Oryza sativa
  Clone ID: PAT_MRT4530_76596C.1.pep
CCMQMDFQLLKSNLKSIVNPKSSQYHLITPSEPHQTNYEEESKK

SEQ ID NO: 179100 - protein, 211 aa, Oryza sativa
  Clone ID: PAT_MRT4530_76597C.1.pep
MAMAMARARAAASWLLLLVLLHMRIGASSSQLECKLEYTSLALLSCQETTPTTPTPSCCDALLYSLDIWPVNQREKGLCCLCVYVLARQPSFDLATTYITCRGSYAASVAQWTQQLIRGVPPHDCNEPCGVDTGDHPPPLPSGKKNKTRRKKQKQQLGVGVIIAIVVCSLAAAGLLGYCLYHIFFSPAAKARRSPDPSSNNSSASSRQRRA

SEQ ID NO: 179101 - protein, 201 aa, Oryza sativa
  Clone ID: PAT_MRT4530_76598C.1.pep
YGHQNRMTENEMILPSFPPSCFFQPLCPIPAISLAARATSQEGDAPAPPSPRGHARRNKWGSRPQQLPSMIPPSDMAPEARRCPALAVQWNRAAPGATVPPAGWPRCCGAAGGPPAGPAARILTSCSSAYFWIQQWRGGSHPREFFMGRRGSIAQGPHHNYFVRATHKTIENKNEVTIWVMSNACKNCRLIDGMIDARNWW

SEQ ID NO: 179102 - protein, 77 aa, Oryza sativa
  Clone ID: PAT_MRT4530_76599C.1.pep
MAAAWTSLGLAAVAVVVVGIAMPASASAAAPAQPPAPAPSSDGTSIDQGIAYVLMLVALVLTYLIHPLDALSPYKLF

SEQ ID NO: 179103 - protein, 333 aa, Oryza sativa
  Clone ID: PAT_MRT4530_7659C.1.pep
MENGHAKNLVAVIGSGNWGSVASRLIASNTAKLPSFHDEVRMWVFEEILPTGKKLSESINQANENCKYLPGIKLGANVIADPDLENAVKDANMLVFVTPHQFVEGICKKLVGKLRPGTEGISLIKGMEIAVEKFSEATIGYKKDKEVATRWAKLFTTPYFLVSVVEDIEGVELCGTLKNVVAIAAGLVDGLDMGNNTKAAIMRIGLREMRAFSKLLSPTVRDNTFFESCGVADLITTCLGGRNRRVAEAFARNGGKRSFDELEAEMLHGQKLQGVSTAKEVYEVLTYRGWQELFPLLSTVHEICIGQLPPTSIVEYSEHTPNLSIINGSNAYY

SEQ ID NO: 179104 - protein, 88 aa, Oryza sativa
  Clone ID: PAT_MRT4530_765C.1.pep
MAHQMGWRKTTLLRAEISSRRKSPRNRLCAGGVAGEERENRSHGVRFLEGDALGKKIRSKQSRKRRSSLKTEQESAGVQIGYDKIGWV

SEQ ID NO: 179105 - protein, 59 aa, Oryza sativa
  Clone ID: PAT_MRT4530_76600C.1.pep
PRRPTEEKSQEGPRRRGATAIELVGCIETMDAGGDGVVLISGSCGGEGSIGRNRRIWRR

SEQ ID NO: 179106 - protein, 113 aa, Oryza sativa
  Clone ID: PAT_MRT4530_76601C.1.pep
HASALSSSFLAGRLPRYHRCHFSTAVNDHGGQQKRRARKAPAVAAPATAACTGGCGDPVLLFSAVELAGALTTAIELVGCIETMDAGGDGVVLISGSCGGEGSIGRNRRIWRR

SEQ ID NO: 179107 - protein, 46 aa, Oryza sativa
  Clone ID: PAT_MRT4530_76602C.1.pep
QFGDLYFDRNMAPVQAMLAFNVPSRYGIYPRYNGAPRTITTLAGVL

SEQ ID NO: 179108 - protein, 81 aa, Oryza sativa
  Clone ID: PAT_MRT4530_76603C.1.pep
ILLQRGGHKSWEKLQLPWKRLYTVFTFTHCNLLGQANRLQAAEHTPPSLQNLVGVLFQFLRLPRITVVFTMNRIRLDNIVQ

SEQ ID NO: 179109 - protein, 122 aa, Oryza sativa
  Clone ID: PAT_MRT4530_76604C.1.pep
MASSLLVAFLLLSSYAVLSVCSSRPIAGGVEVIWSTGAATTTMEADGGQSHCRRGGGTSVVVRYLVARRTVMGMEVPSRESTMMRRLPDREPVVYLQRHLHAKHWLLPKSYNTIQLRDVIPT

SEQ ID NO: 179110 - protein, 101 aa, Oryza sativa
  unsure (1)..(101): unsure at all Xaa locations
  Clone ID: PAT_MRT4530_76605C.1.pep
QPQIAMTNSTDIVDLHSRFNAPDEDMIIVEGESXVCTDLEGDPQGIVXLDISWHMKTATMCEFTRQECIGGLHAIGVDSIERLTKKVPSLRAEITDGHNMS

SEQ ID NO: 179111 - protein, 77 aa, Oryza sativa
  Clone ID: PAT_MRT4530_76606C.1.pep
DALCCIKNSISTIFLCREYLSFLRTKRKRLFRDSSKIGIKTDQKGFMCGCQMHIIPYAELRQAVAQSMVQVTTIVCQ

SEQ ID NO: 179112 - protein, 116 aa, Oryza sativa
  Clone ID: PAT_MRT4530_76607C.1.pep
YFKKDSYGLKNPITLMSHVSRVMAIATMVLSLLMDPWSDFQKNTYFDSPWHVMRSFLLMLVGGTLAFFGVLTEYVLVSATSAITVTIAGVVKEAVTILVKFKICIYLPTFIIYSRI

SEQ ID NO: 179113 - protein, 133 aa, Oryza sativa
  unsure (1)..(133): unsure at all Xaa locations
  Clone ID: PAT_MRT4530_76608C.1.pep
MTCPGTCADRARLARARPPPQPAQQPAQASSASRCRPPASPPSQLPTXPPPPAAPPGKRMWGQRGRASSWPPAXPPPRCCSPSLACSHRPPPPAPLPPAPPPSSRHSRRPPPPAPLPPPPLRSPRFLLPAPPP

SEQ ID NO: 179114 - protein, 1323 aa, Oryza sativa
  unsure (1)..(1323): unsure at all Xaa locations
  Clone ID: PAT_MRT4530_76609C.1.pep
MASESKLDLLLRTMEENERKREVAEKKREEAKERARKDFSDLKKVFEVRIPLVEKKVEELGASVQTLSDKVTHIEGTIFKQENPQEPTGQESSWLAGKRDPSLFTLNRSNLESPSSSSATAPVDLSANLPPMTCPKFDGNNPQMWKSNCEQYFDVYGILPMHWVKVATLNFCGNAAFWLQSIRSQIAGITWPTLCELVCARFTRDRQEALIRQWFHTQQNSSVAEYVEQFDSLMHQLMAYDSALTPVYFVQKFVEGLRDDIRGVVMVHRPQDLDTACSIALLQEEVLEGMKSVSGKGGNNQVYIKPAAPRTTTYSSVIPNSKGLTPSSPTERKFSEADKTKDDRLASLKAYRRSKGLCFVRGERWGRDHKCATSVQLNVVQELLEALHSDLESDQPGTTEFTDDQVENQLMAISQQALWGTDSSKSIRLRGWVQGTEVLMLVDSGSTHSFIDQQIGQKLAGLTPLPSSVNVRVADGSIMQCTHELVDCNWWMQGPMKVDWVDKWLELQIAGHTVKFHGITPITGQCPLISLEQCHGMVKNGSDQCMIQLYSTLHTDSSCIPEVVQPILQQFQSVFAEPKGLPPQRVCDHSIPLLPGSKPVNLRPYRFNPALKDEIESQISKMLESGVIQPSHSAFASPALLVRKKDGSWRLVIDYRQLNAITVKSTYPMPVIDELLDELAGAKWFSKLDLRAGYLQIRMKAGDEHKTAFQTHTGHYEYKVMSFGLTGAPATFQGAMNATLKTVLRKFALVFFDDILIYSPDLASHLDHLQQVLSLLQKHQWQVKLSKCSFAQQQLTYLGHIISAAGVSTDPGKIKEVVDWPVPTSVKKLRGFLGLAGYYRKFVRNFGVISKPLTQLLRKGVPFVWSDATDLAFQHLKQALVSAPVLALPDFSKPFTVETDASKAGIGARIHTPWQHKAFTKLLGLSYKICYRKGTTNAAADALSRKFQAKPGYTLHSGVIKYKGRIWVGNNPILQSKLIQELHASPIGGHSGFPVTYAKLKHLFAWQGMKSQVKQYVQQCQICLQAKPDRAKYPGLLQPLPVPAGAWQAISLDFIEGLPRSNSYNCILVVVDRFSKYSHFIPLAHPFTAIDVAKVFMVHIFKLHGLPQIIVSDRXRIFTSQLWEQLFXSDCAIPDLAQWLKERNLMQSLVQQQLNRAQQQMKHMANKKRNFRDFAIGDWVYLKLQPYIQTSIATRANHSSKPATSAIHPVFHVSQLKDAKGFKGTIQTTLPAADTEDVTWEDLEDLRSCFPAALAWGQAKFQGRGIASDPGGSDVTKTDDAARVEAEEQIMLDADQEDQEVAPRQTTRFVKPNAKYVGPDWAL

SEQ ID NO: 179115 - protein, 272 aa, Oryza sativa
  Clone ID: PAT_MRT4530_7660C.1.pep
MADDMPPAVDDDLQDLIDELMNAGPEDEADDRECEEITAKALSEATEYLEDPDPPSPEQVGWAEGAVISAQSAADNMASYVLDLRRALAVFAGTGRPEEAVLRKNVAWADARRAEAVEIASAARRLLEKELRCMAARDHPVIPELAALITAMRESTKSRVLQDSSGGDAVRRAGLLDSAIKFEDAVVEKMTALKEKFTRGAAAFAGEEELVQALQKHAATAEAEIAEAQAFSATLSAASLVFVQKRPAPETEEEPPRQKRRTGDAGDSAAQD

SEQ ID NO: 179116 - protein, 64 aa, Oryza sativa
  Clone ID: PAT_MRT4530_76610C.1.pep
ARSLIPRCLFCSHVDRIPFLRASLVHKEISLSERRTCSQPFFSLLDACRAARTRGRTRGRTRGR

SEQ ID NO: 179117 - protein, 89 aa, Oryza sativa
  Clone ID: PAT_MRT4530_76611C.1.pep
SFFFFFFFFFFFLFGLGSLFYYSCSMLVYHIISFQHLQTILMVPLSREKDTLYRSRPKTGPDILGTLGETNRQTCEPYNSTPPMVVSGW

SEQ ID NO: 179118 - protein, 482 aa, Oryza sativa
  Clone ID: PAT_MRT4530_76612C.1.pep
MEIISTVLGSTAEYAVTLVAMAVGLLLLGYLYEPYWKVRHVPGPVPLPFIGHLHLLAMHGPDVFTVLARKYGPVFRGSRWTALRNMIISIYQPSHLASLIPTMQSCIECVSKNLDGQEDITFSDLALGFATDVIGQAAFGTDFGLSKISASSNDDDIDKIATDTSAEAKASSEFIRMHVHATTSLKMDLSGSLSIIIGQLLPFLQEPFRQVLKRIPWTADHEIDHVNLALGGQMDKIVAERAAAMERDQAAPHAQQRKDFLSVVLAARESNKSWRELLTPDYISAFTYEHLLAGSATTAFTLSTVLYLVSKHPEVEEKLLREIDGFGPHDHAPTAEDLQTKFPYLDQACMPFFDIGRIYGLRLWSREYKGNGTWVWLAPGVLAKDPKNFPEPEVFRPERFDPNGEEEKRRHPYAFIPFGIGPRACIGQKFSIQEIKLSVIHLYRNYVFRHSPSMESPLEFQYSIVCNFKYGVKLRVIKRHTA

SEQ ID NO: 179119 - protein, 538 aa, Oryza sativa
  Clone ID: PAT_MRT4530_76613C.1.pep
MEIISTVLGSTAEYAVTLVAMAVGLLLLGYLYEPYWKVWHVPGPVPLPFIGHLHLLAMHGPDVFTVLARKYGPVFRFHMGRQPLVMVADAELCKEVGVKKFKSIPNRSMPSAIANSLINQKGLCFTRGSRWTALRNMIISIYQPSHLASLIPTMQSCIECVSKNLDGQEDITFSDLALGFATDVIGQAAFGTDFGLSKISASSNDDDIDKIATDTSAEAKASSEFIRMHVHATTSLKMDLSGSLSIIIGQLLPFLQEPFRQVLKRIPWTADHEIDHVNLALGGQMDKIVAERAAAMERDQAAPHAQQRKDFLSVVLAARESNKSWRELLTPDYISALTYEHLLAGSATTAFTLSTVLYLVSKHPEVEEKLLREIDGFGPHDHAPTAEDLQTKFPYLDQACMPFFDIGRIYARETCEQVEIGGYALPKGTWVWLAPGVLAKDPKNFPEPEVFRPERFDPNGEEEKRRHPYAFIPFGIGPRACIGQKFSIQEIKLSVIHLYRNYVFRHSPSMESPLEFQYSIVCNFKYGVKLRVIKRHTA

SEQ ID NO: 179120 - protein, 443 aa, Oryza sativa
  Clone ID: PAT_MRT4530_76614C.1.pep
MPPSTGSVPPAASTPAAGDEATAAGRVLLGRYELGGLLGRGASAKVYLARDLLTGRDVAIKSFPNPRHGGGLRGGEEDVLLRPAPIEREAAILPRLRHRHVMRLREILATRKKVHFVLDLAAGGELFSLLDASGRMTEDLARHYFRQLISAVRYCHSRGVYHRDIKPENLLLDDAGDLKVADFGLGAVADGALHHTLCGTPAYVAPEILSRKGYNPAKVDIWSCGVVLFVLAAGYLPFNDASLVNMYRKIYAGKFRCPAWFSPELRCLVRRILDPNPATRIDTEEIITHPWFRQDASHFAMAQLMQHGHDEEAKFKTEFKEDDMARDMTAFDILACSPGSDLSGLFGAEPGKERVFVGEPAAAVLSRVEEAGKKEGYMVTREGKKGTGPVYVKGENGGIVAKVCVFKIADAVSVVEVVKGYGAEAARFWKARLEPAMKPPAAI

SEQ ID NO: 179121 - protein, 96 aa, Oryza sativa
  unsure (1)..(96): unsure at all Xaa locations
  Clone ID: PAT_MRT4530_76615C.1.pep
IGXGLCDRVIVLLNQCWEXQCSNVCYQGSGYPRIIXXFIGWVVLGVLVRGCLYWLCLCFYGKVMKLSLIKVSGEFGGLMVLLYGPLCLYMSFVCLL

SEQ ID NO: 179122 - protein, 147 aa, Oryza sativa
  Clone ID: PAT_MRT4530_76616C.1.pep
MHRLCAWKAGWRTEQRFDDVAWRRRIRWHRGWIRSPHGWIAPDLAGAKLLGRRRREAEAVASSGGQPPVKKAGARGEAGAHGGRGGDRRRWRPALAKATVAHVQSSASDDGGRPTTADDCTTRLGAARGPWWCLTAVVTLPVVGGCQ

SEQ ID NO: 179123 - protein, 261 aa, Oryza sativa
  unsure (1)..(261): unsure at all Xaa locations
  Clone ID: PAT_MRT4530_76617C.1.pep
MAASRCHKKTYTWNEARRRLQHPPHSATIVTASTRLPVFXQRMLGRIVIASPQPSPHWQPPXPPGASPLPSGTTTAPWPLQVASCSHLLSSAXPSVVAGRALHVRHRGLCERRPPPPPVATAASMSAGLCCLQPHLGRLPLLSSAPPRAPAFFTGGCPPLDATASASRRRRPSXACSGQIRRXSTRGGTGSSRGATGSAASTPRRQXPLLRAPSRLPRAETVHRRDLASPPPSRLAARISSGALRRRRGEGEEERGEAATL

SEQ ID NO: 179124 - protein, 57 aa, Oryza sativa
  Clone ID: PAT_MRT4530_76618C.1.pep
RCDTLSTDCQKGQTGLSYIYLHIHSCISLSVLVVKQTGIEIEIPKKKKKTKHHVKYI

SEQ ID NO: 179125 - protein, 95 aa, Oryza sativa
  Clone ID: PAT_MRT4530_76619C.1.pep
SVSFRHQQSKRVLIGMYESACDSRGRLPWPYKLCRTQVSAIITNFTCCDTISSSMPFEGKKEKKIQFLLTSIFPLFSRMHMADFLASSIPFFLSS

SEQ ID NO: 179126 - protein, 280 aa, Oryza sativa
  Clone ID: PAT_MRT4530_7661C.1.pep
MADDMPPAVDDDLQELIAELMEAGPEEEADDRECEEITATALSEATEYLEDPDPPSPEQVDWAEGAVISAQSAADNMASYVLDLRRGLAVFAGTGRPEEAVLRKHVAWADARRAEAVEIASAARRLLEKELRCMAARDHPVIPELAALITAMRVSTKSLVLQDSGGDAVRSRKAGLLASAIKFEDAVVEKMTVLKEKLTRGAAAFAGEEEIVQALQKHAATAEAEIAESQAFSAVLLADANRAASPVVVVHKRPTPETEKEQDQEPPRQRRRTGDSAAQD

SEQ ID NO: 179127 - protein, 50 aa, Oryza sativa
  Clone ID: PAT_MRT4530_76620C.1.pep
GPHHCHPLVTHMRFVWTSHPVWVNGWRPTCVFDVQEKSTSGVCFDPLKCD

SEQ ID NO: 179128 - protein, 120 aa, Oryza sativa
  unsure (1)..(120): unsure at all Xaa locations
  Clone ID: PAT_MRT4530_76621C.1.pep
EREREEERISKGVQVKMEVHIKSISSTFQSPGPIYTKTGVQVAYVLGLERSLYGWKVKKITFSMVLVPYPKVFDTVDNQRRHGAVTAGLKSVFVXEAGSICVATPPNXLFIRTSRKIGNP

SEQ ID NO: 179129 - protein, 253 aa, Oryza sativa
  unsure (1)..(253): unsure at all Xaa locations
  Clone ID: PAT_MRT4530_76622C.1.pep
MATSHLLAAASSTAASSATFRPPLLSLRSPPPSSLRLNRRRHFQVVRAAETDKETKANAPEKAPAGGSSFNQLLGIKGAKQENDIWKIRLQLTKPVTWPPLVWGVLCGAAASGNFHWTVEDVAKSIVCMIMSGPCLTGYTQTINDWYDRDIDAINEPYRPIPSGAISENEVITQIWALLLAGLGLGALLDVWAGHDFPIIFYLAVGGSLLSYIYSAPPLKLKQNGWIGNXALGASYIGLPWWAGQALFGTLTP

SEQ ID NO: 179130 - protein, 77 aa, Oryza sativa
  Clone ID: PAT_MRT4530_76623C.1.pep
MDSIVLLCSSPSLQWPPPPPARRLAPSLSQQSGRQQHGCTAAGGARRDGRTEGQHAGSSARAVPRRRGNADEPTRLG

SEQ ID NO: 179131 - protein, 342 aa, Oryza sativa
  Clone ID: PAT_MRT4530_76624C.1.pep
MSADKPPPPSMGKSLDPQTKIPKLTGSDVNNGNIVPVTVDKLSLEQKKDFEFMMKSAQEQFMKSFAETRRKVYQKYKVKVVAADEVGSSSSQGDKGIADGSGNKVDGLQDGVVEDLGEDNNEPTGGPIQQTPPRQQTVQSIQQQTTQPIQQQMVQLMPTGLRTPDNRLTHQNVTQVVPEHLRQWDDMIADVMREQFGLKPKDTGNLYRHPYLEWFERVPLPNRYKVPDFSKFLGQDNVSTYEHVSRFLAQCGEASAIDALRGLIAPIKEKFSSQEFESLSHLAQKVTLHEQMFAEAKKNIKKINHVYPYMYGSDEEDDSEVAVVEWVRSKKVVPLSRLELTQ

SEQ ID NO: 179132 - protein, 152 aa, Oryza sativa
  unsure (1)..(152): unsure at all Xaa locations
  Clone ID: PAT_MRT4530_76625C.1.pep
VXXMPKLNKXDILKCSNGSSVGIMPELTSLKTGSSLESDMVYNWIDRLTLLDYSYIWYNTLMGMSTIPVLHNLNELGLLCCPGITEAPTLASLSKLWIYRCPDLSVIGSLPSLTTLYLKDPLLKGEVLYSLLNDIDHPRLNCISILCETMMN

SEQ ID NO: 179133 - protein, 52 aa, Oryza sativa
  Clone ID: PAT_MRT4530_76626C.1.pep
DYYINRYRDATRIQDEGMNIRLAGIEPMMRWYDLQAASEDALYQCSIRWARA

SEQ ID NO: 179134 - protein, 476 aa, Oryza sativa
  Clone ID: PAT_MRT4530_76627C.1.pep
MAQQAKEVNTNRSRCGSSISMRMEGDRNGALAMLSISSSSARYGNDHQELASAAAAFRESAGDPRKLSSGMSSRLLPARSMRSTGAGDDGEVAAAPVAGARSLSFSKLFSFRIANAARCSSSLDFDHPLPSDAASSDHISALSIQPAACLLFARFAKNDETTATKTKTKTKAKHASDHMNISRSQSVPMSTLSRFSSKGGGGSKRVADSSSLRIHDGGSVRFRVSVIGASPPDGNADAAAAAGEEEDDAGSVEAEEEALVCRICMVALSEDGASGGGGGTLKLECRCKGELALAHGDCAVKWFSIKGNATWRRLQPRGCSTLPVTLRRVHDRQQLVYEAAAGGGGPPPPQRPLLVGDHGTAALAISLPFACVLGLFSSLTTAKMVSRKYVWIYSAVQYLFIVLFTHLFYRYVRLQAVIAIILSTFAGFGVAICANAILLQIIRWRARRASMSAAQEEEEARRAPTQADLENALPPP

SEQ ID NO: 179135 - protein, 99 aa, Oryza sativa
  Clone ID: PAT_MRT4530_76628C.1.pep
VDQADRVLMIARLPLARSDTGAKGSCDTGAQTSRHAVMTVVYTHPVCYAPAVPNLWESNYMCHCPSSYEFLSLRHSLLVSNVRMWLRVGELAAHEWLTI

SEQ ID NO: 179136 - protein, 535 aa, Oryza sativa
  Clone ID: PAT_MRT4530_76629C.1.pep
MPYGDLSSGQPSQPSRSPEEATTTMMAPSLSTAVSSLLLLLLLAAAISVSSSPPMPEDSIRVISAEKRIDLTSPIVKVFLTLKLENDATAPEASQVLLAFTPTEVEHLAIVKATRAEGKRKKKIYVPLSVKASDLAAAPNGARLYSILLSTPLKPAEVTTLEVFYALTHSLEPFPAEITQSDPQLVYYRDSAVLLSPYHVLEQVTYIKMPSNRVESFTRVDPTSRAGNEVKYGAYNNQLPNSYVPILVHYENNRPFAVVEEFVRKVEISHWGNVQITEQYKLKHGGAQHKGVFSSSLLYGYSFETFLARLEYQSRPSISGVSSFKNLLARLPPRVHSVYYRDEIGNISSSHLRSDSHKSELEIEPRYPLFGGWHCTFTIGYGLPLQDFLFESDDGRRYINLTFGCPLLDTVVDDLTIKVVLPEGSTSPQAVVPFLMEQYLELIAMICMMLITHPHSTALSIEPQTSYSYLDVVGRTTVVLKKRNVVGEHNVPFQVYYEFNPIFMLAEPLMLISAVFLFFVACIAYLHMDLSIGKS

SEQ ID NO: 179137 - protein, 123 aa, Oryza sativa
  unsure (1)..(123): unsure at all Xaa locations
  Clone ID: PAT_MRT4530_7662C.1.pep
MAGLPEVQSWCLPPLLRSALSATARSHAASALCRSAPLAAAPSHDASAGRRSAPLAATRCYFTMAERRKERREQSYSPAQLRLAATTTPAAAASPVARNPLPPHPMPXIGLLPTCRPIYERKV

SEQ ID NO: 179138 - protein, 62 aa, Oryza sativa
  Clone ID: PAT_MRT4530_76630C.1.pep
AGSLDTDFFFSKGKAGFFQPHSGKGTLLFFFQKEWKPFTDSLYLGNKHIVYKIEWNPLTETA

SEQ ID NO: 179139 - protein, 38 aa, Oryza sativa
  Clone ID: PAT_MRT4530_76631C.1.pep
MLELYSRSSSKRGKSRVTRNARTLFSFELKKRKIHVTR

SEQ ID NO: 179140 - protein, 63 aa, Oryza sativa
  Clone ID: PAT_MRT4530_76632C.1.pep
ASTISSVQKELDNIYGKYAPFQFLAYWCELWGFYNKQFGIISDMEPINYRLFTASKLKKSNCQ

SEQ ID NO: 179141 - protein, 83 aa, Oryza sativa
  Clone ID: PAT_MRT4530_76633C.1.pep
MGWPWRLGQDTDQRWGLLRGNLPSSGSTAATNSGKRAAVRVGSDGVIHIGLLSSALPASQDHETASSGSARQNEYRSRYLAMR

SEQ ID NO: 179142 - protein, 217 aa, Oryza sativa
  Clone ID: PAT_MRT4530_76634C.1.pep
SLRRARVAGLAVAVVRTVVTALPQDGPEATAGRPRLSPSDPEVVGTEAECAPRGLSDGERPGDVAPDEEDRPRRKVQRPVYFVSEALRDAETRYLQAQKMLYAILITSRKLRHYFQAHRVTVVTSYPLGQILYNREGTGRVVKWAIELCLAPSRQDESLQALVPSRNRRVSSWRWHVGSGQIYARLHPKAGSDEPQVGFGEHSSTVISRGGHPDKER

SEQ ID NO: 179143 - protein, 303 aa, Oryza sativa
  Clone ID: PAT_MRT4530_76635C.1.pep
MVDKNDRFVTGLTLVMSSADSHVPTSRLLPAEVEGSRPNRQRGACAVSRPAPSSCSGNFRVQRGMDEWVRQAEVWVGQAERWIRQQPPEQVYVAVAVVAVTRGKVKPVHVVDVPGHARLKPKLDEVLPQAAGIVYVVDAQDFLSTMHAAADCYGLTIFSFRRYLYDILTKATVVKKRVPVLIFCNKTDKVTAHSKEFIKKQLEKELNKLRESRNAISSADITDEVKLGNPGEAFNFSQCQNKVTVTEGAGLTGNVSAVEEFIREGTSSFSATTTDGKRHFTRCKGTFYPIGVPENKPWYEGAV

SEQ ID NO: 179144 - protein, 218 aa, Oryza sativa
  unsure (1)..(218): unsure at all Xaa locations
  Clone ID: PAT_MRT4530_76636C.1.pep
MATLLRRSVGPARQLLLRPRPLPLPHAASSTRSFSRYYSRDDVSRYEALSTPVNWGVSIVPEKKAFVVERFGKYVKTLGSGIHVLVPLVDRIAYVHSLKEEAIPIPDQSAITKDNVSIQIDGVLYVKIVDPYLASYGVENPIFAVIQLAQTTMRSELGKITLDKTFEERDTLNEQIVRSINEAATDWGLKCLRYEIRDISPPXGVKVAMEMQAEAERK

SEQ ID NO: 179145 - protein, 256 aa, Oryza sativa
  Clone ID: PAT_MRT4530_76637C.1.pep
MDEWVRQAEVWVGQAERWIRQQPPEQVYVAVAVVAVTVLLLVAVSCLKSSKANTIVLSGLSGSGKTILFYQLRDGSTHQGTVTSMEQNNDTFVLHSELERRGKVKPVHVVDVPGHARLKPKLDEVLPQAAGIVYVVDAQDFLSTMHAAAEYLYDILTKATVVKKRVPVLIFCNKTDKVTAHSKEFIKKQLEKELNKLRESRNAISSADITDEVKLGNPGEAFNFSQCQNKVTVTEGAGLTGNVSAVEEFIREYVKA

SEQ ID NO: 179146 - protein, 289 aa, Oryza sativa
  Clone ID: PAT_MRT4530_76638C.1.pep
MEGQQFAWGREEGGWRKGPWTAQEDKLLVEYVRQHGEGRWNSVAKITGLKRSGKSCRLRWVNYLRPDLKRGKITPQEESVILELHALWGNRWSTIARSLPGRTDNEIKNYWRTHFKKGKPSKNIERARARFLKQRREMQQQSQLMQTGQQQQLGQDDDATSAVVDDNLAEVAPPAATSLTHDGELQIMQEMAPDMDDLLYYHPGDMSPYSYDDLLGSGGGECGAVAASAGAAASTSEGSSEELDGGAATWGSLWNLDDVVHDMMIDCAAGAGCCWGSFPPLQDKGLAFY

SEQ ID NO: 179147 - protein, 405 aa, Oryza sativa
  Clone ID: PAT_MRT4530_76639C.1.pep
MATLLRRSVGPARQLLLRPRPLPLPHAASSTRSFSRYYSRDDVSRSAPQLLLLVLVLVLVLEGWLMCGGGGCRYEALSTPVNWGVSIVPEKKAFVVERFGKYVKTLGSGIHVLVPLVDRIAYVHSLKEEAIPIPDQSAITKDNVSIQIDGVLYVKIVDPYLASYGVENPIFAVIQLAQTTMRSELGKITLDKTFEERDTLNEQIVRSINEAATDWGLKCLRYEIRDISPPRGVKVAMEMQAEAERKKRAQILESEGAMLDQANRAKGEAEAILAKSEATARGIRLVSEAMRTKGSTEAANLRVAEQYMKAFANLAKKSNTILLPSDAGNPSSLIAQSLQIYKHICQTNSLKSGKYLTDALEETEPEEEELDSTDLPSLSSGMPSPDMPDDHDKTFSLQRRNKDKH

SEQ ID NO: 179148 - protein, 183 aa, Oryza sativa
  unsure (1)..(183): unsure at all Xaa locations
  Clone ID: PAT_MRT4530_7663C.1.pep
HASAHASAHASGESWYVMPHQTXGGHACNMDGSCAARSTTPSTAAYGSSXSGLTKGPSSLLNESRRSXASVHSGFAGMPTTDRLMSRVCLSHKQMSTVIILLSXTPAGTWKQCYRVAKLTRTAINYXTPPHILITFTTRHTVSCTCALHKPATARYSRAADRSRRAHAGPSRLYDTDTMYMSS

SEQ ID NO: 179149 - protein, 122 aa, Oryza sativa
  Clone ID: PAT_MRT4530_76640C.1.pep
MHVVSEDSIWHMMEVLCAYGMRSRIWKESKFAAVRPAVTSGAAGIPGRFNQKINTGQTGGYTSVRPADQSRSDRSPSNLRASVPAARRGVAMSRSCSRLASASSARCRRGIRLSQTTWTPAQ

SEQ ID NO: 179150 - protein, 211 aa, Oryza sativa
  Clone ID: PAT_MRT4530_76641C.1.pep
MDSPTTSYSMTSAEGEIQPNQIGTIIVIDNLVYRDHPSLKLRGVPKDVRSHDIERVRNKENSIRHYRRLHVSMVLHQDQLRRVRQMSTRLHRRLYAFSITGERLLDLDKEYGMKKWCDVGGWLSAEDMTSARLVTNRSFLSTTCQFSNLHVGPSSHNISPVMVRMKPGIYLTRTNVPSLGGNTLAPAGDKRLEALVLTGWGEACVRSPVAT

SEQ ID NO: 179151 - protein, 129 aa, Oryza sativa
  Clone ID: PAT_MRT4530_76642C.1.pep
MGRPIPTSTSAGSRRDVGTWLSADDMTIVRPVTNRSFGTNVPSPGANTPAPARDECLEALVLTGWGEACVRPPIHAAQNPQGVGAPHPSGPRRERSDPLGETNRRANTSPSGPTPPEGARPRGRLCVPY

SEQ ID NO: 179152 - protein, 295 aa, Oryza sativa
  unsure (1)..(295): unsure at all Xaa locations
  Clone ID: PAT_MRT4530_76643C.1.pep
SHVPHGRAERTLVAAIGMDIPXRIYHDNTIPYDYAKVQLQVVNKGLESYDLDIQTPDGISVLGDAVDIIVLXAHKDILFGTGNNALSKPLRPPQKQLSNDKVEEHEQPKSTEVASTSAILSIMPAIEPKSKSQQVWNGSXIEPDVYEDPSPAKDNVDAPSVDDYVIDKSEVPKLVKSHNSKSKDNQKVKWMVTAFXGGKKRAKERDVDEKKTGELAGPKYFGTDDCLAVFENGKAFWLDYALEEGPWEMRRLHKWYTDANKKGLMSLAVXTSPDAFMAEEGFLWLNFADLHAVCR

SEQ ID NO: 179153 - protein, 138 aa, Oryza sativa
  Clone ID: PAT_MRT4530_76644C.1.pep
MAHEGKLDLPLRTMEENERKREESEERSINDFANLKKVIEVRIPQVEKKVEELRVSVQTLSDGAWGSSPGDRAGPPLPVRPGALGEILSSRMKPGIYLTGTNVPSPGANTPAPARDECLEALILMGWGEACVRPPVAT

SEQ ID NO: 179154 - protein, 66 aa, Oryza sativa
  Clone ID: PAT_MRT4530_76645C.1.pep
VRPVIDLIKQEARVLIDDLREVTQGAKSKFGTDSKTLLRVLCHRNDSEASHYVKKQFKIPSSAPAT

SEQ ID NO: 179155 - protein, 58 aa, Oryza sativa
  Clone ID: PAT_MRT4530_76646C.1.pep
YLLLPISCLLLPVRASTYLPYGIVGVVLGVGVTPASPRLLARRTARYAFPPFPFTSAV

SEQ ID NO: 179156 - protein, 278 aa, Oryza sativa
  Clone ID: PAT_MRT4530_76647C.1.pep
NLHRQSTVSRPPAYLNGAIFDISPKQQLLRGICPRCRARQPTLTARLVDVLDTDVLWTLRSSTFRRNNRCFGAYVVDPQIFDIPPKQPLLRGLCPQCRARQLTLTARLVDVLDTDVLWTLRSSTFRRNNRCFVAYATVSPRQPTLTVRLVDVLDTELWTLRSSTFRRNNRCFVADGAWGSSPGDRAGPPLPVRPGTQGEILSSLCDVESWLSADDMTGIRPVTSVILVHHVMKPGIYLTRTNVPSLGGNTLAPAGDERLEALVLTGWGEACVRSPVAT

SEQ ID NO: 179157 - protein, 101 aa, Oryza sativa
  Clone ID: PAT_MRT4530_76648C.1.pep
MPPHAITDACADVRPMRCERGGSAHVEAGSRACRRIRAGESCRWPSARARHQMSAWDGRGEPPLASHSSPPPDPRGRAKGAAAFAVDRATCRPSHGRQRRI

SEQ ID NO: 179158 - protein, 84 aa, Oryza sativa
  Clone ID: PAT_MRT4530_76649C.1.pep
MPTRHGSTNLKDDVRIATWRLSVAVTAAWTDLPQVLNVVVVGEAAAQCLVEESGAPGGECRGGGAEKAIGRGAARRWRGGVATA

SEQ ID NO: 179159 - protein, 481 aa, Oryza sativa
  Clone ID: PAT_MRT4530_7664C.1.pep
MEDGDGDEGAAKRTKLSAAAAAAAAGEDRLSALPDDLLVQVLLRIGGTTAAARTSVLSRRWRSLWCLLPELDFVPEADGGSIRAALAAHEPPSLRHLLVAAQDAAPHGMAEWLPVAARRLAGDLLLFNMAPKRDAKDDDDEEGKDGSPFLELPCFGSATKLSLDLGFLPLAVPVSGVFARLTDLSLDSVRFHGPCEFGDAASSRRFPSLKNLNIRNTQGLSNFIIHSDSLLQLDLRSVRGLKQLNVVAPALQVLSVFFCFADTQARSQPVADIAAPQLETLQWEDAFDPSSVEFGEMASLRCLGTYFFLVYGLEDFKNNRDCLRLLKRFRRDAISRLTLTLAFLPKDLCDFEYLMENMTMLPDIVSLNLNVLANGHAIGPSLFHVLRMCTSVRRLKLVTHISLDLEAQAVCSSDCVCDLPPNWKTEELLLKFLHEVEINNLRGTGHEIALVKWLFSWAVVLKDMTINFYHSVPESTAKEMA

SEQ ID NO: 179160 - protein, 109 aa, Oryza sativa
  Clone ID: PAT_MRT4530_76650C.1.pep
FFFQQLWWTKFLPMGREGGLPRTIAMLHHPRSEMGIQHLSLNYLGLHGRFYQPSIQRVLLFILWNKQICLHFYYVYLPTTNNTPLTSLVLEFEFIYGSSLRPSRLFTSK

SEQ ID NO: 179161 - protein, 87 aa, Oryza sativa
  Clone ID: PAT_MRT4530_76651C.1.pep
MATQEKKRRPKNCRSMGVWLCLPAMEAGQQNCQRKCSPSLAPNIDRTGPRMTMLSLKPYKEICTMPIHGGNGWKEATLVQISSFYRD

SEQ ID NO: 179162 - protein, 291 aa, Oryza sativa
  unsure (1)..(291): unsure at all Xaa locations
  Clone ID: PAT_MRT4530_76652C.1.pep
MAEHLASIFGTEKDRVNCPFYFKIGACRHGDRCSRLHNKPSVSPTLLLSNMYLRPDMITPGIDAQGNPIDPEKIQADFEDFYEDIFEELSKYGEIESLHVCDNFADHMIGNVYVQFREEDQAARALQALTGRYYSGRPIIVEFSPVSDFRXEATCRQYEENSCNRGGYCNFMHVKEIGRDLRKRLFGHLHRSRRSHSHGRSRSPSPYHYRRDYDRRSSSRSRDHDDYYRGGSHDYYRGGSRRSSERHRSSYDSDGSRRRHRSRTRSPVRDGSEERRAQIEQWNREREAAQV

SEQ ID NO: 179163 - protein, 632 aa, Oryza sativa
  Clone ID: PAT_MRT4530_76653C.1.pep
MAMPLGGILLLFLVLLAAAVAGGGGGVWAFSSSSSSSSGHGGGVQPLSRVAIHRARVALDASAAVRASPSLLGAQVQGEDTAWVTVDFAAPHASDGDWIGVFSPSNFNASTCPGPSGSDSGPVICSAPIKYQLANYSSDYGKTGKGTLKFQLINQRQDFSFALFTGGLSNPKLIAVSNKIAFANPKAPVYPRLAQGKSWNEMTVTWTSGYDIKEAYPFVEWGMKWSPPTRTAAGTVTFDRESLCGEPARTVGWRDPGFIHTAFLTDLWPNKEYYYKIGHMLPDGKIVWGKFYSFKAPPFPGQKSLQRVVIFGDMGKAERDGSNEYSNYQPGSLNTTDTLIKDLDNIDIVFHIGDITYANGYISQWDQFTQQVEPITARVPYMIASGNHERDWPNSGSFFNGTDSGGECGVLAETMYYTPTENRANYWYKTDYGMFRFCVADSEHDWREGTEQYAFIESCLATVDRKKQPWLVFIAHRVLGYSSGFFYGAGGAFAEPTARQSLQRLWQRHRVDLAFYGHVHNYERTCPVYDGRCASPERSRYSGAVGGTIHAVVGGGGSHLSNFTAEAPPWSVYREMDYGFVKLTAFNYTSLLYEYRRSSDGEVHDSFTVHREYRDVLACVADSCPPTIPPAT

SEQ ID NO: 179164 - protein, 87 aa, Oryza sativa
  Clone ID: PAT_MRT4530_76654C.1.pep
EGNNPTFAAMAAIIVKVNRASPRARARNKTITLIVHNLFISTLQKPPHIFRKLNLNTTIFLKIEQIFHKFITSSEFKKRQKTKAGTV

SEQ ID NO: 179165 - protein, 130 aa, Oryza sativa
  unsure (1)..(130): unsure at all Xaa locations
  Clone ID: PAT_MRT4530_76655C.1.pep
SLILLPFLSIHQRPPPPPPPPRLLLPLXPPPPPAAPASPLRLLPSPSPRSASSVSGGTPERRGDGRAGGGSPPLCPTPPLPLPRPPTGGARSPPFQNGMARPPPLHRWLPQARGRIRRRNNGGGQIHRRC

SEQ ID NO: 179166 - protein, 483 aa, Oryza sativa
  Clone ID: PAT_MRT4530_76656C.1.pep
MPPPRLAHLRRRSSSLLLLHHNHHHHRGGGSAPPHPLLRPPPPPQSHPFQLLTPRAAMASVAQPGVAAGSAEYEEVLGCISSLITQKVRADTGNRGNQWELMAKYLQILELEEPIARLKVVHVAGTKGKDKTGGDIPMPAYFRFLALLAFKIFSDEQVDVAVLEVGLGGKYDATNVVKAPVVCGISSLGYDHMEILGNTLGEIAGEKAGILKKGVPAYTVPQPEEAMSVLKHRASELGVPLQVVQPLDPQQLDDQPLGLHGEHQYMNAGLAVALVNTWLQRQGHFNILHKKHSVTLPDQFIEGLSSACLQGRAQIVPDPEVLSKDSSSLIFYLDGAHSPESMEICAKWFSCVTRKDEQQPGPLDQLHIGTNSRKILLFNCMSVRDPQRLLPCLLATCAQNACVFLLKQSLNGSNSSTASSVFESLPLAIKWLRETAQQNQSTSYQAAATFKIDADTFAFVHFDQVLVTGSLHLVGDVLRLLKE

SEQ ID NO: 179167 - protein, 56 aa, Oryza sativa
  Clone ID: PAT_MRT4530_76657C.1.pep
MTAVLHDDLNRGRKEQACAVTDAARAGVAQREAYAVAELGMGLADSGVNFVWGRRG

SEQ ID NO: 179168 - protein, 123 aa, Oryza sativa
  Clone ID: PAT_MRT4530_76658C.1.pep
MEGGMDLELLPGRRRRLQSRRCMTAFACWPTACSAGAAHPSLWRGCAALQLRPVAGGPSAFLLGAAASHRPAHLHRRWSSLESTSKQMRNYQIEEMDRWGAIVASSSRVVVIPKLRCCAPAPE

SEQ ID NO: 179169 - protein, 221 aa, Oryza sativa
  Clone ID: PAT_MRT4530_76659C.1.pep
GRGSHAMVKVKPTPTPTPTSAAAKSAVAGGGEVSTETPRRSARLQQAAKKKRSRDASLPPAPAPARHRQAGKVLCAPEISVKKTVEGTINDAEIESIVLKLWNFTEEERVPYYNRLNKKRANMALAWYNENNPEDCYEFTSVLLHDVCNFCDGGVCHVHINFKARNVTTNSEELFFAELALINNVFDQYSGYTTTACCIIDGNCLGYVNVLTISRRDWWGS

SEQ ID NO: 179170 - protein, 1447 aa, Oryza sativa
  unsure (1)..(1447): unsure at all Xaa locations
  Clone ID: PAT_MRT4530_7665C.1.pep
MPASPEQAVREVGKRLAQPRLGKDALVKLLKASSVASLVSSCLNRSKSTALPFPVERCFDFRAFELQAESALSELSQSSSLQEALHPLSKSLVQTTLLTHRDKDVKLLVAVCFIEVMRVLAPDPPFSDEIFKEIFRLFISVFADLAETSSPYLPRRILILENVAALRCSVIMLDVGCQDLVLDMVRIFFSAVKQGLQQSVCQAMLSIMTQILNEKVTQPLLDVILRNLVKEDKGASHKLAVDIIQNCAEKLEPVLRTFLSSCIFNKDVPANETRKQHHKIILEMFQCAPQMLFAVIPHLTHELLSDRVDIRLEAVHLIGRLLVLSNLRFAQENQLIFKEFLKRFSDKSAEVRIAAIDAAKVCYMAISSGNEAEDILTSLAGRLLDFDDKVRIRAVAAVCDMAKSNLNSFPAKVSVRKHVMLKLLDLYRDYCKKCSKGIATVNFHYEQIPAQLLTLCFDKDSEIFRPQNMELILAEELFPSSLSPKERAIHWVEFFSYFKPQHIKALHIIFSLKRRLQLEMQAYLSLRAKKEEPSDEIQKKFCASFRNMSVAFADASNVEECLKNLHQLKDNNIFKDLTELSYEGSSFATVQSIRYSISKKVKFGQDFLHGSATSSHLHDLFLKRIGNKHPLYNFCKVLSVKCSHSIFNWEMIYAILEVLFSHRNELTNHVEAACDLLLLVSKVFPSLFQGSEEYLIKLFSEESVLINEKTLEMLAHLAKSGCHLSIDFSDDVYPLLEQKCIEGTRAESKYAVAAIDSLIQSPNDEKFARLCELMSFCYRARRFCEPYISQQTSKILDKMKKVVAALDDNYNVPTLLQSLGLILEHSPSMYKLYDKKIMNFVQDILCSTEIYCLKTLVKSCLPRSTVRDRIEHFLKILLDIILEKFKAITLCENDRPYLKLAAGKSVLQLAALWDSQISPKLFRSVVLMARDSSYTVRKSFICKLHDLIMEHAIPIKYACAFALASTDCSRDVRTESTSPLVMMLRTLIEMDDEHGHNTSSVPILMGIFRAIQMAGDLAEAEDLAECGITHKLHILSRIGLLIVKELDKHCKMSDSPRHFPLPSSYFRVSGSARKTDECCQGDLISDSFVKRILGAHGPVHPDDTKCSDNAERVSTEVAPDKEARSSLSNIVGQNASCHDKGKRNKKQDQTTNHSLEKEKVSSCGSAGTKLSSPASLGLAKEADSIDSISLLENQNRPESRSSTGETRASETDHNYSNRRETVMKDTGTVLVGCRIRLWSARDMCYICGTVETYDQSNGFHKLSNYLCMIVSKIIYENGDKELVRLECQKWEFISDTISTVKDIPNSHPRCXLSREFVGRVQLILKTKGKRCCFLALLLSXDPDEDGDIDDNFVKQPFSNNRTGVAGLKKNSKRALDSSNAQTSSGLTAFNPVDNVRCTRSRKVQLRFAIDKGNTGLLLRFVLDRPLEKVAQPFSIVSKSQSTCFNFE

SEQ ID NO: 179171 - protein, 573 aa, Oryza sativa
  Clone ID: PAT_MRT4530_76660C.1.pep
MASTDTEQQEHAVALLQPEVEEAYTTDGSLGVDGNPALKHRTGGWMACRPILGTEFCYCLAYYGITFNLVTYLTAELHQSNVAAANNVSTWQATCFLTPLAGAVAADSYWGRYRTMVVSCCIGVAGMLMAALSALLPLLIKDTSSMASAQVIILFLGLYMIAFGVGGLRPCLMSFGADQFDDGDTSERISKGSYFNWYIFTMNCASVISTTAMVWVQDHYGWALGLGIPAMVLAVGLSCLVAASRAYRFQTTRGSPLTRVCQVVVAAVRKFNVAPPADMALLYDLSEDASSMKGVQRIEHTADLRFFDKAAVVTASDEEAEGAAPRNPWRLCVVTQVEELKILVRMLPLWACVAFYYTATAQANSTFVEQGMAMDTRVGSFHVPPASLATFQIITTIVLIPLYDRAFVPAARRLTGREKGISDLLRIGGGLAMAALAMAAAALVETRRARAAHAGMEPTSILWQAPQYVLVGVGELLATVGQLDFFYSQAPPAMKTVCTALGFISVAAGEYLSSLVVTAVSWATATGGRPGWIPDDLNEGHLDRFFWMMAGLGCLNLVVFTSCAMRYKSRKAC

SEQ ID NO: 179172 - protein, 75 aa, Oryza sativa
  unsure (1)..(75): unsure at all Xaa locations
  Clone ID: PAT_MRT4530_76661C.1.pep
STKTPRATEQVQTKSKDVVGARQGVVGAGGAGGVGGGVLDGSVLGAGGVCTAARXRGAGGVVGTGGVGRRRLRRR

SEQ ID NO: 179173 - protein, 84 aa, Oryza sativa
  Clone ID: PAT_MRT4530_76662C.1.pep
KNQPGVTTLKFPPFFLLVATSFPSKFQVWAFIFSFQESFSKVVGEQHEVQKTGLIVGPPLCAYLWSSTLLLQLLGLNRPLRLKV

SEQ ID NO: 179174 - protein, 496 aa, Oryza sativa
  Clone ID: PAT_MRT4530_76663C.1.pep
MADEATTTPLLASYKAKPAKAPSIDDAIETYIGATGAGQLFKAILLAFAWAFDAQQVFISVFTDAEPRWHCTAGADPSCSPGAASPCALPPGAWAWDRPAETSVVSEWALKCAGPALVSLPASSFFAGCLAGGFLLTTLADSLLGRRKMLLVSLASMSVAGVLTAFSPNVWAYAALRFVCGFGRSMVGTCALVLSTELVGKRWRDTVSVAGFVCFTVGFLSLPALAYTFREASWRSMYLWTSLPSLGYAILLYFLVQESPRWLLVRGRKHDAIETVRQIAALNGGGGITCSFSMLHALAAIMTASFGVGMVYYGMPLNVGNLGSNLYLSVTYNALAEFPSSVLSWLLMGRINRRSSVVALTAAAGVCSLACVAIPEGTGGRMAAEVLSFFATCTAFNIILMYSIELFPTSVRNSAVGMVRQALVLGGVAAPMLVALGRERSFWSFGVFGLAVGCLGLFAVCLPETRGRSMSDTMEEEEHKEAAAAIGDMDSNADLV

SEQ ID NO: 179175 - protein, 532 aa, Oryza sativa
  Clone ID: PAT_MRT4530_76664C.1.pep
MADEATTTPLLASYKAKPAKAPSIDDAIETYIGATGAGQLFKAILLAFAWAFDAQQVFISVFTDAEPRWHCTAGADPSCSPGAASPCALPPGAWAWDRPAETSVVSEWALKCAGPALVSLPASSFFAGCLAGGFLLTTLADSLLGRRKMLLVSLASMSVAGVLTAFSPNVWAYAALRFVCGFGRSMVGTCALVLSTELVGKRWRDTVSVAGFVCFTVGFLSLPALAYTFREASWRSMYLWTSLPSLGYAILLYFLVQESPRWLLVRGRKHDAIETVRQIAALNGGGGITCSFSMLHACATEREDDAAGGAGGGGGGVFATLRSMWERRWALRRLAAIMTASFGVGMVYYGMPLNVGNLGSNLYLSVTYNALAEFPSSVLSWLLMGRINRRSSVVALTAAAGVCSLACVAIPEGTGGRMAAEVLSFFATCTAFNIILMYSIELFPTSVRNSAVGMVRQALVLGGVAAPMLVALGRERSFWSFGVFGLAVGCLGLFAVCLPETRGRSMSDTMEEEEHKEAAAAIGDMDSNADLV

SEQ ID NO: 179176 - protein, 158 aa, Oryza sativa
  Clone ID: PAT_MRT4530_76665C.1.pep
MMMLEWPMMMMASTDQERQHRSSAARKVNGRWARGLLALLRHFNHCHTYFSRRQFSLQPRSSQSLSRPTDQAQPDPDLDNVALLSCRFIIHSCRVPHRSHHSGVEVSQYTTMPQPDLFSETQIFGLPTHLSLPTSAHHRSAAWHHSHKAAATSNHGRA

SEQ ID NO: 179177 - protein, 99 aa, Oryza sativa
  unsure (1)..(99): unsure at all Xaa locations
  Clone ID: PAT_MRT4530_76666C.1.pep
CSSTSANSRSITRIPTPTPAQPTPSPPTPRRXPRSPLPGSGRRPAPRPXPRPPCAPARRAPRPPPPCTLAPRARPSAGAAAAPPAASGRAPGSPCSASA

SEQ ID NO: 179178 - protein, 63 aa, Oryza sativa
  unsure (1)..(63): unsure at all Xaa locations
  Clone ID: PAT_MRT4530_76667C.1.pep
FVSLPRFXCXXGGXSLSXXLSXFXFXSXLXCLXXAWAXARLLAAXSAAAAALXXSREVAPSLG

SEQ ID NO: 179179 - protein, 1021 aa, Oryza sativa
  Clone ID: PAT_MRT4530_76668C.1.pep
MASSSSSAGSPFSGQAVAEKLTRTNFLLWKAQILPVIRGARMEGYLTGATQAPLAVIDAKDGEATVKASKPAFEMWITADQQVLGFLLSTLSKEILTQVISMESAAQVWKAITEMLSSQSRARALNTRLALATTLKGDLSVSDYISKMKVLADEMAFAGKPLDDEELISYVLAGLDDDYEPVVSSLVGKSEVVSLAECYSQLLSFKSRQKLRHAAAHQASSVNAARRGGGKGGGYTPFNRGGRSGGNNNGRRSNNGGGRGGRGNNNGDRGGKPHPVCHLCGKTGHVVADCWYRYDENFVPENKIAAAASYGVDTNWYVDTGATDHITGELDKLTTREKYNGKDQIYTASGAGMDIKHIGHSVICTPTRNIYLKNILHVPKAKKNLLFAHRLALDNHAFVEVHSRFFAIKDQAKSHQLPYPKSFSVFSHPLELVFSDVWGPAPDSVGGRKYYVSFIDDFSKFTWIYLLKKKSEVLQKFSEFQQLVERLFNRKIIAMQSDWGGEYEKLNAIFTKIGITHHVSCPYAHQQNGSAERKHRHIVEVGLSLLAHASMPLKFWDEAFLTATYLINRTPSKVIQYSTPLERLLNQKPNYSSLRTFGCACWPNLRPYNNRKLQFRSKQCVFLGYSNIHKGFKCLDVATGRVYISRDVVFDENIFPFSQLHSNAGARLRSEILLLPSTLLNPEIASRGMQVNDHMSNAPSGESNIISEHAPEQEAGGSNINAPTDTHDTEDPGAGGSTGFDENTAGSDGPDGSDGFDGSAAGSDPGDGSTEVGSSSSSAVGSPSTGNGGSSGASVNPGPGSASATEPARHGGATGDETHTNQIIPEQVHQPSRPTTRLQRGIRKEKVYTDGTVRGWCLRQFDVQNAFLHGVLEEEVYMRQPPGYEDKTSATQGAAEALLKDLKQEFALKDLGDLHYFLGIEVNKINRSSSTLVSAFSDADWAGSVDDRRSTGATYLSVNPVFHARTKHIEVDYHFVRERVARKQLEIKFISSGDQVADGFTKPISVQQLRDFRNNLNLDKL

SEQ ID NO: 179180 - protein, 101 aa, Oryza sativa
  unsure (1)..(101): unsure at all Xaa locations
  Clone ID: PAT_MRT4530_76669C.1.pep
MTCCGGTCGXRSGCQCSGSCGXCKMSPDVEATATTKTLALSAPSNKASSGGMDMAAQSGENGRCGCNTCKCATSCSGLARCSCNQNLSSSSPGCMRIYRMD

SEQ ID NO: 179181 - protein, 112 aa, Oryza sativa
  Clone ID: PAT_MRT4530_7666C.1.pep
PLPHKGFHGLLQGELTPPPKSRFLFFHPRPGSPPVNSPWGNVWTRILFPVLGGPNLYSGIKNDPAKVSSNPHACMGGHPGLMGPVPQATFLLLGGSSRPFCPLSRGTGPKKS

SEQ ID NO: 179182 - protein, 62 aa, Oryza sativa
  Clone ID: PAT_MRT4530_76670C.1.pep
PGYDTVAPSSSSAVSISAASRGSCSVVCMRDCSQGRLIGLHCCLMNSLQRIMIGCIYGGCWR

SEQ ID NO: 179183 - protein, 87 aa, Oryza sativa
  Clone ID: PAT_MRT4530_76671C.1.pep
SWGRGRRIHPPQSPRRQIRLPRRQRHRQLPSPTSYSLVAFFGADDGRSTCCGAGDIGCSHHQLLPPHHFAGVGGGGGSARHRVGNIG

SEQ ID NO: 179184 - protein, 76 aa, Oryza sativa
  Clone ID: PAT_MRT4530_76672C.1.pep
QNYLPQLHTVTHGCNNSSVVDGILSGIISEPVAHEARPTMDEVFPDRRKAHLQRAASTLSAFCKLIIPYGAWSCVH

SEQ ID NO: 179185 - protein, 96 aa, Oryza sativa
  Clone ID: PAT_MRT4530_76673C.1.pep
PNSSLHYAITQQIEVQRTRSSNNSPYFCFPLIYRLHYSCKMNTSDYRHFGNAELTYLVVTVEGRDLEGFSYGTTTTYKILNGKLCATAMAKLMYNY

SEQ ID NO: 179186 - protein, 564 aa, Oryza sativa
  Clone ID: PAT_MRT4530_76674C.1.pep
MARAAVSTAPLSRVHSPPPLIPRHPHSHSRVGLLHPQRKALTTAAALPPAADLPPLSLPAAAAAAAALAAAVSLSDPERRRRAQAEAAGGGDKEAVRAYFNSTGFERWRKIYGSATDGVNRVQLDIREGHARTVAATLSMLRDSPVPLAGATVCDAGCGTGSLAIPLASQGASVLASDISAAMVSEAQRQAEAAAMAASDTFRMPRFEVRDLESLEGKYDIVVCLDVLIHYPREEAKQMIRHLASLAEKRVLISFAPRTLYFDFLKRVGELFPGPSKATRAYLHSERDIEDALRDAGWRVANRGFISTQFYFAKLFEAVPIAAASQSGTKWSAKISQTNPSHFDRANGVSCRYLLLGSAAALPRPPHEIEISLMFSTARFFLPVRPRPDATISGGRKPYLVAVSARPRRGGSRRNRSWGDGGGDDEDGAADDRIDANFFGDARDEPDPEPEDAAASGRRPSSPAPEQEPAGQLRGSDVLRALERAAAAKEAKRRKRAGARPAARRQDAGERRGGELAAAGAARPIEIRREWATRIRELELRVKQLVDKHHHSPPPVEAKRRSQR

SEQ ID NO: 179187 - protein, 70 aa, Oryza sativa
  Clone ID: PAT_MRT4530_76675C.1.pep
SQDSEGVKPKAQFPPVRGQPKAKNLPPQKFVVKPRAQKTSPPPNHPESKPNVRPVFGGLFKQETFFVDED

SEQ ID NO: 179188 - protein, 73 aa, Oryza sativa
  unsure (1)..(73): unsure at all Xaa locations
  Clone ID: PAT_MRT4530_76676C.1.pep
VGRLSRYRQYDMFGQKSAAKTYGILXFVRNKSRVRHGHILIKSIGTLTNLKGKIFGPALELSRSLRPRVFYIN

SEQ ID NO: 179189 - protein, 125 aa, Oryza sativa
  unsure (1)..(125): unsure at all Xaa locations
  Clone ID: PAT_MRT4530_76677C.1.pep
RSSPPPRASSPDAEALRPTSPAAERTSSRRMPRYGSXCRRPQSTRVPAGRRDTPAKTTCAMVADEQPVSAPCPCASLCFSPVSICMSXLWTTAKAGHGAAPAGGGGVNCRPALGSCLFFHSNHLG

SEQ ID NO: 179190 - protein, 181 aa, Oryza sativa
  unsure (1)..(181): unsure at all Xaa locations
  Clone ID: PAT_MRT4530_76678C.1.pep
VFATDFCPNISHCWHRLNRPTLSDSNSADPDHSRFGILADSRFVSGTISILNSASIYLHLRYLDYQNLLLTRCPAEAVGLGLGGSFANRARGEQVAAGWPAWLSAVVGEAIDGWTLRRADSFEKIDKVRTPAXGKIVALKKVRRPHPGARHPRPHRPPPPPPSRSLVPSSPPRPPRPTAPP

SEQ ID NO: 179191 - protein, 99 aa, Oryza sativa
  Clone ID: PAT_MRT4530_76679C.1.pep
PDYHSHVTTGHLVVIQHSEQLHHHQVYVMLGPSRPDIIGALSLSKPNCKLLVITAGPHHHMLALCDLELLDKDATPFWSPRIRRALQRTKAKLPSNVWV

SEQ ID NO: 179192 - protein, 97 aa, Oryza sativa
  Clone ID: PAT_MRT4530_7667C.1.pep
PPGGGPGEQAPGRGGGPGFPPPGGPPPPAPVGPGPPPVPGAWGRARGPPRFPPRVQGAPPPPGQGLGASPPGGGPPGGFFFFSPAKLGGFFPPQGVG

SEQ ID NO: 179193 - protein, 134 aa, Oryza sativa
  unsure (1)..(134): unsure at all Xaa locations
  Clone ID: PAT_MRT4530_76680C.1.pep
MGEGCMARYTSFVPAGPCQRKAWRAVVPSRSPFAMTGPSLDPPRHHRFPPPLPPPKMXRGEPPPPSXPYLGGREPPVPPPGPSAPQPHQPPSAPPLFVDVLPXPPAQGGKPSTPPPPPXHPPQPPPPPFANSPP

SEQ ID NO: 179194 - protein, 89 aa, Oryza sativa
  Clone ID: PAT_MRT4530_76681C.1.pep
MAEWSGGCGCVAHWIPEIKAFECEKAGHEAIIMPPPRRAREGVGTGTGTAPRAAPPCLAAISAAPRPSTPASSGLAALCPPNHPSNFHV

SEQ ID NO: 179195 - protein, 1304 aa, Oryza sativa
  Clone ID: PAT_MRT4530_76682C.1.pep
MVSVNQYCGKRLIRPFNRRRGSPVFAPPKKGPSPVLRKENPRLPAFFSSPTGQALGPWRETLGGRSPLLRVPSPPPPNPPSPPQEEETAVGRRLRVYWPLDDAWYEGRVEGYDVGSRRHRVRYDDGEEEVVDLASERYEWAAAADEEEVTPQPSRKLRRLRRMSDAATAKSPGAVDGGGGGDETADSAEEEDEDWKNDAAAENDSEEVELDDEEDDEEEVVAVKTRKGKKNNPLSTSASTPKLASGLGSASISGSTLSKKRRKVDAGALDCAKKFSFEPANTTGKVELKVPISCSQREQPLENALTALTGEVAERFAQRQAEKFKFLGEGRKDAKGRRPGNPNYDPRTLSLPSQFLNSLTGGQRQWWEFKSQHMDKVLFFKMGKFYELFEMDAHVGAKELDLQYMKGDKPHCGFPEKNFELNLEKLAKKGYRVLVIEQTETPEQLDLRRKETGVKDKVVRREICAMVTKGTLTEGESLLANPDPSYLFSVAESYQCGSEKDQDGHTIGVCIVDVSTSKFIVGQFQDDAERHGLCSILSEIRPAEIIKPAKMLSPETEKALKSNTRDPLINNLLPSMEFWDAEKTIHEIKQYYCSLDTPGAGAQISSAYLPELLSELIEAGDKTYALSALGGSLFYLRQSLLDEKLLPCAEFERLTCSGLTNPIRKHMILDAAALENLEILENARNGGLSGTLYAQLNHCVTGFGKRLLKRWIARPLYERQAILQRQSAIATFKGSGHECAIQFRKDLSRLPDMERLLARLFSSCDKNGRSSKSVVLYEDASKRLLHQFTAALRGCQQMFQACSSISMLTSTDGSSLLNDLLSLGKGLPHVSSILDHFRDAFDWSEADRNGRIIPHEGCDPQYDAACIAIEEIESSLQKYLKEQRKLLSDSSVKYVDVGKDTYLLEVSENLRGSVPHNYELQSTKKGFYRYWTPEVKELISELSKAEAEKEAKLKCILQNLIQLFVEHHSKWRQLVSVVAELDVLISLAIASDFFEGPTCCPIIKESYGPDDTPTLHARNLGHPTLRSDSLGSGSFVPNDIKMGGPGNASFIVLTGPNMGGKSTLLRQVCLTIILAQIGANVPAESFELSLVDRMFVRMGARDHIMAGQSTFLVELMETASVLSSATKNSLVALDELGRGTSTSDGQAIAASVLEYLVHHVQCLGLFSTHYHRLAAENKDSKVSLCHMACEISKGEGGLEEVTFLYKLTPGSCPKSYGVNVARLAGIPASVLQRANEKSSDFEASYGKRPGITKNKPSCAQEDKFAAIKDLFRVVKAMHHREDHASSLGMLHEVQKRAKVQVIGE

SEQ ID NO: 179196 - protein, 69 aa, Oryza sativa
  Clone ID: PAT_MRT4530_76683C.1.pep
MERHGLMKAATMRLLEEDDDGDQSKCETVKTVPCRQSSKHTNDAKKLTLCCSFLISMGGGGRCRDRDRA

SEQ ID NO: 179197 - protein, 85 aa, Oryza sativa
  Clone ID: PAT_MRT4530_76684C.1.pep
EVIHSRWAMLGALGCVFPEILSKNGVKFGEAVWFKAGPQIFCEGGLDYLGNPNLVLAHRFLTICMIYVLLMEFTEGYHHNGYPFA

SEQ ID NO: 179198 - protein, 78 aa, Oryza sativa
  Clone ID: PAT_MRT4530_76685C.1.pep
FDGPIVKRGQPVTRGHCRSPAMRSRTSPEAVMEEDIMDVVANFLTEMAWSGLSLKLSLISCFLGPLAVLPVGNKAPRR

SEQ ID NO: 179199 - protein, 185 aa, Oryza sativa
  Clone ID: PAT_MRT4530_76686C.1.pep
PPLGGNQEEGGHLTLGPDVPEVYNEKCQELMKEFRLVTLKHVSREQNIEANDLAQGASGYKPMIKDVKVETIDGVLLKCLSTDQAKVAIAKAQHTQRQTRNSGRLGRRPQALDGRHELDTKAFIIQGLLFCVGKKLSKTEYNHHRTGNPTLGPSSSQANPGQPFHILVVGYTDGKTDIVSNPFLA

SEQ ID NO: 179200 - protein, 1825 aa, Oryza sativa
  Clone ID: PAT_MRT4530_76687C.1.pep
MVSPTTAEATRRRCKAAAAAASAAPEKHLNRFVRLIAFIERAGNGIGTLVFTWATVVILGGFSTMVTTREFLSATFLAFLEATRMFSQNSRLEYQFFFRTRGAFRRPRWNRVVLILCMAEIMVYVVEKFQWSPASYSHQHYGPIPAAVARVVIAMVQPTTLICVDNVQTFAKAVVKILFYTQAGEYEPLDIPTSCSWAGERNYSDGTTEDTKKNIMFSLNIFYVIVLIQGALYIVACVLEIFSFILRIILVHQSRFRRPWGMKCINQYYSYIFEQCISGGVLSKMNMELTSFAMDLTDSDSPSNQLDGVRMLHSFLKRKNTKALLLFRLSTSTKTLERSISMLGWTAPEDAEIRLLAAKVVVELARSLQVIAIPGSMQNISSLLDTDNQLRQRSPLLYTYDSQEERQRTIADTGNGQEHLDQDHLLHNNQENSWILGCWELISKCWSIPKEETFIEQDRLPLLGMSILARLANCDPNNCVEIGRARDLIPKIIGYTDGTQPKILKGSSLKLLGRLSNTGGEIGIILRQKMSGHPFLLRNLEEVLDDDIEGWQEHKKLAAEILRNLAINENTRQEIGSIQAIISSLIQAFLAQHPPSNTYSDRSLKITAGQALAMLAMESVNNCSTMLKEAGNAFIRELTVMIQDDKYKYVSASLLQNLCLHAQSKFSSSDLTELSGSLRQVLHGITDTTVATKREVLIGLSSQICHVIPEDFAIELEHDQIKETLVKKLVEALNSNTKPTAQCPRIRRVIVEQVIYMMEINSSYATCFDECQMMQALSMVEATPSKVENYRLFMGNEGLMEYSIPLSNLVARAKEEIMHHYCNVQRINGSGYFRRLLFYLSRASQIRSCSMNWLKVRVRNQTRLHALEVWNKRRKSQKKRELMAGGEHRLQIAAKSDGQGKAAAAAPEKWLNRFVRSVALIERVGNALGTLAFTWATVVLLGGYPTALRSQHDFWYATAIFFLEAARMFSGSNNRHDYQLFFRTRGAFRPLGWNGLIAIVCILDVWVLLALQKKIVMAAVVVYAMIILLALGQNISPEFQPLCNPFRRAISLWSPLAAILLLTPTVQHHSRELVWNTTGSRSIPKITAEINFIPSRFTVAKWTAFFILLIVVLMVTISRLRFPIVIKLVDSALCRKLLVWGRTIQNMCMLAALVMLVLTSDGSFRFVTILSLVSITLMVSSGNFQILAAAMRAEIANFALHRLIMPHNGYREHGEDPDSKTNLVPSLIIFYGMVMAQGILYIVACFLDIFSFIPRRFLIRRAGLRGQLGVEYVNLYYAYAFEKCMGGAVFVPKKISLSNFAINSLNSDSPKNHFYGIQLMHSLLENEMTRVRILDKLITSTKTIDRIISMLGWTSPNNTTVRLYAAKVTAELAKDLQIITVPTALQLVSALLDTNAKLKKGNPLLQVDDEQEERQDPILNTANSQEERPDAIRNPDDDPKQRQEPVEGTDNLPETQTCSAHIHEQNCILRRRWQQISEYWKVPKEHSLTYYDHLPALGMLIIDKLASCGQNNCVEIDRVADLIPKIIGFTSFRGDMTNSEAQQMVLVKSSLKVLQRLTSIGGEIGITLRQKIGHMQVLITRLTKAFLNLDRTSSTNVDCLLTKVAGQELAMLATDNVHNCLVMLKEPEFINKLKHMILIHDEKYIYVAATLLCRMCQHALAKLTESDLKELCETLHEVLERIMNAEGAELEILIGLSSQICKVIPEEFSQELDDEQIKQRFIKRLVDVLNANMNPGAHCPGIRRVILEQSIYMMEGNSHYTSCFNEFRMIEALWMVEEMPSGVENYRIFLGDAGFMEYSTPLFALVDRAKELMGRQCLQGDSRVN

SEQ ID NO: 179201 - protein, 70 aa, Oryza sativa
  Clone ID: PAT_MRT4530_76688C.1.pep
FTNRPLGKLKPEIVLFGAPEWLAPYPKMAAPATLAPCPCHRGTRAVVEVLTGQKGGASHNGVAPHTMAPA

SEQ ID NO: 179202 - protein, 72 aa, Oryza sativa
  Clone ID: PAT_MRT4530_76689C.1.pep
FFFFFFFFFFFSGKGGPICMKKQVLHLFCKSIHPRSSQIVATARTGTTGSPKLKRMILILKCAIMALERRQP

SEQ ID NO: 179203 - protein, 34 aa, Oryza sativa
  unsure (1)..(34): unsure at all Xaa locations
  Clone ID: PAT_MRT4530_7668C.1.pep
MSPLLTKKIINNERNPLNFHIFYHITSXITFPII

SEQ ID NO: 179204 - protein, 1794 aa, Oryza sativa
  Clone ID: PAT_MRT4530_76690C.1.pep
MQRRCLSLYVAVLMLVWLFFAPLSVVAGSLIAIPSALDGSRTSHRRPIENPRFNVTLWEKNEINTRPKASHGFDDGDEVSYTVAMPFIEKLRRRCAVATGGSHRRCDATAIRQFEEDVAPCLLEMLKQYAHASYHYAVVRVTDEVYPLPLDVHCILIRYTRSYTDSSRIRYGNLSHDRDDIYGWKEFYSDKTGSLPYREGSDISESYLEINGPAILVPTDPNTLYIRSTECHGTLRPGLLKPCDQSGFRLKVLSSSGRSPMAKATKPHGEDSGARTAKDGAPWRRLYTLDEGCLPKEGDFAIPTALADLRAGIRPPGPLEAHAQLQAFLQQLSQHHNISNAASSARPEGNTSQGAPSWLPSNQLGPGASPWSQGPQFDFSNAAQAPTVQPQAPTPGFGANQAPNQVAMAWTQPPFNPSLAAPQESAFEAGQLNTVAQPYVQAMTSPFAKAYPQQGAASKAGGEKGLPLSGGIKIRQIPPQFMFPLVPRYSGETDPKEFLSIYESAIEAAHGNENTKAKVQALRKEFDAQQAGSHQQLVRKKVRKDLYCAYHGRSSHTTEQCRNIRQRGNNQDPRPQQGATVEAPREAAQEQAPPVEQRQDNQRRVIQVITRADPPVQQSKRQKKMQLRAVHNITAAGKGAPRYLNQQISFGPEDAEGVLFPHQDPLVISGEVAGFEVRRILVDGGSSADVIFADAYAKMGLPTLALTQSPASLRGFGGEAVQVLGQVQLAVVFGTDENRRKEQILFDVVDIPYNYNAIFGRAILNKFEAISHHNYLKLKMPGPTGVIVVKGLQPSGTSKGDLAEINRAVHNVEAESHDHAKRMPKPAPQGKVIKKQIDDADPTKLVLLGGDLGEEEAENILEVLKNYIDIFAWSPDEMGGVSTDLIMHHLAVKPDAKPRKQKLRKMSADRQEAAKAEVQKLLNAGVIQEIDHSEWLANPVLVRKSNGKWCMCVDFTDLNKVCPKDDFPLPRIDQLVDSTTDCELMSFLDAYSGYHQIHMNPADIPKTVFITPFDTFCHLRMPFGLRNAGATFARLVYKVLYKQLGQNVEAYVDNIVVKSRKAFDHASDLQETFDNLRAAGMKLNPEKCVFGVRASKLLGFLVSERGIEANPEKIDAIQQMKPPSSIREVQKLAGRIAALSRFLSKAAERASLVAVSAALVQETESGQKPVYFVSEAFILWAKCEITGRLSKWAAELSPFDLHFVARKAIKSQVLADFVAEWTPAFAAEPEPVEQPWVMHSDGSWSHKGAGAAAVLSSPGGVPIWYAARLQFDTTNNTAEYEAVLLGLRKGKALGVRRLLIRTDSKLVASHIDKSFEAKEEGMKRYLEAVRSMEKCFAGIMVEHLPRGQIEEADTLAKSAACEGPHSPGIFFEVLYAPSVPTESLDIMAIDLAELGEDQEDWRTPFVKYLNNGWLPEEEAEAKRLQLRAAKYKLVSGQLYRSGVLQPLLRCISFTEGEEMAKEIHQGLCGAHQAARTVASKVFLQGVYWPTVLKVCVERARKCESCQWHSRSQTAPHYELQPIAPVWPFTRWGLDIIVLFPVARNGYKFAIVAIEYFSRWIEAEPLGAITSAVVQKFVWKNIVCCFGVPKEFITDNGKQFDSDKFREMCEGLNLEIRFASVAHAQSNGAAERTNGKILEALKKRLEGAAKGLRTTPARPTKFSPFMLLYCDEAMTPTELGANLPRVMFSGGEDGHEVSLELLEGVRVEALEHMRKYATSTSATYNKKVRPTELLPGHLVLRKKANPVAVGKLESKWEGPYLIKHRSRTGSFHLATLEGEEFDHSWNAASLKLFYV

SEQ ID NO: 179205 - protein, 125 aa, Oryza sativa
  unsure (1)..(125): unsure at all Xaa locations
  Clone ID: PAT_MRT4530_76691C.1.pep
ATLAPCPCHRGTRAVVEVLTGQNGGASHTSAAPHTTAPAWLARPSSVGRPLXNPAGPTTYLLPTPIFAQXQPELSSSSSPPHLPTSNPLHLNSFFAGFFXVEIEEKGRLLHSPLVQAGSGTVWNS

SEQ ID NO: 179206 - protein, 134 aa, Oryza sativa
  unsure (1)..(134): unsure at all Xaa locations
  Clone ID: PAT_MRT4530_76692C.1.pep
MVLFGTPEWLAPYPNIAAPATLAPCPCHRGNRAVVEVLTGQKGGASDIGAAPGTTAPVXLARPSSVPXNPVGPTTFLLPTPIFTXSQPEQRAAVLLPLSPPHLSTSNPLNLKPFFAGFFVEIEEKGRLLHSPLF

SEQ ID NO: 179207 - protein, 336 aa, Oryza sativa
  Clone ID: PAT_MRT4530_76693C.1.pep
RSIESQIISNARKHERMMSLRRKRSSMKHPGECEKFTMPQLAMATNNFAVDRQIGEGRSFGMMMYKGRLPDRREVAIRRASPRRKGDFLRELAILSPLRHDHIVRLLGCCAEDEDCLLVYEYIDNGTLYDHLHGSDGASSLVTTSWKTRIEILVGVSRAIEHLHSHAVPPVIHRDVKLSNILLDSSYAPRLSDFGLAVSCDEVECTAEMPILGTFEYMDPEYLSTGNLTPASDVYSFGVVMLELLTGKKAIHDEKHGAVVATSLVASVLPNMEAGDLMKELDRGPGLKPTPRQLKATEVVARTAVRCVHSQGKERPPMTEVVANLQEALDLLSLDE

SEQ ID NO: 179208 - protein, 136 aa, Oryza sativa
  unsure (1)..(136): unsure at all Xaa locations
  Clone ID: PAT_MRT4530_76694C.1.pep
MVLFGTPEWLAPYPNMAAPATLAPCPCHRGTRAVVEVLTGQNGGASHTGAAPHTTAPAWLARPSSVGRPLXNPVGPTTYLLPTPIFAQXQPELSSSSSPPLSPSHLPTSNPLHLNSFFAGFFXVEIEEKGRLLHSP

SEQ ID NO: 179209 - protein, 210 aa, Oryza sativa
  unsure (1)..(210): unsure at all Xaa locations
  Clone ID: PAT_MRT4530_76695C.1.pep
RPWWGLSGAVSGAELPRHRHRAPSPPPSSFAATQVGLAVDDADNESHLTGXDSATIVLSGHVVRKPRHPRRRRQSGPRLRHRLRPAASASLAKDAHDEVLFAANDRRGDEEQPHRSLRCPQPPSWHGGCSARDSGLHSRLRHHENPKPPPPPPPLAPASVSSPKPESVVVSSGSVLGRGKTASTGVDGKRDGVVWIQFPKIAVAPSRYDE

SEQ ID NO: 179210 - protein, 549 aa, Oryza sativa
  Clone ID: PAT_MRT4530_76696C.1.pep
MGFNGSDHREGARKPYWRCGMRGGASVAGAPILPSQHLHDSPSATVALARRQCGWRRHVGPAFTPEPEPVEQPSIMHSDGTWSHRGAGAAAVLTSPRGVPIRYAARLQFDTTNNTVEYEAVLLGLRKAKALGVRRLLIRTDSKLVASHVDKSFEAKEEGMKRYLEAVRSMEKCFAGITVEHLPRGHNVEADTLAKSAACGGPHSPGIFFEVLYVPSVHTESLDIMAINQAELGEDPDDWRTPFVKYLKNGWLPEEEAEAKRLQLRATKYKLGVYWPTVLKVCVEQARKCESCQRHGRNQTAPQYELQPIALVWPFARWGLDIIGPFPVARNGYKFAIVSIEYFSCWIEAEPLGLNLEIRFASVAHPQSNGAAERTNGKILEVLKKRLEGAAKGKWPDEMLSVLWALRTTPTRPTRFSPFMLLYGDEAMTPTELGANSPRVVFPGGEDGHEVSLELLEGIRIEALEHMRKYAASTSATYNKKVRPTELLPGHLVLRKKANPVAVGKLESKWEGTFLIKHRSRTGSFRLATLEGEEFDHSWNTASLKRFYV

SEQ ID NO: 179211 - protein, 431 aa, Oryza sativa
  Clone ID: PAT_MRT4530_76697C.1.pep
LGRKGAPATLAPPLIPRRQHSWRAPSSVGRPLNPVGPTTFLLPTPIFAKSQPEQQRRSSSPLSPPHLSTSNPLNLKPFFAGFFVEIEEKGGASKTELVREDLEGEGEKKRPLLGNDLWEAGPSKRHCGTDDVDAARVMKRELVQEGLDLSEHLSASVHWSSYGVNPEYPTEVAGQYMNTDDYFDVELSGGHDSVSVEVNRDDVDEEASVEQYDVEFAEDSDDDRPFPPLTNNDKLALEECRAFEKVFRRKPDIPEFRDLTHAHGALLDGGINLDQLPEPFQVDGLRKGLEFPSMVALKLWLQEYAIVHHRPYRVVNSAANRRYTVKCENPRCKWKVHATKRSSGWLRRDNRRLTQPWRRTTRPVIVGLRSRRGGDIGPEGDVFALLLVPPRGSGRTRLGPEGRGTPTPRGFLLRVYGLGEHAYLPSGIGMG

SEQ ID NO: 179212 - protein, 65 aa, Oryza sativa
  Clone ID: PAT_MRT4530_76698C.1.pep
PRNLESLFPLITLFIFHTTSFHDVNWPLIPCRTIDLYTSQQNTSFLTTLKKIITIANSPNHISQN

SEQ ID NO: 179213 - protein, 482 aa, Oryza sativa
  Clone ID: PAT_MRT4530_76699C.1.pep
MATFFTARRRKAELVAPARPTPHEHKPLSDIDSQRGLELYAAGVEFFRRRHHAAAVFSGGDDDNSGDPVGIIRAALAEALVSFYPLAGRIRELPAAGGGGGGGGKLVVECTAEGVVFVEADADVRLQELGHGQPLGPPYPCVEELLCSNDLVGEPDVVVGKPLIFMQVTRFRNNEGFCIGYHYCHSITDAFGMAQLLHTVCRLAGGDDDGESLNDPPVWERDLLAVAPRRSSPRIRHVVEHPAYDPLPVSSAAAKDVVWTTPREQMVTRYFHLGPTEMAALRAHVLSSATVFELVTTVLWRCRAAALGYAAAQRVRVLVMSSARWSWKRNPPLPRGFYGNLLVPQVAEATAGELCGRPLAHAVELVRGRKFAVTDEYMRSMLDMLARRGRPFFNLDWTFVVADAGGLGRSLGVVGRWERAGGGLTPVGQATAASMYSYYERCKIGAGEEAAVVSMCLPAPAMERFVREITGCSNTRSAKSAM

SEQ ID NO: 179214 - protein, 55 aa, Oryza sativa
  Clone ID: PAT_MRT4530_7669C.1.pep
KKQGESDYLTLELNWTGNILRLNPTLMGHKPIIEIEGVPDLYRTMVFWRTRTTGP

SEQ ID NO: 179215 - protein, 597 aa, Oryza sativa
  Clone ID: PAT_MRT4530_766C.1.pep
MARCLARDFGVCLFQLRAQGKVGEDSGKGGAHGISACNLFNGMSSQYEVSKEEILLVMNEKVTKEEALHLIQGLRDAKRRIDEKLDRLLEMFGVKLVVSEDAIFDPYIGISNHPKETHAKCSTVVLNSNNGIVQGVFPLLLGTLDIVSAPGKSTPVMALKTSMEDVKNCPGPHPPIIESRASRCELQSAPWPTNRTGTKVQLMSPWPHPKQMDVIVSNIDLQPMPWPSFNFYLIKGHQDFFDAIGESYHLLAIKELWNYSLLGILLCTRISTKSLQLEIASMLMELVWFQEGEQKWIGVHVFSFVYPEGSLLLVNFMQDVSKNGIISYDIEGIAECTQIRYFASLLLDIAILPTEIMLTVRHWAVHLMLPWPPPHENSIVLLIDVHAFAKLGIANMVEAKEEMKLFVAKLYVLDLSCATPSIGHFGNHGPFQLLVCKIWPQFLLWKIWSSEAEIKLLIVGHPKQYIEDTILVLVEVSLYDLGGNCSFFEAERGVLTGNKHFYGVQLEFLSDKLELRKKHMLKIIDACYESWSTRKWIDVTRKWLHWMLGGGEHASNFSWYLCWTLKVDIKLKKLLQGANKISSKLKNGGDIREAFEQ

SEQ ID NO: 179216 - protein, 343 aa, Oryza sativa
  Clone ID: PAT_MRT4530_76700C.1.pep
MLLHRHRHRLLCCGGGVATAPGRFAGDAIADHQQAAAGAKNAAATSSARQLSWAQVEAMTRGFTSAVVGEGGFSTVYLGRVAGSLAAVKVHRSSERLQRAFRQELDALLRVRHPHIVRLLAFCDQRDEGVLVLEFAPNGNLHEQLHGGGGGGAMPWARRVAVALQVARALEYLHDRCEPQVVHGDVKSSNVLLDAAMGARLCDFGSARAGFSAAVHCPRPRPSALAVLGSPGYVDPHYLRSGVVTKKSDVYSFGVLLLELLTGTQAFRDGMLLTAAVAPKLKGAAAGDVEKLVDERLGCQYNAAEAATVAALAAACIGDNPSLRPSMADVVRTLEKPAQKAGR

SEQ ID NO: 179217 - protein, 43 aa, Oryza sativa
  Clone ID: PAT_MRT4530_76701C.1.pep
SKGRPAPTRGPHTSASQRGRAHGGHGPHGASGARPPRGRPRPA

SEQ ID NO: 179218 - protein, 118 aa, Oryza sativa
  Clone ID: PAT_MRT4530_76702C.1.pep
MSSSEVACTLAALILHDDGIPITSEKIATLVKAANIKVEAYWPGLFAKLLEHRSVDDLILSVGSGGGAAPVAAAAAPAAGGGAAAAPAAEEKKGSYTYNLLEEAKEESDDDMGFSLFD

SEQ ID NO: 179219 - protein, 76 aa, Oryza sativa
  unsure (1)..(76): unsure at all Xaa locations
  Clone ID: PAT_MRT4530_76703C.1.pep
MSELSCKQKLIEGKSTNYPPXLSRSSELPPEPQNRTFFTPNYTNRTNYPPRPNPRWFWSTWRTRGSPRCPRNQEGG

SEQ ID NO: 179220 - protein, 100 aa, Oryza sativa
  Clone ID: PAT_MRT4530_76704C.1.pep
ALRPELIFDTEIRLPINTYINLCPLPIIPYLTPGGQEVTGRNSQCVCTKELRPYAGLDKARALSHCPWTFYDMTAIFISTFPSLTTLSASFAVPRRPIGA

SEQ ID NO: 179221 - protein, 78 aa, Oryza sativa
  unsure (1)..(78): unsure at all Xaa locations
  Clone ID: PAT_MRT4530_76705C.1.pep
NXTTQQQNRETHDXXDDDDDLAGGGGAAAAAAXGGGAXXSXCPPAXAXRRRTTXXXSXXXXRCRXXGGASPTTPRTSP

SEQ ID NO: 179222 - protein, 115 aa, Oryza sativa
  Clone ID: PAT_MRT4530_76706C.1.pep
RVLVLGRSALRRCLWCFYPILCMGLLFVGSVFALSAPKTCLSYLLCNNFYKNLGIRIESCSVYQSVRDRNPGRLGGFGIPYSNRVSPHILCLHIYLILFLEIDNSLLVNEYVILS

SEQ ID NO: 179223 - protein, 251 aa, Oryza sativa
  Clone ID: PAT_MRT4530_76707C.1.pep
MVGRSLAALRRRRDPVVGWRSGWMWPDATGGQDDTAHSRQAPTRRTPLPPAELAAAVCTLQVELLIATVSMALMSHRQLLPATARFTTGDRDEVRRGCACYGVKVRGFYAEDVSDEGRCSRAHDDGNDPDEPRRGDAAAVGAHVVDEARRVGKRLAGPYGRGDKGGHGGAQPRCAPLHESRWSPVWHGAIHGEDVRDAKTASDATAANVARLFALYLPALTYGIHTNLLLRLPFSCIAAANLIPSRLAPTG

SEQ ID NO: 179224 - protein, 300 aa, Oryza sativa
  Clone ID: PAT_MRT4530_76708C.1.pep
MAHLAPLFLLLLLLLLPLHAAATPSAHPAYPNEPPSCAAAVPVPERREAHGGGRILDITHYYREDMPSWESDGGVGQFLWLPASMRNGSRANNSEMRLPTHTGTHVDAPGHVFQPMRNGSCAINSEMRLPTHTGTHVDAPGHVFQHYFDAGFDVDSLDLEVLNGLALLVDVPRDDNITAKMMDSLHIPKGIQLVLFRKLSSCRQLMWKKEFDTSYVGFMEDGAQWLVDNTDIKLVGIDYLSVAAFDDLIPSHLVLLKNRDIILVEGLKLENIMPGIYSLHCLPLRLRGAEGSPIRCILIK

SEQ ID NO: 179225 - protein, 551 aa, Oryza sativa
  Clone ID: PAT_MRT4530_76709C.1.pep
MGGCLSGDVRGGMEAVGGSGGRGAAGTGGGGGGGAGQGGGANEAVDHFFNAAGLRGLYSPLELSFSASKLRNMDAFSKSDPMLVIYIRKDARLEEIGRTEVILNSLEPSWITKATISYQFEIIQPLVFKIYDIDTRYHNTPVKTLNLAQQDFLGEACCNLSEIVTNNHSLTLNLRDSCGHTLLGTVTVHAEESNSSRMAVEMTLHALNLENKDVFSKSDNPLLVECFDFDSSGDHELIGTFQTTITQLENVYNSKSGANFFSHKGQKKLKGQLFVDKFQEKVQHTFLDYISSGFELNFMVAVDFTASNGDPRSPQSLHYIDPSGRPNSYQQAILGVGEVLQFYDNDRRFPAWGFGAKTPQGYISHCFNLNATTNDCEVVGVEGIMSAYTSTLYSVTLAGPTLFGPIINKAAEIASHSLQYGNNKYFVLLIITDGVLTDIQETKDSIVRASDLPLSILIVGVGNADFKQMEILDGDNGKRLESSTGRIATRDIVQFVPMRDVQGGQISVVQSLLEELPGQFLAYMRSRDIKPRAPLQHDNAFSAPPLYPPTK

SEQ ID NO: 179226 - protein, 138 aa, Oryza sativa
  Clone ID: PAT_MRT4530_7670C.1.pep
MTRRRPRDGDDGDDPATAATAPPTRSGHRSPCAARCGKVGDGGGGKVRDDVMGGAGDGATGADGAPDQTCPPPPVRCSLREVASITASASITAAIQNYNAPGLSSTMASYLGEGTALQRMQMHQTKNAYESTEQHIYA

SEQ ID NO: 179227 - protein, 161 aa, Oryza sativa
  unsure (1)..(161): unsure at all Xaa locations
  Clone ID: PAT_MRT4530_76710C.1.pep
GLFNRRRDLTFKKEDYVYLKVTPVRGTKRFQVKGKLAPRYIGPFRIIAHRGEVAYQLELLPSMSGIHDVFYLSXLKKCLRVRKEETPLQLVELQPDLTYREVSIKILEIVEGTTRSKSICFYKVQXNHTEAEAIWEREDDLKAEFPKLFPSXSESRSRDSI

SEQ ID NO: 179228 - protein, 88 aa, Oryza sativa
  Clone ID: PAT_MRT4530_76711C.1.pep
SLMVLLLVMLLLIHPLQMRPFVLRDRLVVLRRRQERLRLVLLLCLGAQVLTSAVGGAAGEAVDTCRERSRLRGPPAPGGSRGRPGCLG

SEQ ID NO: 179229 - protein, 214 aa, Oryza sativa
  unsure (1)..(214): unsure at all Xaa locations
  Clone ID: PAT_MRT4530_76712C.1.pep
TPTPLPTRNHRPRRRVSSPALPPYSLAHPPGGLSFGHPSSPAALWTSRGAVAAEQGLPWGDDESLLLGMASASSSPATSPLGAPPPWRPSGCRGGSGGQARIGTMSPCYSTWHQPHPARPPSLCLSLLRSTVAGVILHRASVLLLTGAAYQHYISELSPSPSRVCTSLYKHIQSPSNLVVGDDLHCIMEERIAIDLDXKCCHHLELNTANESAQ

SEQ ID NO: 179230 - protein, 411 aa, Oryza sativa
  unsure (1)..(411): unsure at all Xaa locations
  Clone ID: PAT_MRT4530_76713C.1.pep
LSPNAIGWEFSSDDDDKFIFEALQLVYDQNMEEPKRGRSVFGHEVIXRLYNDYFSEEPTYLPVYFRRMCVLKSSFFXHIMNVVEAHNDYFVHKRNTDVILGLSCFQKVTAVSRIVRYGIAADTVDKYVRIGDNTVIQSLRRYIXVAVDEVFGDEYMRTPHENDIARLLAIGEXKRGFPGMLGSLDCMHWEWKNCPTAWHNQYKRKEXVPTLVLEVVGSYDRWIWHAFFGLLGTHNNINVLQRSLLFAKLAEGKTPRVNYSINRHDYTIGYYLADGICSSWKTLVKSIXLPQGNKIKYFAKTQESVRKDIEQASGVLQARFVIVHGPVXFWDPLTLCQIMRAXCVISNNIIVEDEHVDGEDLHYDEIREHVDSNXNLRMPCKLRKKIKDKAIHNQLRENLIEHLWHHHGDQY

SEQ ID NO: 179231 - protein, 100 aa, Oryza sativa
  Clone ID: PAT_MRT4530_76714C.1.pep
KKKKGENFFFFEDFIEKPKTGSLPHPPKTSFFRETTMLKRTPYAQAPSHGEGPTAPPQGGPPPKKTNPPCLPLEKTQTHLAGEKPLAGERGPNLCWGGRG

SEQ ID NO: 179232 - protein, 70 aa, Oryza sativa
  Clone ID: PAT_MRT4530_76715C.1.pep
PRRGGGLLFLRVYKLVSALFFPVFFKTKASKGLFLIFFFWEIRGITLGVLFFLGLGPFGGFGLPFFVING

SEQ ID NO: 179233 - protein, 45 aa, Oryza sativa
  Clone ID: PAT_MRT4530_76716C.1.pep
LRSFGSQVLLGADVSSSPSFTHGVSLMARIHRFPQAVLVGPSQKI

SEQ ID NO: 179234 - protein, 346 aa, Oryza sativa
  Clone ID: PAT_MRT4530_76717C.1.pep
MPSSSSRRRRRRGRRRKKKEEEARDWADGLPLDAILAIFHKLGHADILMAADQVCATWRRAARDEPALWRRITVRGTEALSARINRGGLACAAVRRSAGQCEAFCGEYAGDDGFLVYLTEQASCLKSLRLISCLGVSNEGIEEATKEFPLLEELELSFCYNVTHEAYAAIGAACPQLKRFRLSKRSFYDSGGIRWKNNDDAGGISKMHGLRSLQLFANNLTNEGLSTILDNCPNLESLDIRHCFNIDMGADSLRAKCSRIKMLRPPDDSTDDYDFDVYTPRRLPISPGFVRYYSVYSDPEYSMYSDEWTSEEFDDDDDDYSGPSRYEEDLDKYDNALPRCMRTFLK

SEQ ID NO: 179235 - protein, 344 aa, Oryza sativa
  unsure (1)..(344): unsure at all Xaa locations
  Clone ID: PAT_MRT4530_76718C.1.pep
CDLPCSERTAFRTFGDDREPCFWNLRNDESGAAETDGEGTTSAAILGRRRDAAGTGLDDAEARTKTRTGAAATXLDGRGRRTRTAXRRDERHDDRERREDDDGDDRGRRGGDEGSRQRLHGDEDGVEHAXTVPREGTAAPADARAWRKGQPXGDAAEEEGEAGAGDGVPAKPRSSRGGGRRCDVNGGDGDVGRRTGDEQQPAGDGEVVATPLDTGEDASPVLSPRNGGLTEGEEVAARPREKTARPDGARARRERRLEAAGAEKREGRRRGGSSGGLRGKRRASRGGGGGGDAGGGDGAAGRRTVEAAQAAGGGRQRGRERRATGRWRGTTGRLGRGLKRVNGG

SEQ ID NO: 179236 - protein, 119 aa, Oryza sativa
  Clone ID: PAT_MRT4530_76719C.1.pep
MEEARDGGDGYPRLPSRQRAPAVTGDGGCPGLPLLLPHSSPLSSLPTVVEGLGGEGGQRWPSTARIRRHPPSPHADPAATALPCTVLVAAALPRNDEVLESDDDDLNDDGLGGGSGLGF

SEQ ID NO: 179237 - protein, 143 aa, Oryza sativa
  Clone ID: PAT_MRT4530_7671C.1.pep
SRSRTSFFFFFFFFFFFFFGINKIFLLRIYPTNRGSPSVDTGEKTEGAHVSSLYTRAEETPPRAPMGLANNPPARGGNKLQAGVKPPWAPHHLQIGEPPLFTPRGAPKGATPASKKMPPGGTKQRGPPAGTKKTGQRLRSHTG

SEQ ID NO: 179238 - protein, 939 aa, Oryza sativa
  Clone ID: PAT_MRT4530_76720C.1.pep
MAPPIAGNARVFLGRPPLPPAVPPPEPPRGPYPPPRRPPLSPTLPAASSRLCRLDRAPAGRAVASSSVAATSSTPACPPFPAETPGAASPPSPFSFLRAGRLQSPLPPRPCAVRSRRLLPRPRSHLLSLGQPSVSRGKHRRRVLAGVQWRRHHLSVSGRLLFVAGTPTDVAVSSVDVAASPSTPAAPRFRRNAVAAPASPSSLSPASFRPLLPPRRLVAPLHHHLHQHRSGVFHVILVPVQPLPAVLVASSPVPVVVVVVVLSPFPVVVAFVPPSSRSRPSSAFVKRAAATPSSSSSSAPRRQAPCRPRLAFVQRSPPKPSPRRSSPLCPSVSAAPLSSFRRFPKRGLRSLPKPLGAPEGGLAGTADGRRRTRAPMVAGGDLRRDGAAPERGEGRGKRNGWSTAHPGSTTTTETATGVEEGGGAARVDEDGGVPAIGDRNGGVDEVGEDTAKPKEVMPKREEPEGKETGAAISGSINDAGEGMTEKTSSLLSLKPKCGWVVRDNVLVSKVYWHRTRARGDNDSFVPESEKEMLWTTMLETFTLPAGTENIVKQWTLKKMAEQFQSFKGDLYKKYILKGLTPNFDVFPKLRDHWDKFVAYKTGQQGQAMMVRNKENAAKKKYHHHLGSRMRSKRDTEAKIADLEYMVSSYELSMQEEVARKVDERMAAHRFQDPQPYIPPAMVSPSGNHSSCASTGQTPRELHIPFKNLSIKVASGMAIPTDISGTYHCRPIPAGYSRVEVELVEAAYEDLELDYPGVDSDKRRVSCTISSGSAISSCTISSNSSATSSCTISSSSSATSSRTISSGSSASSTSTVSPCTSQDKVEPLVTGEEFGITDFISDTALTVDQLIGDAPIPKAEVAYKFELDKPLVTPEQLQSLPTQMFKFHERYMEMSDKGREMFGARIRNLDLLQGEDVLWIHFKDVFDLYHLDALNVSSIS

SEQ ID NO: 179239 - protein, 109 aa, Oryza sativa
  Clone ID: PAT_MRT4530_76721C.1.pep
AVSHFGKAPGVPPGPPEAQCGLPRKGVLAPPCQEPPLCLPGGGYFLSPTDAFGLVRPFCFCNSPSLVVSSLPRRALLKCVIFFSFFVGSFLPTFVGPSPKKRCFLFPVH

SEQ ID NO: 179240 - protein, 49 aa, Oryza sativa
  Clone ID: PAT_MRT4530_76722C.1.pep
RNRLALTTEIFCLCVWVATTSFLCILQVDCLSLHHNTSSISKYLTPLTF

SEQ ID NO: 179241 - protein, 507 aa, Oryza sativa
  unsure (1)..(507): unsure at all Xaa locations
  Clone ID: PAT_MRT4530_76723C.1.pep
MERPGDEHDDCRTVPLLEPKHAHGEGSNNDKQEEDEEEVGSLGRRVLVESKKLWVVAGPSICARFSTFGVTVISQAFIGHVGATELAGYALVSTVLMRFSGGILLGMASALETLCGQSYGAKQYHMLGIYLQRSWIVLLCCAVLLLPIYLFTTPLLIFLGQDPKIAAMAGTISLWYIPVMISNVGNFTLQMYLQAQSKNMIVTYLAMLNLGLHLFLSWLLTVQFYLGLAGVMGSMVIAYXILVFGQLAFVFFGGCPLTWTGFSFAAFTELGAIVKLSLSSGVMLCVELWYNTILVLLTGYMKNAEIALDALSICLNINGWEMMISIGFLSAKGVRVANELGAGSARRAKFAIFNVVTTSFSIGFMLFVLFLIFRGRLVYIFTESTVVADAVAELSPLLAFSNLLNSIQPVLSGVAVGSGWQSVVAYVNVTSYYLFGIPIGVILGYVLGFQVKGIWIGMLLGTLVQTIVLLFITLRTDWEKQVEIARQRLNRWSMDENGRQQNPGENP

SEQ ID NO: 179242 - protein, 101 aa, Oryza sativa
  unsure (1)..(101): unsure at all Xaa locations
  Clone ID: PAT_MRT4530_76724C.1.pep
ISQATITKLTIVVNPCKNALRATSLHACRSTLEDPRVPSSNSPYSESYYNSLAGVLQRRDWENPGGPQLNXLAAHSPFRSWRNSEEARTDSPSKQCAALMA

SEQ ID NO: 179243 - protein, 34 aa, Oryza sativa
  Clone ID: PAT_MRT4530_76725C.1.pep
MQGIEGPGRWEKDAQEDRRDSKRAPPHRSETQDT

SEQ ID NO: 179244 - protein, 75 aa, Oryza sativa
  unsure (1)..(75): unsure at all Xaa locations
  Clone ID: PAT_MRT4530_76726C.1.pep
RRRNGRRRRRQSHRFPSGFWLESLVVGLVFRPLLRNKQQGPHFIIXFLFFNFPGFPRNPSVMVLMDQVINQFNSL

SEQ ID NO: 179245 - protein, 61 aa, Oryza sativa
  Clone ID: PAT_MRT4530_76727C.1.pep
PYCHCEVVNALDALLTRNKNTSHSVITLATTVWVILECLDYYLLTIACCGLALGMAVQIAW

SEQ ID NO: 179246 - protein, 27 aa, Oryza sativa
  Clone ID: PAT_MRT4530_76728C.1.pep
KSGAHLSEAVGMVFDLSFHKVYLRFVL

SEQ ID NO: 179247 - protein, 85 aa, Oryza sativa
  Clone ID: PAT_MRT4530_76729C.1.pep
MTHNRKNARSCSLGFLAKIERQIDKEEDGGCSVKRSRCYNSDVEASSKLLLGFLRGSSTAPTTAAARLGAGEKALIHHFDRFDLL

SEQ ID NO: 179248 - protein, 49 aa, Oryza sativa
  Clone ID: PAT_MRT4530_7672C.1.pep
AKKETHLGLFICKQKPSSIPNTPKNTYFKQTGVDGHHVTGNIGRPLKRE

SEQ ID NO: 179249 - protein, 613 aa, Oryza sativa
  Clone ID: PAT_MRT4530_76730C.1.pep
MSGPLDRFARPCFEGFTHNDEKKEIRSDADNSEGEKKTKIGSFKKKAINAGNKFRHSLRRRSKKKNEPRGSIEDIRDVQDLQAVDAFRQCLVDEDLLPQQHDDYHTMLRFLKARKFDVEKAKSMWSDMLKWRKEFGADNIEEFDYTEADEVMKYYPQFYHGVDKEGRPIYIELIGKVDANKLMQVTTIERYVKYHVKEFERCFQMRFPACSIAAKRPIDSSTTILDVQGVGLKNFSKAARDLITRLQKIDNDNYPETLRRMYIINAGQGFKMLWSTVKSFLDPKTASKIHVLGSKYQNKLLEIIDENELPEFFGGKCKCEAFGGCKKSDKGPWKDPNIIKRVLNGEANYGRQIVTISSTDGKIIRYAGPQYPTRKGSDGSAESGSEVEDGASPMASRNLITNPLLTPVHEESKLAAHGFTSASPSIIEESIPVVDKVVDDGWGSPRASSSPSRSLPITFDGLWTQVITWLTVLIVSLFAMVRSVPSRMAKRFSSQSTDHDHSYVEYPQEAEYKEEFRPPSPAPSYTEKDVLSSMVRRLGELEEKVQALETKPSEMPFEKEELLNAAVRRVDALEAELISTKKALYEALMRQDELLAYIDKQDMIKFRKKKFCF

SEQ ID NO: 179250 - protein, 128 aa, Oryza sativa
  Clone ID: PAT_MRT4530_76731C.1.pep
MAGKAATATAAEAAARVYPWREKLAKYKGELTKGVWGYWELGAWKPLGLSARKRARLRKEVLLAGEDWTYDPPRGEMRTKRKGHKCDRISAEKRANTVELMKKMPQMLLDYKKRRWEKKMKEEESGKS

SEQ ID NO: 179251 - protein, 750 aa, Oryza sativa
  Clone ID: PAT_MRT4530_76732C.1.pep
MDPCTGSMNPARARGTGQPLRVYGPGPCTESDRILFVSSRLPRESFPPLKPIAAAAGASLSFWSKIIAQNPRLELLLGRLILESEEGMSGPLDRFARPCLVPCKALLFVILPKRLSHLSVAGFEGFTHNDEKKEIRSDADNSEGEKKTKIGSFKKKAINAGNKFRHSLRRRSKKKNEPRGSIEDIRDVQDLQAVDAFRQCLVDEDLLPQQHDDYHTMLRFLKARKFDVEKAKSMWSDMLKWRKEFGADNIEEFDYTEADEVMKYYPQFYHGVDKEGRPIYIELIGKVDANKLMQVTTIERYVKYHVKEFERCFQMRFPACSIAAKRPIDSSTTILDVQGVGLKNFSKAARDLITRLQKIDNDNYPETLRRMYIINAGQGFKMLWSTVKSFLDPKTASKIHVLGSKYQNKLLEIIDENELPEFFGGKCKCEAFGGCKKSDKGPWKDPNIIKRVLNGEANYGRQIVTISSTDGKIIRYAGPQYPTRKGSDGSAESGSEVEDGASPMASRNLITNPLLTPVHEEASCHASKLAAHGFTSASPSIIEESIPVVDKVVDDGWGSPRASSSPSRSLPITFDGLWTQVITWLTVLIVSLFAMVRSVPSRMAKRFSSQSTDHDHSYVEYPQEAEYKEEFRPPSPAPSYTEKDVLSSMVRRLGELEEKVQALETKPSEMPFEKEELLNAAVRRVDALEAELISTKKVYVKILLPYKKKVMKYFNFHEQALYEALMRQDELLAYIDKQDMIKFRKKKFCF

SEQ ID NO: 179252 - protein, 65 aa, Oryza sativa
  Clone ID: PAT_MRT4530_76733C.1.pep
LHELKRQKTQWKNRLTTTIIHPITRGQETRLRCRTRKNQHLTKSWAKRTSHWRSCCSMLWPKETP

SEQ ID NO: 179253 - protein, 316 aa, Oryza sativa
  Clone ID: PAT_MRT4530_76734C.1.pep
MVTPSPVVAPTLVPVVTLTPLPISLPPSPLLAMAPTRLASPSPLVSTQTKIPFTVVDVAHCASKEILSSSIDGVNLVFNSRQHLGSCSVFSLQNFETFFTLGAVISVHVLMIFDARIYSEATEGGGGGDRQIRYALAGSGGVAADGGEGDGDEDGELRRVVGTDGGGDGNSGPDLAAPEADLRPPKGRSGVGQTRGDGVGDNRVNSRRESTSRRQQRHGARGDGGDSDDSRWLAGGNSGWRSRCGCQRRRRHDCGDRDMFGQKSTAKTYGILVFVRDSGRVRIKSTGTLIHSKASFGPALELSRSPRPHVFCQQKC

SEQ ID NO: 179254 - protein, 110 aa, Oryza sativa
  Clone ID: PAT_MRT4530_76735C.1.pep
MDGVSSSDSNDNHHVMELGGPRRRQRYDRDGFGWWRRLGRSGRSPCMARPAGGGGGGQGGGVELGDDDGWCGGHHGGRSDRSIDLSGVAAINVGFWLLLMICQRRILWPR

SEQ ID NO: 179255 - protein, 54 aa, Oryza sativa
  Clone ID: PAT_MRT4530_76736C.1.pep
ENLGTTAGRYADISRDIYSTQNTKSPSENGKRSNKITTSPGGQADSGSHVAVQV

SEQ ID NO: 179256 - protein, 162 aa, Oryza sativa
  Clone ID: PAT_MRT4530_76737C.1.pep
MTRDFYLLLYCNGSTLNELLVLGGEEKMEERSCDLSHAASVGLPYSYFCQPGSLPLCPALLPAMRQRISRRITAHALHRRIGTSYGSARAKSCDPPQGPLSACSVAAAHLAWEHSYSAAALTSPKIVRNFGWPVATTTTRTAGRDTCTLSAAAGFFPVHARG

SEQ ID NO: 179257 - protein, 97 aa, Oryza sativa
  Clone ID: PAT_MRT4530_76738C.1.pep
YSNSFTLARGVPLYPQDTIPHMLPCPEVPPRHPSKIRGMDSPATPTDFSPLLSVIIAGMTRATTSPAIERSAGLSRAGTALASSIFEWAAKPTLAKT

SEQ ID NO: 179258 - protein, 182 aa, Oryza sativa
  Clone ID: PAT_MRT4530_76739C.1.pep
MARGLAVMSVLLFVLATTTKADMEGRSRPNALGNSLVPTHLHFYFHDKVTSPSPSAVRVVNPPNNTSLTFLGMVVVMDDPLTERPDPASKLVGHAQGMYVSSDQARIGFLQAMNIVLTAGSYNGSVVIVLGSNHISDIIHEMPILGGTGHFRFARGYAQARTYFLDPNGLDAIVEYNVYVFH

SEQ ID NO: 179259 - protein, 59 aa, Oryza sativa
  Clone ID: PAT_MRT4530_7673C.1.pep
LGLKFIGQALLVYYTVLNIRVMVGIVTSRNCRALIDPPPHVLFLSPATPLICIFTFLLC

SEQ ID NO: 179260 - protein, 61 aa, Oryza sativa
  unsure (1)..(61): unsure at all Xaa locations
  Clone ID: PAT_MRT4530_76740C.1.pep
RKLSVVTQGSTKEKCKILCTAIQXLTSLKTLYLNAHGPLDTGTLEWLHSISHSSXPXXSSD

SEQ ID NO: 179261 - protein, 161 aa, Oryza sativa
  Clone ID: PAT_MRT4530_76741C.1.pep
MGSEGSAGVVVVPRNFRLLEELERGEKGIGDGTVSYGMDDADDIYMRSWTGTIIGPPNTVHEGRIYQLKLFCDTDYPDRPPTVRFQTRINMSCVNQETGMVEPSLFPMLGNWQREHTMQDILIGLKKEMSAPQNRRLHQPHDGNEDQRVEQKGLSLRCVIM

SEQ ID NO: 179262 - protein, 290 aa, Oryza sativa
  unsure (1)..(290): unsure at all Xaa locations
  Clone ID: PAT_MRT4530_76742C.1.pep
MLRARPINGVGPPPRVFSAVAREGKARDHDGGRCRSLAGCEGITQPKKLGHLAHGAAWASRSPHPFHLRLRLRLRLRLRFFFSSSDVACGLVLMATVSSSSSYASCSASADDAFYSTCFCGPMVVAPPPPPPPRTAASPEYTPSTPWRRAASPDYTPSTPWRRAASPDHAPSPPWSPSRRAASPDYSPSTPPRRAASPDYSPSTPPRRAASPDYTPSTPWRRAASPDYAPSTPWSPPRRASSXDYSPSTPPRCAASPDYTPSTPPRRAASPDYSPSSPPRRAASPEYTPL

SEQ ID NO: 179263 - protein, 76 aa, Oryza sativa
  Clone ID: PAT_MRT4530_76743C.1.pep
GSHGRCRSPLLGTGPWWPWRAFWGGSANRGPARRGKAVEVAPVVGGDVGEELSLAVVKQKAAPRTRGSSPDLGFGP

SEQ ID NO: 179264 - protein, 404 aa, Oryza sativa
  Clone ID: PAT_MRT4530_76744C.1.pep
MPHGSWLLQTCSPSAALASLAVVTTSLLIIGYASSSFFLGAPAYEYDDVVEAAAAVPRRGPGYPPVLAYYISGGHGDSVRMTRLLKAVYHPRNRYLLHLDAGAGAYERARLAGYARSERAFLEYGNVHVVGKGDPVDGRGPSAVAAVLRGAAVLLRVGAEWDWLVTLGASDYPLVTPDDLLYAFSSVRRGLSFIDHRMDSGGAEAVVVDQNLLQSTNAEISFSSGQRAKPDAFELFRGSPRPILSRDFVEYCVVAPDNLPRTLLLYFSNSLSPMEFYFQTVMANSAQFRNSTVNHNLRHTVAQDGGAPTSQGADGQQASRYDAMVGSGAAFAGAFGDDDDALLQRIDEEVLRRPLDGVTPGEWCVADGEEGTDNECSVGGDIDVVRHGAKGRKLATLVVDLVGA

SEQ ID NO: 179265 - protein, 113 aa, Oryza sativa
  unsure (1)..(113): unsure at all Xaa locations
  Clone ID: PAT_MRT4530_76745C.1.pep
KRPALHGPAQARPALRAGPCRPMGCASRPGTAHQPSGCVGPARRRGWPIVPFLNKSIFCPSWPIVPVERPRHGPVVGPGRHGPDPXRAVPCLGQAKTPCRGPGRRASGLLAIY

SEQ ID NO: 179266 - protein, 256 aa, Oryza sativa
  Clone ID: PAT_MRT4530_76746C.1.pep
MSASMTTDGIAWIIMVVYILAEAFLVSPATSIWAFLSLAVLAAFILFVVRPVALRVIERTPPGKPVEETYVFVFLLVVLLVGFYSDVIGTNSFHGALMLGLAIPDGPPLGTALGEKIEAMVSGLILPLYYAMTGLSTDVWRMHWGRLQVVMFLAWVGKLVGVMVSSLYLEIPLRDAVSLSLFMNSKGIVEVITFNFFLTNKVNLMIPIVARYSNRLMESCLLTSVRLISLQLIGKNTFSILICLSVAITAVLVPVA

SEQ ID NO: 179267 - protein, 97 aa, Oryza sativa
  Clone ID: PAT_MRT4530_76747C.1.pep
MNRRPGCDVVQYLYSALVCFTIFFRFNPHAGVAVWARLAVQGAGVAADEKGSVARARAALAPVVRRDAARLGVSSQAANAWRAVSPPCHAAARLPDS

SEQ ID NO: 179268 - protein, 292 aa, Oryza sativa
  unsure (1)..(292): unsure at all Xaa locations
  Clone ID: PAT_MRT4530_76748C.1.pep
MAADPTTGGGEAESFFRAAPPLRDQDRVAGDLADFVARHSGKSLLPSPPPSLSSDLISFDASRGGYFLKAGYAVIFIYRRLNDKLSCKLLXEESDIQVPESHAAVVKTAIRNYRKAIDEGLLLKLPFTTIFEYLQLLQMVGTAMNCLGRQGMFYLAAAVSDFYVPWESMAKHKIESASGPLNMQLNQVPKMLFILRKQWAPSAFCVSFKLETDPDILLQKAEAALRKYGMNVVVANELANYKDVVVMVTSNGRTTVRRPSKEDDVEEQLIDLLVEMHSEHIMQLNQDVHKLT

SEQ ID NO: 179269 - protein, 90 aa, Oryza sativa
  Clone ID: PAT_MRT4530_76749C.1.pep
MAYGQTGTGKTYTVGRLGNDDPSEGGIMVRALEHILSVMSLETDSVAISFLQGGVCFAFGVERVGWLMLIEVMDPTAENGCWSLLDVSHD

SEQ ID NO: 179270 - protein, 147 aa, Oryza sativa
  Clone ID: PAT_MRT4530_7674C.1.pep
LPSLGRGIPFRPGKARRPPVAAAAAAMKPPRRRYGLLAVVVTLIVLASLQIQFHHLKEDRLTGDRTFATTTTDPVHWRTGAEGLPRGIVHSNSDMYLRPLWDSGANPKNKNDNHNALLAMAVGISQMQNVDIMARKVCLYLIFLLLA

SEQ ID NO: 179271 - protein, 204 aa, Oryza sativa
  Clone ID: PAT_MRT4530_76750C.1.pep
MSSPDKVVARTGRLRQRYDNEYRLVAGCVPYRVKKDEANPRILGDVPGQVEVLMVSTPNRADMVFPKGGWEDDEEVYEAASREAMEEAGVKGIVNRTTLGHWVFKSKSSQNSSSPRGACKGYIFAMEVTEELESWPEQATHGRRWVSPGEAYQLCRYEWMREALTALLERLSMIEPVPSAQELSDQTSMYMMLQASSDSAVALC

SEQ ID NO: 179272 - protein, 49 aa, Oryza sativa
  Clone ID: PAT_MRT4530_76751C.1.pep
IMTTAPRTLELPPRWLCTYLAKHTEANAYSHQQHEELTELHHELSGHIP

SEQ ID NO: 179273 - protein, 130 aa, Oryza sativa
  Clone ID: PAT_MRT4530_76752C.1.pep
MSAADCLLHAGCRWSAAALRAACLPAAAAVTRVMGLGLDFYGGPWTTGTTVGDSSIRVIGRVGEEIGVVEGIDRVRARYPLASYPDGMVFDEKESQMHTTCTNAGDKCHRPRWLPKSPQSLDLPPLAATS

SEQ ID NO: 179274 - protein, 55 aa, Oryza sativa
  Clone ID: PAT_MRT4530_76753C.1.pep
ERTISYLVGYYQLLCVQNILLFIICFDHYFVACNTAPEKSYYFLGKPSNPRAAPR

SEQ ID NO: 179275 - protein, 48 aa, Oryza sativa
  unsure (1)..(48): unsure at all Xaa locations
  Clone ID: PAT_MRT4530_76754C.1.pep
NSPAMPVDMIANAYRISREQARSLKNNRGEELXCLHSRYQQQTYQASQ

SEQ ID NO: 179276 - protein, 95 aa, Oryza sativa
  unsure (1)..(95): unsure at all Xaa locations
  Clone ID: PAT_MRT4530_76755C.1.pep
LFRPTXAQARTLPREQAXRRSFVRPPNDKRLVGLKPECKFATRECPLGTFFLCFILKRMXASPMDXRRGVGPGGPWNCGHGCGGGELGSHGWSLP

SEQ ID NO: 179277 - protein, 689 aa, Oryza sativa
  Clone ID: PAT_MRT4530_76756C.1.pep
MTAMRFKTEKEGFLFYNRYAKEKGFSVRKNYIRRDPITAAVTHRQYQCSREGHRKEVYMEAANRSREPKALTRCGCNALFEIKLDKKKDEVAFLRSHRTISNAQKANILELKEVGLRQHQVMDVMERHHSGFDATGFVSRDLYNYFTRLRKKHILGGDAERVIKYFQWRQKHDMEFFFEYETDEAGRLKRLFWSDPQSRIDYDAFGDVVVFDSTYRVNRYNLPFILFVGVNHHGSTVIFGCAIVADEKVATYEWILKQFLDCMYQKHPRGLITDGDNAMHRAIAAVMPDSEHRLCTWHIEQNMARHLRPDMLSDFRALVHAPYDHEEFERKWVEFKVKHKGCEDNQWLARMYNLRKKWATAYTKVFKKLKLVIAKSMDWEVIDCVEEDNLVKYGEVYTWSDQMERYRRLRSMGTEVFFKCSVSKETTLMVMEMLEKLDLETDECETNNSDLTLCGHVLAQSSRTDIESHDKVIDAYIMLIKDMQCESPRENGTAFLESTAHCQAWKTNGEQIGTRNKQYQDKRAKVTAKYLQHDMIFLPLNRNSTHWYVAVLNGAKEKIQILDSMRMDKSYYDKDKDLNNTIKGIEKFIQYARLEDEVENKWKNTKITNWPFCPMKVPQQSDSWSCGLHTLKFIQHWNGKELSPEFNEMDTTTTFKHKVAANLINSTMNEVIEVQQDIKRLVTEANEGN

SEQ ID NO: 179278 - protein, 631 aa, Oryza sativa
  Clone ID: PAT_MRT4530_76757C.1.pep
MEFFFEYETDEAGRLKRLFWSDPQSRIDYDAFGDVVVFDSTYRFLDCMYQKHPRGLITDGDNAMHRAIAAVMPDSEHRLCTWHIEQNMARHLRPDMLSDFRALVHAPYDHEEFERKWVEFKVKHKGCEDNQWLARMYNLRKKWATAYTKGLFFLGMKSNQRSESLNSKLHRYLDRKMSLVLLVEYYEHCLSRMRYREADLDCKASQSIPFTSNDASLTEKDAARIFAPAVFKKLKLVIAKSMDWEVIDCVEEDNLVKYVISMKGDSEMLQILNCTYMESTMKSINCTCRKMDRECLPCEHMVAIMHHLKLDAIPEACIVRRWTIKAKHMFPSDRYGEVYTWSDQMERYRRLRSMGTEVFFKCSVSKETTLMVMEMLEKLDLETDECETNNSDLTLCGHVLAQSSRTDIESHDKVIDAYIMLIKDMQCESPRENGTAFLESTAHCQAWKTNGEQIGTRNKQYQDKRAKVTAKYLQHDMIFLPLNRNSTHWYVAVLNGAKEKIQILDSMRMDKSYYDKDKDLNNTIKGIEKFIQYARLEDEVENKWKNTKITNWPFCPMKVPQQSDSWSCGLHTLKFIQHWNGKELSPEFNEMDTTTTFKHKVAANLINSTMNEVIEVQQDIKRLVTEANEGN

SEQ ID NO: 179279 - protein, 479 aa, Oryza sativa
  unsure (1)..(479): unsure at all Xaa locations
  Clone ID: PAT_MRT4530_76758C.1.pep
GFLPADEKVATYEWXKQFLDCMYQKHPGGLITDGDNAMRRAIAAVMPDSEHRLCTWHIEQNMARHLRPDMLLDFRALLHAPYNHEEFDRKWVEFKVKHKGCEDNQWLVRMYNLRKKWVTVYTKVFKKLKLVVVKSMDWEVIDCIEEDNLVKYVISMKGDSKMLDAIPEACIVRRWTIKAKHMFPSDRYGEVYTWLDQMERYRRLRSMGTEVFFKCSVSKETTLMVMEMLEKLDLETDESQSLRTDIESRNMVHDPMEIVPKGAPTKRLRGFMEKRARRCGYCRGHGHTVRTCPIFVRGNSTHWYVAVLNGAKEKIQILDSMRMDKSYNDKDKDLNNTIKGIEKFVQYARIEDGAENKWKKTKIINWPLCPMKVPQQSDRGALEGDVMRLQAIPKSESDASRYPVGFHPAQIVVKTEEIKEWLYPNVGLAKIGENAKECDGIGVQVKQRKAIEVQDKNKKFGRLRKKTARNIIFDRDHTA

SEQ ID NO: 179280 - protein, 48 aa, Oryza sativa
  unsure (1)..(48): unsure at all Xaa locations
  Clone ID: PAT_MRT4530_76759C.1.pep
WWQHRRQPRVDPAAAAPSAPSRLPPVVDPATIVALAAAXSSGGGGGGD

SEQ ID NO: 179281 - protein, 362 aa, Oryza sativa
  Clone ID: PAT_MRT4530_7675C.1.pep
MKPPRRRYGLLAVVVTLIVLASLQIQFHHLKEDRLTGDRTFATTTTDPVHWRTGAEGLPRGIVHSNSDMYLRPLWDSGANPKNKNDNHNALLAMAVGISQMQNVDIMARKFLNQNYTVMLFHYDGNVDGWGVHNLEWSDKAIHILARNQTKWWFAKRFLHPDVVAIYGFIFLWDEDLGVDNFDPRRYLDIMVSEGLEITQPALDPDLSTDIHHRITIRNKMMKVHRRIYDNRASMNCSDGSKGPPCTGWVEGMGRAPARAAWRCVWHLIQNDLIHGWGLDMKLGYCAQGDRAEKVGVIDSEYVVHQGIPSLGGPSLSSKTPRRSLDLRTHIRRQSSAELEKFKERWNRAVREDEEWTDPFDT

SEQ ID NO: 179282 - protein, 1541 aa, Oryza sativa
  Clone ID: PAT_MRT4530_76760C.1.pep
MFGPYSGGGGVPLPQMDADTYVRTIAAMPPHPLAPPPDSPRTPHTYVGFLPVFGDLPPLTGAVLQEPVPVPPEQRADQPVAVATENSAPTRPQLCAPYDDEVEATLRAMETNPAERPSPYFLETTQGGRMSALVRASMIAFMGEFSRKNKLADGTLQRAAYFLDRYLSVTPESDDALQLRLVGATAVFLAAKYEDQYTLRKIDASMVAARCGYTSETRHKMVSIMETEMLAALGFNLGGPTAYTFVEHFTRYYGDGEEEKQLKEAAHRVADGTLLTYGFHRYLPSMVAASSIFLARLHELGHEPWSNDLAELTAFSTLISLQLWPNRGFVEHFTRYNSRGEEELRVQRLERDIADQSLMNYGCPRATCRPWRRRPAASIFIARCSLNRPDRSGLWSTELQELTGLQGAVIRKKQAHLVCPVRSSYCAMRGRARSHRRRLAVPRSHRMDQPRTVEPPSSHRRRRLATPRKQSPPPPPPSTKSPRFAAARGRPTCEAVVVVRGDAEADDPMGGDGAGGAIGSVDEGDSVAGGEADGGDPGWLRRVSLSTRASGRLNVSARALPSAGHVRAGVTAASRCSGPLHRRSRRALLDPATAAPDLPPPSRETSLPPLTDTGERHLPRRRHRRSPVDFADNDERTLDCTGIATAGDVVCGEHDHDARDTGELVAALAGLGEDDEHLRGAGRVGSGERTCMGDEMGDNFISLEEQEEYRTMTAMRFKTEKEGFLFYNRYAKEKGFSVRKNYIRRDPITVAVTHRQYQCSREGHRKEVYMEAANRSREPKALTRCGCNALFEIKLDKKKGDWFVVKYVAKHNHPLAKSDEVAFLRSHRTISNAQKANILELKEVGLRQHQVMDVMERHHGGFDATGFVSRDLYNYFTRLRKKHILGGDAERVIKYFQWRQKHDMEFFFEYETDEAGRLKRLFWSDPQSRIDYDAFGDVVVFDSTYRVNRYNLPFIPFVGVNHHGSTIIFGCAIVADEKVATYEWILKQFLDCMYQKHPRALITDGDNAMRRAIAAVMPDSEHWLCTWHIEQNMARHLRPDMLSDFRTLVHAPYDHEEFERKWVEFKVKHKGCEDNQWLVRMYNLRKKWATAYTKGLFFLGMKSNQRSESLNSKLHRYLDRKMSLVLLVEHYEHCLSRMRYREAELDCKASQSIPFTSNDASFIEKDAARIFTPAVFKKLKLVIAKSMDWEVIDCIEEDNLVKYVISMKGDSEMLQILNCTYVESTMKSINCTCRKMDRECLPCEHMVAIMHHLKLDAIPEACIVRRWTIKAKHMFPSDRYGEVYTWSNQMERYHRLRSMGTEVFFKCSVSKETTLMVMEMLEKLDLETDECETKNSDLSLCGHVLAQSLRTDIESHDKVHDPMEIVPKGAPTKRLRGFMEKRVRRCGIAEAPHIIESDDDSLFEKNMVDTIGARLRRPHGRVIDAYIMLIKDMQVKVQESMIFLPLNRNSTHWYVAVLNGAKEKIQILDSMRMEKSYYDKDKDLNNTHWNGKELSPEFNEMDTTTTFKHKVVANLINSTMNEVIEVQQDIKRLVTEANVGN

SEQ ID NO: 179283 - protein, 152 aa, Oryza sativa
  unsure (1)..(152): unsure at all Xaa locations
  Clone ID: PAT_MRT4530_76761C.1.pep
MDLDKSTYTTXALKKLQDDGALPGHGTMQREIGGIEPEPILGRMVAVEDYISCGFLPQPSEFLILVLNFYGLSLLHLNPNSIAFLSIFSYLCEAYIGVEPFLDLFRFYYDLRWMESNRVSGCVGFRLRDGLKSHYIPFQCPSSRSNWRVRWF

SEQ ID NO: 179284 - protein, 92 aa, Oryza sativa
  Clone ID: PAT_MRT4530_76762C.1.pep
MVEGMPVFSPPMCLRFLAMKPMGWCGIRRRWKKLSEGRRDGGSEDGSPVEIDANQAGIEVDRRLGKELEGDNSESVWHEGSKDGEDEDRHDS

SEQ ID NO: 179285 - protein, 291 aa, Oryza sativa
  Clone ID: PAT_MRT4530_76763C.1.pep
MILAFGMASAEKGSCPREAPKDTANTHIYTTIDAIPALFNGFPLLKGVDKPYWFEDTDDDVPPPFPVACAGLLQPPPLSSAGRPLRSDLLRPASCHPRGASSASFLHGGGAAKLVAKSKLSGHLRHPRCNLRPRRRPQYDNEKTATVMCSAPQTQRYYGCRELEDRKAVKIFYCNGNCMARVAMAHIKAAWVMLMHSIHETDHYGRRAIKNSTDVALNRLQLSVLEGSALPEAPKTERCMAALITLIIQTHSNDDRKQTSVFVGATKSTCVLLELHQIQSARFITCKLMII

SEQ ID NO: 179286 - protein, 114 aa, Oryza sativa
  Clone ID: PAT_MRT4530_76764C.1.pep
MLIKDMQVKVQESMIFLPLNRNSTHWYVAVLNGAKEKIQILDSMRMEKSYYDKDKDLNNTIKGIEKFIQYARLEDGVENKWKNTRITNWPFCPMKVPQQSDKSNKQLIFVANYL

SEQ ID NO: 179287 - protein, 463 aa, Oryza sativa
  unsure (1)..(463): unsure at all Xaa locations
  Clone ID: PAT_MRT4530_76765C.1.pep
MDLDKSTSTTASLKKLHDDGTLPGRGTMXREIGGIEPEPILGRMVAVEDYISCGFLPPPSKFLLLVLNFYGLSLLHLNPNSIAFLSIFSYLCEAYIGVEPFLDLFRFYYELRWMESNRVSGCVGFRLWDRLKSRYIPFQCPSSRSKWRARWFYLQIENSDPVLVVPEEQPDKIPEWTAKPALTPSLQSFINIIDNLRTRGLSGYEVAADFISRRIQPLQAPAHPAFDYSGPEDTTRVSPRGLDSDTMNRRVGQVMISAASTASDIPIPLCEKGPAEHEAAINDRVVTSSSLKEGVTKEASDIAAATMSGSNVPKKGRKFSSVLGTYRKAPSPVASDASPPPQRRQRLVTIXELHEREETLRRAARAKPAQGGTGSTSSTSPAATSTDVVLQAEMECILQAGARSVGCEIEEAKAAASSANQRADKLARELAEAREDLLKMRGLVAGNERDVHVENVQQRGHLD

SEQ ID NO: 179288 - protein, 763 aa, Oryza sativa
  Clone ID: PAT_MRT4530_76766C.1.pep
MPPIPSLWIRVFFSWLLLSLPAAAAADFSHCGGCDDGDGGGGIWSTDNILQCQRVSDFLIAMAYFSIPLELLYFATCSDLFPLKWIVLQFGAFIVLCGLTHLITMFTYEPHSFHVVLALTVAKFLTALVSFATAITLLTLIPQLLRVKVRENFLRIKARELDREVGMMKRQEEASWHVRMLTHEIRKSLDRHTILYTTMVELSKTLELQNCAVWMPSESGSEMILTHQLRQMETEDSNSLSIAMDNPDVLEIKATKDAKVLAADSALGIASRGKLEAGPVAAIRMPMLKASNFKGGTPEVMETSYAILVLVLPEDGSLGWGEEELEIVEVVADQVAVALSHAAVLEESQLMREKLAAQHRDLLRAKHETTMATEARNSFQTAMYDGMRRPMHSILGLVSMMQQENMNPEQRLVMDAIVKTSSVASTLMNDVMQTSTVNREYLSLVRRAFNLHSLVKEAISVVRCLTGCKGIDFEFEVDNSLPERVVGDEKRVFHIVLHMVGTLIQRCNAGCLSLYVNTYNEKEERHNQDWMLRRANFSGSYVCVKFEIRIRESRGNLLSSSSSRRLQGPNSTSSEMGLSFNMCKKIVQMMNGNIWSVSDSKGLGETIMLALQFQLQHVTPVSGASSDLFRSAPIPNFNGLQVILVDSDDTNRAVTHKLLEKLGCLVLSVTSGIQCINSFASAESSFQLVVLDLTMRTMDGFDVALAIRKFRGNCWPPLIVALAASTDDTVRDRCQQAGINGLIQKPVTLAALGDELYRVLQNN

SEQ ID NO: 179289 - protein, 247 aa, Oryza sativa
  Clone ID: PAT_MRT4530_76767C.1.pep
MATPGQQLPPGFRFHPTDEELVVQYLRRRALCRPLPAAVIPDVHDATVLDPWDLPGAGDGEAYFFSFRQLAAASGGGGWRRRRAGSGYWKATGAEKPVFLRGFGCGGGGGGGGQHLVGVKTTLLFLRAKPPSRTHWVMHEYRLAAAGAVAVAAAGQTKRGNHSCMAQPGEWVVCRIFLKNNRSSRRRAGDADGETPVTGVHGHRRRQPSPSPSSSSCVTAEVSDGEGEEEVSSGSINGAPSASQREA

SEQ ID NO: 179290 - protein, 145 aa, Oryza sativa
  Clone ID: PAT_MRT4530_76768C.1.pep
MLKRWPPCRPPLDLPSRRPPCSPPGSGRTAADAPPLSLIWGGKGGVGRRPPDPTPPPPPRRRCCRVPPLPTPLPFAGSGERMKRRGGSRIPRGRVAGRPPDPCRDGHHRRIRAGVGHRPPDPAPPPPPSPTPTAAVGRREEGADG

SEQ ID NO: 179291 - protein, 85 aa, Oryza sativa
  Clone ID: PAT_MRT4530_76769C.1.pep
MASPGRHCFAGPHQHDCVAAVCRLPLVRRCVPPSLPADGRAPPPAVVFIAAVIGFAEREGRRGIKRRGRTTAKKIWRGYDDSDLL

SEQ ID NO: 179292 - protein, 251 aa, Oryza sativa
  Clone ID: PAT_MRT4530_7676C.1.pep
MELPWLDLPFTLLTLLLATRLAYDYYGVVAATFTGSFSLQIFLFYCFARWYRHTIAARAAADADGDGGGGAVADEEAAPPVLIPLLEGRGGGGGGAGAASSLANRCFAVVFMVFVPLVIVVFERSQADVVAYALCLANILVMVVWLSPDAAADPASAAKSFLRLSDDEDEGSCSGSGHGAAEDKCCVCLAGMREAQALRDLPRCGHRFHAKCIGKWLTAHPTCPVCRTTAVPPPAPLPASGDHADDAITPV

SEQ ID NO: 179293 - protein, 511 aa, Oryza sativa
  Clone ID: PAT_MRT4530_76770C.1.pep
MAGGGVAALGVKKERAAEYKGRMTLAVGMACLVAAVGGAIFGYDIGISGGVTSMDPFLKKFFPVVFRKKNDDGQNNYCKYDNQGLSAFTSSLYLAGLVSSLAASPVTRNYGRRASIVCGGLSFLAGATLNAAAVNLVMLILGRILLGVGIGFGNQAVPLYLSEMAPAHLRGALNMMFQLATTLGIFTANMINYGTQHIRPWGWRLSLGLAAAPALLMTVGGLLLPETPNSLIERGRVEEGRRVLERIRGTADVDAEFTDMAEASELANSIEHPFRNILEPRNRPQLVMAVCMPAFQILTGINSILFYAPVLFQSMGFGGSASLYSSVLTGAVLFSSTIISISTVDRLGRRKLLISGGIQMIICQVIVAVILGVKFGTDKELTRSYSIAVVVVICLFVLAFGWSWGPLGWTVPSEIFPLETRSAGQSITVAVNLFFTFVIAQAFLSLLCALKFGIFLFFAGWITVMTVFVHVFLPETKGVPIEEMVLLWRKHWFWKKVMPDLPLEDGDSHHK

SEQ ID NO: 179294 - protein, 90 aa, Oryza sativa
  Clone ID: PAT_MRT4530_76771C.1.pep
NKIKFVFRDNHRSKAYYHGRYWTMCKLPMFRCTYATQVLKELEQAEKAYPDALARIIVLALVSQVQLQEFTAIDAAASHHAAGASEAAVI

SEQ ID NO: 179295 - protein, 428 aa, Oryza sativa
  Clone ID: PAT_MRT4530_76772C.1.pep
MKADRLMLSNLDHDLGYLHKFPSDFPMSHDLGLSLFTHAGTMVGSSLRQHRQICSSGNLIVQEAFDRLNKFARAFCYWLSRVSNPKNLRRLMSMEGPSSGACQSHINHLSSRMQNLAVLQFGYLVREEHAVQLLLANFASTTLGRLWNDFQQQHACNVLTLAGAMAIVPPLENISLKTLAESMALGNIKDYVSRPMDKPYLEDKCIKSRSVAVPSTIFQGDAIEPKTGIKFPAFLEDDSSPSTTVLVGMGFKGVKVMRVKNLDLYAFGLYLQPNTISEKLGPKYASVPTINLKDNPDFYDDLLRENLPMRVRLVLHYNGLSIGAVRDVFEKSLGLRLQKMNPNTDYHCLKTFGSYFNEDIPIPAGTKIDFCQTSDGQLITEIDGRQIGAVKSKDLCRALFGMYIGDSPVSLQAKKDIAQNVAGLIGKC

SEQ ID NO: 179296 - protein, 85 aa, Oryza sativa
  unsure (1)..(85): unsure at all Xaa locations
  Clone ID: PAT_MRT4530_76773C.1.pep
FPPSLPPDKICIKSTVFLTNWSLXKTYFETSPYQKLYLEIGRRLSANLFGAEVVHISANGTGADIAPAWRARRDVAGPQRQCIWR

SEQ ID NO: 179297 - protein, 44 aa, Oryza sativa
  Clone ID: PAT_MRT4530_76774C.1.pep
KPNLSLFYLYSLMDFRESVFFFQLTIGHGMDVGLSCYFSIDDQS

SEQ ID NO: 179298 - protein, 55 aa, Oryza sativa
  Clone ID: PAT_MRT4530_76775C.1.pep
MAQPQVYNIPHCPDNRASAYPPYRTSPPAIHALQTASSLSLEVLNLDKVRTCQLV

SEQ ID NO: 179299 - protein, 96 aa, Oryza sativa
  Clone ID: PAT_MRT4530_76776C.1.pep
LPANYIHCELQACTGITMSLLTHGVLTDRTTDVYHAYWTVAIELKGAVGLMHTERAELDWRLSSLIDYELLSSDADPYHNCSMFMTVQLLPFESYS

SEQ ID NO: 179300 - protein, 367 aa, Oryza sativa
  Clone ID: PAT_MRT4530_76777C.1.pep
MAQQLGLLAAVFVSLAVHVALHCPIQPLAPPPARPPAAARFPPNNLLQNLEKLGEGMLSAPEDVYVDDAGGEVFTATRDGWVRRMQANGSWERWGLVGGTGLLGVAPSADGAMLVCDADKGLLKVDENGRVTLLASTVEGSTIRFADAAIEASDGTVYFSDASTRFSFDNWFLDFFEYRFTGRLLKYDPRTGEASVVLDGLGFANGVALPPDEAFVVVCETMRFRCLRVWLKGEKAGEAEIFVDNLPGNPDNIRLGSDGHFWIALLQVRSPWLDLISRWSLTRRVIASFPALVERTKATLKGAVVAQVSLNGEIVRVLGDSEGNVINMVTSVTEFNGDLFLGSLATNFIGKLSLAKVTREQEDAVPS

SEQ ID NO: 179301 - protein, 45 aa, Oryza sativa
  Clone ID: PAT_MRT4530_76778C.1.pep
DAWRTRGRTRGGRVGGRVGQKLSSLSLFRMGSFPPGGGSARIKTL

SEQ ID NO: 179302 - protein, 217 aa, Oryza sativa
  unsure (1)..(217): unsure at all Xaa locations
  Clone ID: PAT_MRT4530_76779C.1.pep
FADAAIEASDGTVYFSDASTRFSFDNWFLDFFEYRFTGRLLKYDPRTGEASVVLDGLGFANGVALPPDEAFVVVCETMRMYHXFRCLRVWLKGEKAGXEIFVDNLPGNPDNIRLGSDGXSPWLDLISRWSLTRRVIASFPALVERTKATLKGAVVAQVSLNGEIVRVLGDSEGNVINMVTSVTEFNGDLFLGSLATNFIGKLSLAKVTREQEDAVPS

SEQ ID NO: 179303 - protein, 185 aa, Oryza sativa
  Clone ID: PAT_MRT4530_7677C.1.pep
MEKGKGLARRWAVELHDASSSSSSHSSIPDPPGFTRSAPDADDAAGARQRKDSETAWKAQKAWEVAQAPFKNLMMMGFMMWMAGSTVHLFSIGITFSALWQPISALRSVGKVFEPFKDPRVDTLAPKLVFIALNLAAMGLGVWKLNTLGLLPTNASDWVFSLAPARRLLIPAFFSLRQSWFDYEL

SEQ ID NO: 179304 - protein, 53 aa, Oryza sativa
  Clone ID: PAT_MRT4530_76780C.1.pep
INHLAIEFSNFRSISACIGLLQLVKLAGRSKLRIKSHQVVLNTWRLCPCRRRG

SEQ ID NO: 179305 - protein, 264 aa, Oryza sativa
  Clone ID: PAT_MRT4530_76781C.1.pep
MPEAEAAAVVTGGGSRAAGPADYERFITLFSPEGRLCQLGECPPPRHAPSTPTKFAAGVCALANDLLLQFRRPPPRAAVLCALADYAFNAVKLAGITSVGVRGDDSVYVLTHRKEDKLHDPTTITNLFAITDRIGLLATGMPGDGRAIAQEARNAAAEFRFKWGYKMSPCMLAQWIADRAQIRTQHAQIRPYGVVSMIFGIDEEKGTPELFTCDPAGQFFAHKATSAGPKEKEVMNFLEERMKSKPSLSSGTTKGVCVTILSKP

SEQ ID NO: 179306 - protein, 44 aa, Oryza sativa
  Clone ID: PAT_MRT4530_76782C.1.pep
PRKTLNKRISIVFDTVTRAQTAVKWCSIKKEKLFLPIWFTTVTF

SEQ ID NO: 179307 - protein, 1585 aa, Oryza sativa
  Clone ID: PAT_MRT4530_76783C.1.pep
MEFYSDLLLGYAGSAPAFGKAVTIRSHPKVGDPVDWLLRGKSKPIKGRLAGADMIHIGLPELGSRWGRQRDRHGDGYPPEADDGWQGWIVEFGAGSGGIAGAESRRGLGCGREGGGGAQTEPDPWKYIGCGWDSKGPATHIEGDILEDEDDVVEVSLDADEANLVGQWTVLARYYSLKTPNQNALFDDMRRAWRLRADMNYKSLRDNLFIVSFSSEGDYKFVKDGGPWLHRGDALLVAEFDGLTSPSQVPLEVVPIWVRIYDLPLVLMTKDRGILYGSKLGHVREVDVEADGRNKHDFFRIRVDLPVNRALKTHIAIKINVQGNEEAFERKINTVKAVQSSGVARKLSFSGAGSASSTSSRHKKVEQWDEAVPPRMEAFDGFELNEKEGDANVDLQLADQTRNMQVSGGGSQDAEGLTKGRKTKQARPAPSGRALKRVRKEATGDTQMEDMEATSSGAAGAMNCLSWNCRGIGNATTVQELCALVKEASSQFVFLCETRQPVDKIKRLRNRLGLRGFAGVSSDGMSGGLALFWHESVHVEILNKNERFIDAYIRLSPNDPLWHATFVYGEPRVENRHKMWSLLNSIKQSSNLSWLVIGDFNEALWQFEHFSRKPRSDAQMQAFRDVLDTCELHDLGISGLPHTYDNRRGGWNNVKVRLDRALADDEWRDLFSQYQVQHLVSPCSNHCPIVLKLHGSVPDQSWSKKKYKNIGRELEKTRKKLSNLLEAGTDKAAIRQTSDYMNELLYREEMLWLQRSRVNWLKEGDRNTKFFHNRVAWRAKKNKITKLRDAAGTFHRSKMVMEQMATQYFKDMFTADPNLDHSPVTRLIQPKVTEEMNNRLCSEFSEDEIANALFQIGPLKAPGTDGFLARFYQRNWGCIKNDIVRAVKEFFHSGIMLEGVNDTAIVLIPKIEQPRDLRDFRPISLCNVIYKVLSKCLVNRLRPFLDELISKNQSAFVPRRMITDNALLAFECFHFIQRNKNPRSAACAYKLDLSKAYDRVDWRFLEQSMYKWGFSHCWVSWVMTCISTVCDKGTRCDPFLFLFVADGLSLLLEEKVEQGAISPIRVCHQAPGISHLLFADDTLLFFKADLSQSQAIKEVFGSYATSTGQLINPTKCSILFGNSLPIASRDAITNCLQIASTEFEDKYLGLPTPGGRMHKGRFQSLRERIWKKILQWGENYLSSGGKEVLIKAVIQAIPVYVMGIFKLPESVCEDLTSLTRNFWWGAEKGKRKTHWKAWKSLTKSKSLGGLGFKDIRLFNQALLARQAWRLIDNPDSLCARVLKAKYYPNGSIVDTSFGGNASPGWQAIEHGLELVKKGIIWRIGNGRSVRVWQDPWLPRDLSRRPITPKNNCRIKWVADLMLDNGMWDANKINQIFLPVDVEIILKLRTSSRDEEDFIAWHPDKLGNFSVRTAYRLAENWAKEEASSSSSDVNIRKAWELLWKCNVPSKVKIFTWRATSNCLPTWDNKKKRNLEISDTCVICGMEKEDTMHALCRCPQAKHLWLAMKESNDLSLRMDDHLLGPSWLFNRLALLPDHEQPMFLMVLWRIWFVHNEIIHGKPSPSIEASQRFLQSYMKSLLEIKQHP

SEQ ID NO: 179308 - protein, 175 aa, Oryza sativa
  Clone ID: PAT_MRT4530_76784C.1.pep
LLWRECAKSSNDVSARLAVIPLVQEARGLDAGPRLVQKLLGFGDHRSADIVTKVAQEELAHVSVGLHWFLKVCQMMGRVPDATFRDLIKEHDVVLKGPFNYPARDEAGIPREWYQEKFKHETPSKLSEALPLGGGKVSPREMLRASRGVIVPRCPILYRPECFFHPNHRIPVLSL

SEQ ID NO: 179309 - protein, 985 aa, Oryza sativa
  Clone ID: PAT_MRT4530_76785C.1.pep
MSSFSKRVPHHVASLLAMMLILQLVQATTLDDLTTTSSETTPAMCLPDQASALLRLKHSFNATAGDYSTTFRSWVPGADCCRWEGVHCDGADGRVTSLDLGGHNLQAGGLDHALFRLTSLKHLNLSGNIFTMSQLPATGFEQLTELTHLDLSDTNIAGKVPAGIGRLVSLVYLDLSTSFVIVSYDDENSITQYAVDSIGQLSAPNMETLLTNLTNLEELHMGMVDMSNNGELWCDHIAKYTPKLQVLSLPYCSLSGPVCASFAAMRSLTTIELHYNLLSGSVPEFLAGFSNLTVLQLSTNKFQGWFPPIIFQHKKLRTIDLSKNPGISGNLPNFSQDSSLENLSVSRTNFTGMIPSSISNLRSLKKLGIGASGFSGTLPSSLGSFLYLDLLEVSGFQIVGSMPSWISNLTSLTVLQFSNCGLSGHVPSSIGNLRELIKLALYNCKFSGKVPPQILNLTHLETLVLHSNNFDGTIELTSFSKLKNLSVLNLSNNKLVVVDGENISSLVSFPNLEFLSLASCSMSTFPNILKHLDKMFSLDISHNQIQGAIPQWAWKTWKGLQFLLLNMSHNNFTSLGSDPLLPLHIEFLDLSFNSIEGPYRYPKKASRNKLSGDIPPSICTAATNLQLFDLSYNNLSGSIPSCLMEDAIELQVLSLKENKLVGNLPDSIKEGCSLEAIDLSGNLIDGKIPRSLVSCRNLEILDVGNNQISDSFPCWMSKLRKLQVLVLKSNKFTGQVMDPSYTVDRNSCAFTQLRIADMASNNFNGTLPEAWFKMLKSMIAMTQNDTLVMENKYYHGQTYQFTASVTYKGSDTTISKILRTLMLIDFSNNAFHGTIPETVGGLVLLHGLNMSHNALTGSIPTQFGRLNQLESLDLSSNELTGGIPKELASLNFLSTLNLSYNMLVGRIPNSYQFSTFSNNSFLGNIGLCGPPLSKQCDNPKEPIVMTYTSEKSTDVVLVLFTALGFGVSYAMTILILWGRCMRKQR

SEQ ID NO: 179310 - protein, 33 aa, Oryza sativa
  Clone ID: PAT_MRT4530_76786C.1.pep
MASSRACYAPASREPEAAAGGGQGVRAAQELER

SEQ ID NO: 179311 - protein, 733 aa, Oryza sativa
  unsure (1)..(733): unsure at all Xaa locations
  Clone ID: PAT_MRT4530_76787C.1.pep
MSGTTSDGKVHDGVLTEWFGQQWWTGREAVLVAAAVLLLPLVLRKRVDSLKFTSAVSILLAVVFMFISLGIAVYALFTGTAKMPRMLPDFSRLSSPFELFTAVPIVVVAWQTKDVVKAVKKRLQNKDPKVQFYALTLLETMMKNCGEYVHLELAEQDVPQEIVHIIQKKSAMAGVPQALKDAARLSYALHLVLVFPLLHFSLRVNVDELLFPGRRPLATDTRRFVALTAVLMAVLYALAIAIPSIWTLFEYSGDAHGIAKTKDKALAATMIALAVITSSIAIASNVMSSISGKVEGGHAAAMHPAGAVVAPAAGAPARAAPRVEKATSHLLMGPDWAVNLEICDIINADVWQTKDVVKAVKKRLQNKDPKVQFYALTLLETMMKNCGEYVQLEVAEQHVLQEMVKIIQKKNDMLVRDKILLLLDSWQEAFGGPGSKYPQYHFAYLEVKAVKDEIITDLVSQCRSNQQKLMQFVSSTGNEQLLKQGLEINDRLQNIISKYDIMASSTHLAVEAPPADNVEAPKEDPAEKPSAPPISTLEEEEEEEDEFTRLAQRKNKSVMTSDDSLSSTGDLALVPIDMESSESSSSVASNALVPVDPALVSSSPQTKEQDMIDLLSLTLCSPTHEASTDSSTQGPNGPQQPAVTDGQHNPSVSYLPRTTPTCWFXSSTYSAPSASYTSPSMAYVPPSASXADMEWFYYNDLIDLKGLSGGNKMGVPTSMGSANGGQPTIGGKK

SEQ ID NO: 179312 - protein, 673 aa, Oryza sativa
  Clone ID: PAT_MRT4530_76788C.1.pep
MHPAGAVVAPAAGAPARAAPRVEKATSHLLMGPDWAVNLEICDIINADVWQTKDVVKAVKKRLQNKDPKVQFYALTLLETMMKNCGEYVQLEVAEQHVLQEMVKIIQKKNDMLVRDKILLLLDSWQEAFGGPGSKYPQYHFAYLEVKRIGAVFPRRPIDAPPIFTPPATHTSQSYGSPRYEAGSLNEIMSSDVETLSLGDLNNIRNVTELLCDMVHALNPSDHMAVKDEIITDLVSQCRSNQQKLMQFVSSTGNEQLLKQGLEINDRLQNIISKYDIMASSTHLAVEAPPADNVEAPKEDPAEKPSAPPISTLEEEEEEEDEFTRLAQRKNKSVMTSDDSLSSTGDLALVPIDMESSESSSSVASNALVPVDPALVSSSPQTKEQDMIDLLSLTLCSPTHEASTDSSTQGPNGPQQPAVTDGQHNPSGVPQYPSNHQSHPINQEYIRQNRNYVAPWAQSGQYYPAPPWAAPPSVNSNPFQSATYQEQPPPVGSVSSTYSAPSASYTSPSMAYVPPSASLPIWNGSTTSNGLSATQAQMNGNQQPPGSSAAASKPYYIPDNLFSDLIDLKGLSGGNKMGVPTSMGSANGGQPTIGGKKTEGVVISEQKEQKLICTGTEGSKSHVSFSSRAERKATTANLQCRHSTLISPLHELAINDQISASINADEEDMCIKM

SEQ ID NO: 179313 - protein, 55 aa, Oryza sativa
  unsure (1)..(55): unsure at all Xaa locations
  Clone ID: PAT_MRT4530_76789C.1.pep
TQCACPPSRPIAPXMATGVLGQHTPVTLDMPPXDDTQQKPVLPGPSAVVVTRLPR

SEQ ID NO: 179314 - protein, 178 aa, Oryza sativa
  Clone ID: PAT_MRT4530_7678C.1.pep
MEKGKGLARRWAVELHDASSSSSSHSSIPDPPGFTRSAPDADDAAGARQRKDSETAWKAQKAWEVAQAPFKNLMMMGFMMWMAGSTVHLFSIGITFSALWQPISALRSVGKVFEPFKDPRVDTLAPKLVFIALNLAAMGLGVWKLNTLGLLPTNASDWVFSLAPAREVEYAGGGIPLH

SEQ ID NO: 179315 - protein, 205 aa, Oryza sativa
  Clone ID: PAT_MRT4530_76790C.1.pep
GRTRSIKPYRIHLHRQIAWQPSAYTLDPVGSNKARDSFRGTGRGSAFSASSDSVLLCLGHGERLTGTQPGAFAFAFAKWDECMRAASWGFRSTERQRLRGIHYMRKALICDAIALELDCVSKRDDRGYKLGVKTVRNLSEFWTYFRKRNLSVGIFRKRKRNWKYFLANGIKNDKGSFRRNWESAENFPGIFSEFSEFFSELPEIL

SEQ ID NO: 179316 - protein, 101 aa, Oryza sativa
  Clone ID: PAT_MRT4530_76791C.1.pep
MRMARTAAEPWASPFFMFSTRHVEPLGGPVSTMPMASSSCHQERSSEHDNGFSKVLISHPPWYQRSPYHANIVVVTSDVDKGPTSSTSTLPPWHVLSITGC

SEQ ID NO: 179317 - protein, 61 aa, Oryza sativa
  Clone ID: PAT_MRT4530_76792C.1.pep
FNPHLHHSSRILHKSGEPVFFAKAHMERITQSPICTPDFLKLNVCTLNGKTYANTNSVIAL

SEQ ID NO: 179318 - protein, 153 aa, Oryza sativa
  unsure (1)..(153): unsure at all Xaa locations
  Clone ID: PAT_MRT4530_76793C.1.pep
CDLLYGTTTLFWDDTWNGHIRSNSYPSLCTHAIXQSLVSGCHLFETHEAYMEFLQLRAELDSLTLSHQQGDNWSFIXGSATYTSKCFYMLNFAFMQPSRPFHWRWKTRCVMKNKVFIWLLFSDRLNTRDMLDRKKCAPLNADLICFLSSLQHR

SEQ ID NO: 179319 - protein, 288 aa, Oryza sativa
  unsure (1)..(288): unsure at all Xaa locations
  Clone ID: PAT_MRT4530_76794C.1.pep
AGVRPTAERARLPAQRALRRAGKKLERGRGGGRRDRPRRREQRAPPPLPIRSHXRSTSFSTHPIFVXLPQRRRVEEARPPGRLHHLLPHRRLPLRVRRQHQQRPRQPLPLTAVLDTGSDLIWTQYDAPCRRCFPQPAPLYASARSVTCANVSCCSPMCQALQSPWSRCSPPDTGCAYYFSYGDGTSTDGILATETFTLGTDAAVRGVASGCGTENLGSIDNSFGLVGMGRGPPSLVSLKKNVLHSSTSSRVVSFLSRPRARLVPSQQQLQQVVRLLPPAAAAGDAATR

SEQ ID NO: 179320 - protein, 358 aa, Oryza sativa
  Clone ID: PAT_MRT4530_76795C.1.pep
MNNHAAGGSTSNGGSGVDGDGGGGGGAARRNTKMPKYSKFTQQELPACKPILTPKWVVSVFFLVGVIFVPVGVVSLLAAQNVVEIVDRYDDACVPANMTDNKLAYIQNPNISKECTRTLTITEDMNQPIFVYYQLDNFYQNHRRYVKSRNDGQLRDAAKANQTSACEPEKTTADGKPIVPCGLIAWSLFNDTYSFTRGNENLTVDKKDISWKSDREHKFGKNVYPSNFQNGLLKGGGTLDPAIPLSEQEDLIVWMRTAALPTFRKLYGRIYVDLKKNDTITVKLSNNYNTYNFGGKKKLVLSTATWLGGKNDFLGFAYVIVGGVCFFLAFAFTLLYLIKPRKLGDHNYLSWNRHPGGR

SEQ ID NO: 179321 - protein, 450 aa, Oryza sativa
  unsure (1)..(450): unsure at all Xaa locations
  Clone ID: PAT_MRT4530_76796C.1.pep
MMTESPRRNILLMNLSLFTGRAFFLPLPVFGTSVHISLTFSRTMLQWLSNALTRPSNFLLFWQLISTFISPRQEDAGVRPTAERARLPAQRALRRAGKKLERGRGGGRRDRPRRREQRAPPPLPIRSHGGXAGERRPRCRQPRRLHSAAQMLSFGALGITTTTSCSACLCTFGDGWYSRSTSFSTHPIFVXLPQRRRVEEARPPGRLHHLLPHRRLPLRVRRQHQQRPRQPLPLTAVLDTGSDLIWTQYDAPCRRCFPQPAPLYASARSVTCANVSCCSPMCQALQSPWSRCSPPDTGCAYYFSYGDGTSTDGILATETFTLGTDAAVRGVASGCGTENLGSIDNSFGLVGMGRGPPSLVSLKKNVLHSSTSSRVVSFLSRPRARPXAPVASSSVPMPKLALAMISAAFQTTPFSMSMQLWFASLLQYSIETLSKPLCKLLQSSYMAIDA

SEQ ID NO: 179322 - protein, 421 aa, Oryza sativa
  unsure (1)..(421): unsure at all Xaa locations
  Clone ID: PAT_MRT4530_76797C.1.pep
AGERRPRCRQPRRLHSAAQMLSFGALGITTTTSCSACLCTFGDGWYSRSTSFSTHPIFVXLPQRRRVEEARPPGRLHHLLPHRRLPLRVRRQHQQRPRQPLPLTAVLDTGSDLIWTQYDAPCRRCFPQPAPLYASARSVTCANVSCCSPMCQALQSPWSRCSPPDTGCAYYFSYGDGTSTDGILATETFTLGTDAAVRGVASGCGTENLGSIDNSFGLVGMGRGPPSLVSLKKNVLHSSTSSRVVSFLSRPRARLVPSQQQLQQVVRLLPPAAAAASTPHSWRGTPTRRVERNSIACMACSLWKTPAPVASSSVPMPKLALAMISAAFQTTPFSMSMQLYPDTTMSLHSPSIFDVVSGWGEAGASRRSRRRGRSRRPPPLPLSRFFPARRSARCAGSRACSAVGRTPTSARLRVRTNKMRR

SEQ ID NO: 179323 - protein, 84 aa, Oryza sativa
  Clone ID: PAT_MRT4530_76798C.1.pep
MGVLKVSSLCFLLIMPLLLTSGVFAGTVRTEGCGDTFFSRTYKSLFCRKGPCREHCDNEGADGGYCIFFYLFVRCICNEKCSSK

SEQ ID NO: 179324 - protein, 107 aa, Oryza sativa
  Clone ID: PAT_MRT4530_76799C.1.pep
SRNQRLPQKSYQFTALGELSLREEERKSLRKKRVAVLLHPCRTPAASGRDPPVSRPPRTPYRRHKPAARSREQRRAQAPARALLLLRPELEAVVVRGGRRRRRRRRW

SEQ ID NO: 179325 - protein, 533 aa, Oryza sativa
  Clone ID: PAT_MRT4530_7679C.1.pep
MADNEKGNKVRSQDISTLSSRVNEAPDTSCVTLVQHLINQNRLLIEILQQHQTPILNPSQIRPQVQLEAVQALTPQVSMPPASRRTHGDVPHVDPKEASNICFMCEEQGHYARERPQQKRKTPMRTEDEVRKMIITSTEWPPPGMTRRQRRNTFRGAPQLTEHLLANGGRVSDSEDSDQVSSDDEDEMERKACSRCGEIGHVASSCATICVHCEEDHPPDRCPTSRITCFFCEGTDHVPKDCQFSFLLTKKMANQPASSNGEKHQGNTNPRQDYSFSLTPVPGQRNRNEKRKCRVREDICCFNCQGMGHFADKCPKPRNIAAGTSVHATPCNQKLAPQRIVIHASRSSPIARVATAPIPMNALPQGVNAQFQPQPPADKTEASICVVPLEVPIQQLRNQVQDEEPELKKGITPKTVPNQGKIDLHITANLHEADIPIVLWSLEQTPYPGNLSEVDSEDRNHEKFWNGSITALPQPSLSQPKGAPWSKSGEEKIPSSTGGQAKQFRVVKFCWKFVKTQRKKSDKKRRPPNLSSC

SEQ ID NO: 179326 - protein, 94 aa, Oryza sativa
  Clone ID: PAT_MRT4530_767C.1.pep
MPTTICATSSAGTAPSRSARKGARSTHDGAKSAAFGRRWRQWGEAGVRRRRAGVLQPLAGDGGRLGSSKNARKEISGPLMKPAHTANTGAAIRM

SEQ ID NO: 179327 - protein, 557 aa, Oryza sativa
  unsure (1)..(557): unsure at all Xaa locations
  Clone ID: PAT_MRT4530_76800C.1.pep
MAKTKLFPALFSLLLHGGAATLPPPRVPAVTVHGCTPPAARLSAGGEKTVTMVVDVEGALLRSSSSRSLFPYFMLVAVEAGSFLRGLLLLLLYPVISLLAGAGGGDVAVRAMAAVAFCGLRESRFRAGRTVLPRWLLDDVGKEAVDAIVTLTRRRSSPAATATVVWASSMPRVMVEPFLREYMAAAEGGGEVVVAAREMKVVWGFYTGVMEDGGEVAAASPEVRRAMEGVDDVVGFSGGSMDLLRSPLVSFCKEVYVVSHEEKSKWRPLPRRREYPRPLVFHDGRLAFLPTPLAAAAMLVWLPFGAALAATRLAVALALPYRHATLLLAATGQSWRLRGSPPPTPTPPPRRHXERRRGQLYVCNHRTLIDPVYVSIALDRPVRAVSYSLSRVSDLLSPIGATVRLARDRAHDGAAMARLLXRGAHVVVCPEGTTCREPYLLRFSPLFAEXADGVVPVALAAEAAAFHGTTAGGWKSMDALCYLANPRMCYTVEFLPAVDASPVREGKAASTELANAVQRRVAEALGYESTMLTRKDKYLMLAGNDGVVRRRGDVGAK

SEQ ID NO: 179328 - protein, 100 aa, Oryza sativa
  Clone ID: PAT_MRT4530_76801C.1.pep
NLANTINFLKGGKYMEKKQRNGNTGATLRNKPPPKTLWEGNFLGEKKTWTLEGTKKGKLKIKTRRSNKGLGGGTSPPFAGKKARKIFQRKKRAGWQTGSG

SEQ ID NO: 179329 - protein, 133 aa, Oryza sativa
  Clone ID: PAT_MRT4530_76802C.1.pep
MAFSPTIHLHHPHCLLLSPTPCLSPPTTHGSPPDRAPAAMTPFVVPPLLSTSSRALPLLRLRMRMHGLGAGGGEGKELACSTLAASPTARSTLPFSSQGRERGNIAMLTKMRLNAFNSGLGITWSILGRPEPD

SEQ ID NO: 179330 - protein, 50 aa, Oryza sativa
  Clone ID: PAT_MRT4530_76803C.1.pep
TDRERKVSNVKKVNQEPPKYCQLIHSVGTPGLTVKASGFDTGGSYTGLRF

SEQ ID NO: 179331 - protein, 139 aa, Oryza sativa
  unsure (1)..(139): unsure at all Xaa locations
  Clone ID: PAT_MRT4530_76804C.1.pep
RSPSSCSTWSYTYTTVVGEAIHRWQGEATVLRDAENPQLFGNGMLVALYGKRFVLGREGAPVKADKMLLDPGXHAMAEGTWYLSDIRTVFVASTPAGNLSAVDMXLWYAHGEKINQAIWQCNDISGGGEPGVPEIQNRA

SEQ ID NO: 179332 - protein, 483 aa, Oryza sativa
  Clone ID: PAT_MRT4530_76805C.1.pep
MRQWFCCNCHFDEEDDHGKERSNAQGNKMDAKQKSSKPPAGQPEPEIAPLTIDVPELSLEDLKQKTDNFGSNALIGEGSYGRVYHATLDDGRQAAVKKLDASENEPNDEFLKQVSQASRLKHENLVEMLGYCVEGNYRILAYEFATMGSLHDVLHGRKGVQGAQPGPVLDWTQRVKIAIEAAKGLEYLHEKVQPSIIHRDIRSSNVLLFEDFKAKIADFNLLNQAPDMAARLHSTRVLGTFGYHAPEVHIPSGSYRIDITRAILCAPKIRTVYSQCLQSNTRGSGWLAALPTRATCMKPQMWRPWHNTVRLTDLNDNGPNSLTMVPCRCCQKTTLLILGVIMPFKLIVISLETSLLFASLSRYAMTGQLTQKSDVYSFGVVLLELLTGRKPVDHTMPRGQQSLVTWATPRLSEDKVKQCVDPRLKSEYPPKGVAKLAAVAALCVQYEAEFRPNMSIVVKALSPLLQQKPAVPAASEPAPATEN

SEQ ID NO: 179333 - protein, 58 aa, Oryza sativa
  unsure (1)..(58): unsure at all Xaa locations
  Clone ID: PAT_MRT4530_76806C.1.pep
LGARVLXSLSWVPHGKLPQSHCYNYEIQLELWRKMIWMFSDLDRSEMYQLLNVVYHFY

SEQ ID NO: 179334 - protein, 80 aa, Oryza sativa
  Clone ID: PAT_MRT4530_76807C.1.pep
IPHRSILRAHGLPPSLVPALNGTRVDPGMKQTWGGSHPSRREIAPGTTTRVRCARSNIFGYRDLRRVKAVCRAFSSFFRG

SEQ ID NO: 179335 - protein, 48 aa, Oryza sativa
  unsure (1)..(48): unsure at all Xaa locations
  Clone ID: PAT_MRT4530_76808C.1.pep
NVLLRVTLMLECYAGTLGXRQAMLGYIEDGRMXGXPLKLVMCATHARN

SEQ ID NO: 179336 - protein, 116 aa, Oryza sativa
  Clone ID: PAT_MRT4530_76809C.1.pep
MDWVCHYYPISGAAIHHHPTRRWIHLSSRVPRRGRDKGGRRGAQATPVGTTHVGGGGASGSVNLVFSVIACYPSCGCLTLPLSSPVTATYVGGGGTNGSHVPIISAITHYPSRGHP

SEQ ID NO: 179337 - protein, 210 aa, Oryza sativa
  unsure (1)..(210): unsure at all Xaa locations
  Clone ID: PAT_MRT4530_7680C.1.pep
LCLLRPFPPLAALRPHRNRARAVALSLRRRCRAPVRRRRRPGPPPTSAPPPSASPHPRRPRPPLRFARRPPERRRPRQPEPHRRLPPLRPPFSSSPSTXGEPWTAASFPPSLPLSRPPLRHAGGRRRRPSGRGRAASRRLRRLGRPRARRVAAAWGPAVSRPRLXVRLTRGTHGAGQXSPGAPGPPWTVRLLRGPHSRGPSPRAPSPRLA

SEQ ID NO: 179338 - protein, 201 aa, Oryza sativa
  Clone ID: PAT_MRT4530_76810C.1.pep
MEDFGRRVACARDHTRRLVPTQSSAKLHPNRVSRSNRQTGLSDRNFTFAPTGATRPVRLTSSSDENTVLADGRYRANHTRARRCALPERLSPATSSRSPARANCHSDSQTRLIAASGCHGCLSSVIMLKLCSMEKSGIRSWTGFTFLYMFNTQSPELLGWRQASHEGFVRIAQASKSTGVTKGQRNLVKQDEASPHECEAW

SEQ ID NO: 179339 - protein, 112 aa, Oryza sativa
  Clone ID: PAT_MRT4530_76811C.1.pep
MGDKQETESTKTHFVDPTHNPTTDATLQQDEHESDLPEEFGVTSPPPLSPPPYPLSPSMEDDGMIYARTWAFIDDGGDLDIIQEDIYNFRYDQTPPRDAQSPVTRFKRHKRD

SEQ ID NO: 179340 - protein, 143 aa, Oryza sativa
  Clone ID: PAT_MRT4530_76812C.1.pep
MGDKQETESTKTHFVDPTHNPTTDATLQQDEHESDLPEEFGVTSPPPLSPPPYPLSPSMEDDGMIYAEDLGYMSTPCPSPPSDVDDLNPPEDPNNRIILHPAFVDDGGDLDIIQEDIYNFRYDQTPPRDAQSPATRFKRHKRD

SEQ ID NO: 179341 - protein, 695 aa, Oryza sativa
  unsure (1)..(695): unsure at all Xaa locations
  Clone ID: PAT_MRT4530_76813C.1.pep
GASITPISSSSAAAAAAASPAXNRRPETPPRSSLSTKSAANPPDPADPARAASILAEDDWFPRLNAEFAAALPRLGPRFVVRALRAAAEREGLGEPLLCVRLYVWASRFGAHFARDGGVRRALVGALWRRGPVVLSGRLVAEVRGCGCEVSEELVCALVESWGRLGLARYAHEVFVQMPRLGLRPSTAVYNALIAASVRAGAVDTAYLRFQQMPADGCRPDHFTYNSLVHGVCRRGIVDEAVRLVRQMEGEGIRPNVFTYTMLVDGFCNAGRVEEAFRMLDKMKEKGVAPSEATYRTLVHGVFRCLERDKAYRMLSDWLGHETSLHPSACHTMLYCLSKKDMAKEAVEFEKRMSARGYLLDSTAFGIVMSCALKCLEVSDLCELLDSFIKNGGNPGFDVYIMVIKSLLNCKNFSKANHYLGHMVLKGLLSSVMSYNMVIDCFVKAGAVDKAEEIVKEMQDKGFLPNLVTFNTLISGYSKLGNVHNAKVVLKMLMEHGFMPDIITFTSLIDGLCNTHQLDDAFVCFEEMAEWGVRPNAQTYNVLMHTLCSAGHVNKAIDLLNKMKIDGVTPDAYSFNALILSFCRMRKVDKAEDIFNDMVRFGVVPDSYTYNSLIKALCDERRVNKAKEILFARERSGCSTSNNQSYWPIVAALAKMGQFSEAGELMDKYLSRNAQSSCGSNQSIESEVAVQVVNA

SEQ ID NO: 179342 - protein, 294 aa, Oryza sativa
  unsure (1)..(294): unsure at all Xaa locations
  Clone ID: PAT_MRT4530_76814C.1.pep
KGKRDLLRQQLGFRWTGRTGDGSRERTAEINLXKTDGRDPSVHDRLTGEGDDDVGDDVTTGGGSDGSDGARSPANGGTSARTESTNGXRTARRTHRXPKERRRRRSGRRRRRCSGDLRXRRSGGRGRRRLGDPDGGLPERRRRLERWRRAAGATAATAARGLTALGRFRRREAKARVAAGARRQRRRPTAAGDEKERSGFGGKRPIRIELDSTNFQNDLADVSKREKVEEIPRIISPLSIRPETERIDGTHLSATARARARAADWAGWAEEREKGFGPTFGPKPKEDFLKPFSI

SEQ ID NO: 179343 - protein, 282 aa, Oryza sativa
  unsure (1)..(282): unsure at all Xaa locations
  Clone ID: PAT_MRT4530_76815C.1.pep
RHHRRWLGRLGRRTLAGERRHFGTNGEHQWVADGAANSPVTKGAAEEERTAPAARRKRRRRSGRRRRRCSGDLRXRRSGGRGRRRLGDPDGGLPERRRRLERWRRAAGATAATAARGLTALGRFRRREAKARVAAGRGDTGEPFKGARRQRRRPTAAGDEKERSGFGGKRXDPNRTRFHELPKRFSRCFQKGKGRGDPEDHFPSINSAGNGKDRSNLEGNGGGAKLGFRAAADRRKTTTLTSGTHLSATARARARAADWAGWAEEREKGFGPTFGPKPKEDF

SEQ ID NO: 179344 - protein, 118 aa, Oryza sativa
  Clone ID: PAT_MRT4530_76816C.1.pep
MSAIDPLDLQLVLQLDPQAVLVDELASLPIWWSRGPMPQDLVVPCSATLLLLLIIDPPAPISDLSSSDFGQLDPLVGWLARSDSLQPPRYPTWQWWQQLHETHVGKEATIGVRINNGA

SEQ ID NO: 179345 - protein, 101 aa, Oryza sativa
  Clone ID: PAT_MRT4530_76817C.1.pep
MADGGGHGAAECGGRSGRRPTSPSCLFRRSWRRRRVEKEELQRRQERGAAAGGKEERKQAAASPTSEEQGRCLPISIPKNENADDDGTELSCLICLIGSAA

SEQ ID NO: 179346 - protein, 231 aa, Oryza sativa
  Clone ID: PAT_MRT4530_76818C.1.pep
MALLGVSYPRGKQAPHTARDKEEKRASPPRRWQSKRRRTAAQGKGRNNNVRRYDSFKTWSGKLERQLAHLAGAGPEFPEEEEDGCDAISSHHTKSMPQVDRFFAALECPELDKLRSSEELVLPLDKTWPFLLRFPVSAFAIYACKVVFFFEAVLERQGSWAASGGGGGCAHREERGDVVAVAGIPASRADEGERRATQTRGRRRGRSGARAEAEYIAGLHAMAMAAAAAAA

SEQ ID NO: 179347 - protein, 105 aa, Oryza sativa
  unsure (1)..(105): unsure at all Xaa locations
  Clone ID: PAT_MRT4530_76819C.1.pep
ALCRTLLCSNAILHGHIDVGTVIASPIDIYYDIVNSFQEKWLLVWYLTTPMQNVHKGADTYXYHVPFHRITGHFHSFQYVYLSSDVHHALYGFYDDKLPLLNLYS

SEQ ID NO: 179348 - protein, 52 aa, Oryza sativa
  Clone ID: PAT_MRT4530_7681C.1.pep
GRGKGPFIPKGKQNFEAPRKCFPEQLINQVGHHQGNFYPTDMGRFTNPLPIP

SEQ ID NO: 179349 - protein, 102 aa, Oryza sativa
  Clone ID: PAT_MRT4530_76820C.1.pep
IASSRRLARAERAPAHQREKVRMANARLSPPPARCRRHHCLAGLPPSPPATSRRSHRLLPPPSPRRVHACSPAGGAAPGRRPHVVAWPLPARRPISNRLCCP

SEQ ID NO: 179350 - protein, 48 aa, Oryza sativa
  Clone ID: PAT_MRT4530_76821C.1.pep
YNCFHFNLSLILSLPEFFWSLRSISQNMLPELCKCKVVSTIQLSSLKL

SEQ ID NO: 179351 - protein, 72 aa, Oryza sativa
  Clone ID: PAT_MRT4530_76822C.1.pep
LLKFQKSFIFSHNYFLRGSLLIFKVYYEVNLLFPFVSACLINLTGRSMMISVAMILKKLAYEHNLSVLVILL

SEQ ID NO: 179352 - protein, 155 aa, Oryza sativa
  Clone ID: PAT_MRT4530_76823C.1.pep
RLRKEREEKRAERDRFHRRAEAQAAYDKAKRKEQSSSRSSGGASPRGGFPGGMPGGGFPGGMPGGGFPGGMPGGGFPGGMPGGFPGGAMPGGVPGNVDMSKILNDPDLMAAFGDPEVMAALQDVMNNPASFARHQANPKVGPIIAKMMAKFNGSQ

SEQ ID NO: 179353 - protein, 49 aa, Oryza sativa
  Clone ID: PAT_MRT4530_76824C.1.pep
FTDFLHTHKTQDFTTRLVAYIILPSLVGSVKSSKHILCNCTIYLGLYVS

SEQ ID NO: 179354 - protein, 73 aa, Oryza sativa
  Clone ID: PAT_MRT4530_76825C.1.pep
MARLRRLRLLAIVQLAVAIWLAATSSYQCKLDAVPPPPPPPTVLVDGGPPKANRPPPPSPPEGCSGQHLRLQP

SEQ ID NO: 179355 - protein, 113 aa, Oryza sativa
  Clone ID: PAT_MRT4530_76826C.1.pep
FLLNGVLFRLSLPPVGFFVRPGEAGGYVLSSATYLLPTASSWVFFLSSLFAPSFRLFFSFPCRAVLAPAVRAPLVFSSPVASLLCCLSSDGVFLPFFLSFLSFLHKKKNSNIF

SEQ ID NO: 179356 - protein, 1573 aa, Oryza sativa
  unsure (1)..(1573): unsure at all Xaa locations
  Clone ID: PAT_MRT4530_76827C.1.pep
PPGRSRRRRRRCXLCCVVAVVGVRGALAADAEGAALLASKRTLRGGDTALPDWKPADAWPCRWTGVRCNANGRVTELSLQHVDVVGGVPDGLPAAMGTTLERLAVAGAELPGRIRAEIGNLRALTHLYLSNKPQNFVVLDSPCHTGSRRETLYVILNHLEGTIADAIARLTALRELIIFDNQLDGAIPASIGQMASLEVLRGGGNKNLQGALPPEIGNCSKLTMLGLAETSISGPLPATLGQLKNLNTLAIYTALLSGPIPPELGRCTSLENIYLYENALSGSIPAQLGGLANLKNLLLWQNNLVGVIPPELGACTGLAVVDLSMNGLTGHIPASLGNLSSLQELQLSVNKVSGPIPAELSRCTNLTDLELDNNQISGAIPAELGKLTALRMLYLWANQLTGTIPPEIGGCAGLESLDLSQNALTGPIPRSLFRLPRLSKLLLIDNTLSGEIPPEIGNCTSLVRFRASGNHLAGDIPPEVGKLGSLSFLDLSTNRLSGAIPPEIAGCRNLTFVDLHGNAIAGVLPPGLFQGTPSLQYLDLSYNAIGGAIPANIGMLGGNSLTGAIPASIGKIPGLEIALNLSCNGLSGAIPKGFAGLARLGVLDVSHNQLTGDLQPLSALQNLVALNISYNNFTGRAPETAFFARLPASDVEGNPGLCLSRCPGDASDRERAARRAARVATAVLLSALVALLAAAAFVLFGRRRQPLFGRGSTSPADGDGKDADMLPPWDVTLYQKLEISVGDVARSLTPANVIGQGWSGAVYRASIPSTGVAIAVKKFRSSDEASVDAFACEVGVLPRVRHRNIVRLLGWAANRRTRLLFYDYLPNGTLGGLLHGGGAAIGAAVVEWEVRLSIAVGVAEGLAYLHHDSVPAILHRDVKSDNILLGERYEACLADFGLARVADDGANSSPPPFAGSYGYIAPEYGCMTKITTKSDVYSFGVVLLEIITGRRPIEAAFGEGQTVVQWVREHLHRKRDPAEVIDSRLQGRSDTQVQEMLQALGIALLCASTRPEDRPTMKDVAALLRGLRHDDSAEAQKAGSGSAIKWADPRQPGSPTKPMAQAQAHSHTSSLAYSTTGSPGEPPASTPPPAPKDPNPNSAAGKRAAGGGPATPSWSSPTKTTAARTEQSSYMGDTDETVACEINHTQSQDTETGVSTTGVVDASKDKEEQQQSKDGEKVDEESRKRKPMALRSDVWESFSKGHRGEDIGKSLENCLAEWGIDKVFTITVDNASANNNAIKYMRRVLNESKGCVAEGEYIHMRCAAHIINLIVGDGLKEIEKYQKAFERYSDEDPYYKLELEGENGPGVPTRADWEKARKMADFLEHFYDLTLRVSVQSRTTSHTYFHEIADVLLLLREWSHSEDKLSKEMGTRMLMKYYKYWGEKYGERQGDREKRGEKDKGDQLLNFTVFFCVAIDPRYKLSNCIRMGIKVMFGDTVGEKQLNSEGGSGTIKSEVDKYLSEDNEPDTPKFDILKWWKANSTRFPILSHLARDLLAIPITSVASESAFSAGGRTLDDFRTSLTPRMVERLVCANDWLRGGNYVSVEEDSEQMALLEEELGDLSISKEDTPAATQ

SEQ ID NO: 179357 - protein, 737 aa, Oryza sativa
  Clone ID: PAT_MRT4530_76828C.1.pep
MGDTDETVACEINHTQSQDTKTGVSTTGVVDASKDKEEQQQSKDEEKADEESRKRKPMALRSDVWESFSKVKLANGDERAKCKWCTKLFHCGSRTNGTSSLKAHLKICKKNPNKPVVDNQGTLQLTPCDGNSTLGTVTTWKFDPDKLRRCFAEMIIEDEQPFVLSERSGLRKFMTLACPRFVLPSRRTITRACVKVYEDEKEKLKKFFKDNCVRVCLTTDTWTAKNSQNFMCVTAHFIDNEWNLQKKIIGFFLVKGHRGEDIGKSLENCLAEWGIDKVFTITVDNASANNNAIKYMRRVLNESKGCVAEGEYIHMRCAAHIINLIVGDGLKEIGTSIQRVRAAVKFIRCGTSRLVKFKKCAELAKVQSKAFLNLDICTRWNSTYLMLNAAEKYQKAFERYSDEDPYYKLELEGENGPGVPTRADWEKARKMADFLEHFYDLTLRVSVQSRTTSHTYFHEIADVLLLLREWSHSEDKLSKEMGTRMLMKYYKYWGEKYGERQGDREKRGEKDKGDQLLNFTVFFCVAIDPRYKLSNCIRMGIKVMFGDTVGEKVWETVNTYFRALFEEYKEMYTPKDKAPQPTESESTAETSKRVSCRWMSVITQQLNSEGGSGTIKSEVDKYLSEDNEPDTPKFDILKWWKANSTRFPILSHLACDLLAIPITSVASESAFSAGGRTLDDFRTSLTPRMVERLVCANDWLRGGNYVSVEEDSEQMALLEEELGDLSISKEDTPAATQ

SEQ ID NO: 179358 - protein, 336 aa, Oryza sativa
  Clone ID: PAT_MRT4530_76829C.1.pep
MGNCRFFTYEELHQITNGFAAKNLLGEGGFGSVYKGCLADGREVAVKKLKGGGGQGEREFQAEVEIISRVHHRHLVSLVGYCISGDQRLLVYDFVPNDTLHHHLHGRGMPVLEWSARVKIAAGSARGIAYLHEDCHPRIIHRDIKSSNILLDNNFEAQVADFGLARLAMDAVTHVTTRVMGTFGYLAPEYASSGKLTERSDVFSFGVVLLELITGRKPVDASKPLGDESLVEWARPLLTEAIETGNVGELIDSRLDKNFNEAEMFRMIEAAAACIRHSASRRPRMSQVVRVLDSLADVDLSNGIQPAASALSFEWSQCALHLREHAKWNIFLMTTH

SEQ ID NO: 179359 - protein, 358 aa, Oryza sativa
  unsure (1)..(358): unsure at all Xaa locations
  Clone ID: PAT_MRT4530_7682C.1.pep
YHHATRRGNDNDERARRRQTGXNGDERRGDGFGGDPWTKARRGRREDXRRGGEDEDDDGXAAATGNDERTTTTTTTGTGEEATRTAGSGCTETRTTWDTPLRXTXRRRRRETTSRATDGTSTTRTIGDDDDGPRRDLDGGETMPRTTLPLRCRRWWRCGRPVHGGEGRAAEQLRRGGCRGSRRWRSGETEEWTRWRATPPRKGEMAAPADARARRKGXPEEMSTRRKERPARXTTAFRRNSGEEEVMPGKKAMPRCRRRRRRRRSAHRRXTAAGWREYSGTNATGCRRGHRSGEFPARRRXAGXRGRCCRAEGGDGTAGRCSGEEGEVAGGRPASEREKEKAGRGDTTTGRLGKGLKR

SEQ ID NO: 179360 - protein, 111 aa, Oryza sativa
  unsure (1)..(111): unsure at all Xaa locations
  Clone ID: PAT_MRT4530_76830C.1.pep
VGKLIDXRLDKNFMEAEMFRMIEAAAACIRHSASRRPRMSQVVRVLDSLADVDLSNGIQPGKSEMFNVANTAEIRLFQRMAFGSQDFTTDFTQSSWDSRSRDVDASGSRPL

SEQ ID NO: 179361 - protein, 244 aa, Oryza sativa
  Clone ID: PAT_MRT4530_76831C.1.pep
PRRCCCPPLAVAGPRAEHLRRAADPTPPEGGATGSAACRCRPPTPSPRIVVVAAVEPAAAARRRDPATRRPAPPDSLVAVSRTSSPRAAEPLPSPSPHDVGSCSSGTADPGSGHPEAGVAVRRTPSPRAAKPQSSPSSHDVRLGRSGAGTVESARRHPSHAVASRRGAHDVGHPKAGVAMPSGARCHGRKGGGWESGTVGVAGRRQGQHAHRRFGVLTDPPHRRSVDGGTTAGAFLARFTGRHN

SEQ ID NO: 179362 - protein, 976 aa, Oryza sativa
  Clone ID: PAT_MRT4530_76832C.1.pep
MSSPPPPSSRDALINDVVTAIADVVRANYTPPDGSNLDEPARTVAEHAATRASTAACDTLTRLLPPLTTPDDTNSSAAPLLPATSSAGQVSLAPSTAVAPTAVSLLPKLTSLLVQLAVRGAPTPSGALSSALHGAPPPPQPPALDDETVSTLHGQAVSVLNVKALVPITLDLAAGNYTRWRGLFLVVLGKLDADGLRRPRLALRMIPADLLQEVMSATATAYSVWRDLAHQFLGNQERHAINLNAEFRTFAQGDLSISDYCQRLKLMADMLGEPVHDRSLVLQLLTGLSPKFGHVQSLLSMQKLFPSFLDARSQLLLEEITKGSKSAEPATAFVVSNSGSVQPASGNTSNTGNDEWYMDSGASSHMTPHTGTLTLAPTTSPSYIVVGNGSLLPITATGSARINYPHHSFLLNNVLVSPDIIKNLISARRFVRDNWCYVELDPFGLSMKDYPTRNEIIRCNSSGDLYPFPANAFSSAASARTFTATESTTDLWHRRLGHIGHDALTCLSQASVIPPPRGASPVCHACQLGRHCDNGYEFDNLTARTFFLTNGVHMRMSCPHSSPQNGKAARPSLAVPPSRTHHSLAPPIGAPTRARSAWVPGAVIPSQLGVSLVINTHGMTTRGKDGIQLPVMRYNLNVATLSPVPRTYRAALADPHWCSAMEEEFAALQANHTWDLVPRPSGCNVVIGKWIFRHKFQSDGSLDRYKARWVLRGFTQRPKIDFDETFSPVVKPATVRTVLSLAVTRQWLVHQLDVKNAFLHAGLLRWAIHALQSKFSMKDLGTLHHFLGITVTSDSSGLLLSQRQYNIEILEHAGMSDCKPCSTPVDTNAKLSSTYGSPQVCLHMHDPRDSHLAALKRILRYVRGTLDLGLHIRRSPSTDLVAYSDADWAGCPNTRKSTSGYAVFLGDNLVSWSSKRQHTLSRSSAKAEYRAVANAVAETYWLRQLLHELHTPPSKATLVHCDNVSAVYLSTNPVQH

SEQ ID NO: 179363 - protein, 48 aa, Oryza sativa
  unsure (1)..(48): unsure at all Xaa locations
  Clone ID: PAT_MRT4530_76833C.1.pep
SHRPXXXGXIAKQTKCANFGRLKQLLMRQFIHNSQCIWNQGKGSIIDS

SEQ ID NO: 179364 - protein, 95 aa, Oryza sativa
  Clone ID: PAT_MRT4530_76834C.1.pep
YGSLILGLYSLVRKPDLAFQYGIAIQTLCFFLSNHKAQSLCFVPSLLIAFFLSVSSNKYSFLMCCGCLLSSTYNVLIVPFDSKKLSTGGFFILPK

SEQ ID NO: 179365 - protein, 80 aa, Oryza sativa
  Clone ID: PAT_MRT4530_76835C.1.pep
MATAPCVKEGQQHGGRERKGGRGGRAVVKKTSPRLEGGHERVVRCGARVVEDPVGGEACIGRRDGWIRGRALLREKIKLR

SEQ ID NO: 179366 - protein, 85 aa, Oryza sativa
  Clone ID: PAT_MRT4530_76836C.1.pep
NPPKERVEKPPPPGTGKPHPGKTGESRSYKSGLDKKKKKPPKKKNSFRTGNHNGHPYFGGTKGQPPGSPFPTGGNPQGPKKTNPF

SEQ ID NO: 179367 - protein, 139 aa, Oryza sativa
  Clone ID: PAT_MRT4530_76837C.1.pep
MTTQLVKIGTWGGNGGGRVDLSVLPRSLKSVTIRSGAAIDAIAFTYIGTDGKEHLAGPWGGGGGNPTTITLGSQEFVKGISGTFTNVVTNLKIVTNVTTYNFGQGGGTAFSLPLQSGSVVGFFGRAGALVDSIGVYVHI

SEQ ID NO: 179368 - protein, 132 aa, Oryza sativa
  Clone ID: PAT_MRT4530_76838C.1.pep
MAGTGSGTGAKQSSSWVVGSEKQEQKRYCDNVAAPEVNTHTETEKTIGSVRRIGVLEAMSLTRSCSTNWRHPPRNGRAGWVVSPFRRVVEQRVGWGEVGRAYVAGAGCSPAGPGEGESSDDDADADQLTDES

SEQ ID NO: 179369 - protein, 162 aa, Oryza sativa
  Clone ID: PAT_MRT4530_76839C.1.pep
VLTSGAATSARVVRFRRCSLGRADRRVTVTVALLLLLLGSHHPRRALLCSRSTASASHGATPKLQLNAGHLSRGDPGRLLPPWPGATPARLPFPTTRVTVARALRVPGAPRCDRCHGNDRSRRRTCNMKRDYYQYLDTLRLELRGRMLLRTPWWHTKPLMIL

SEQ ID NO: 179370 - protein, 2074 aa, Oryza sativa
  unsure (1)..(2074): unsure at all Xaa locations
  Clone ID: PAT_MRT4530_7683C.1.pep
GLISLSSTWRPPDLRYKRDPPGRAXGIKSQSQHSPHSLRNPYTNVPQYPLYPVYRYHPSTVARQVGALGTXGSTTMSSSFVDNSVNTNLSQVLPALTMLVWNQVGEIVFPVYTTTPISTDPPMTGNENAVATNQRDSMSKNPPAETENGASTTSELEKDSDVAKPCPSDINREPTKMTSEATRSCCPIHKTKKHTLQACWVFLNVRAEIRACKERGIQRISPIRDVYYPIHKIKNHDISSCEVFLGAMKAPSPKSYVPIRDNDKXQGATPTSDRFVGVIDIDPHEPSVLHLLEDYGSSTTSAPWEVLAIDDVGTSAHANAEAGNQLTTPAQHIRTVQAILRETPYDPVLNDDLEHWIERLRESVTNLSNAFEEAATAVHPEQPPTGDANGENPERREXPQRATPPPRGTSDLRDHINSRREAQRTRDNVNHSRRHVSSQRHDNENREDRSNDDRDQDYHHDHNGRKRRVPDNTGXGRRHNDDDDGDRRRDNSGRRRQDSRDPGRHPRNRMPEPSDPSSSSSSLSSSSSDRHPRRTHDRRQPTAPNAGCRAFGRSLRDVRWTERFRPGAIEKYDGSTDLEEFLQVYSTVLYAAGADDNALANYLPTALKGSARSWLMHLPPYSISSWADLWQQFVANFQGTYKRHAIEDDLYALTQNSGESLREYVRRFNECRNTIPEITDASVIRAFDSGVRDCYTTQELATRRITTSQRLFEIVQRCAHADDALRRKNDKPKTGGEKKPATNASESSKKKNRKNGKRKAQAEVLAAEYANPPKRPDPQSSDTRKAWCPIHKTNRHSLEDCLVFRKSLEKHIAFEKGKRVRVVEKNEEAVPHESDSAFPDSDFHVSHIFXAPQRRYPIMVEPTIRNIKVAXVLIDGGSSINLLFASTLDAMGIPQSELTPTDQPFHGITPQSSSRPLGKITLLVTFGQANNLRTEQITFDVAEFDTAYNAIIGRTTLAKFMAASHXAYQVLKMPGPKGTITIQGNAKLAVQCNKRSLDIVEQTPNPPATTEPPKKVSKTNKTPKPDGAIKIVPLSSANPDKTELALITFLRDNADVFAXQPSDMPGVPREVIEYKLMVRPDAKPVKQRLRRFAPDRKQAIREELDKLLKAGFIREVLYPEWLSNPTMVWKANGKWRMCVDFTDLNKACPKDHFPLPRIDQLVDSTAGCELLSFLDAYSGYHQISMAKEDEEKTAFLTPFGVFCYVKMPFGLITAGNTFQRTVQGALSDQLSNNVKAYVDDIVVKTKTGDSLIDDLRETFNNLRRYRLMLNPEKCTFGVPSGKLLGFLVFGRGIEANPEKIKAIENMKSPTRLKEVQKLTGCMAALSRFVARMGERGQPFFALLKKQDKFVWTQEAEEAFVALKRYLSNPPVLVAPQPNKELFLYIAATPYSVSTVIVVEREKVQRPVYYVSEALHDAKTRYPQIQKLLYAVIMTSRKVCHYFQAHRVTVVSSFSLDEVVRNKDVISRIAKWVVELSQFDVHFVPRTAIKSQVLADFVADWTMPDNKLNNQVDNETWTMAFDGALNSQGAGAGFILTSPSGDQFKHAIHLNFRATNNTAEYKGLLAGIRAAVALGVKRLIIKGDSELVANQVHKDYKCSNPELSKYLAEVRKLEKRFDGIEVRHIYRKDNIEPDDLARRASRREPLEPGTFLDILTKPSVKEVSGEVSPDTPDISSEVTKAERAVADIETTDDWRIPLIKFIISKELPEDDTEAEKITRKAKIYCMVGNDLYKKAPNGVPLKCVSSDDGRHLLLDIHEGICGSHAVGRTLVRKAFRQGXFFWPTALKNACDMXTHKATRASTPDYPSDLAVLVLGARYTWAIPTRTGRLQVXFVAIDKFTKWIEVVPMGEIKADNAIKFIKGIFCTYRLPHRIITDNGSQFISADFQDYCIGLGVKICFASVSHPPSNGQVERANGIVLQGIKTLLWAVRTTPTTSNKETPFFLVYGSKAMLPGELRHXEYXVQKHSDEDQEEQRDIDVNLLEEHRERVAVRAVSYQQALRRYHEKRIRARILSIGDSVLRRVQSQAGRNKLSPNWEGPYTITXVLQPGAFKIADGEGRELANSWNIDQLRKFYV

SEQ ID NO: 179371 - protein, 462 aa, Oryza sativa
  Clone ID: PAT_MRT4530_76840C.1.pep
MSIAMHARAAAAAAASIHRQYRRCNPWRPCWTPVAAPSSSGAARRGHGVSPWSLGVSSSTSSSSTPPHGRRCHRRGYYTGVALPAPVRGIFVSYVDYDRTHLFAHPSITPACPAIDGVLDFMPEHRYSGDGWSVSHHCNGLLLFSNCSRWLCVCNLATQRWEKLPDHAAGIGSSYKICTYPAFDPAMSSSHYEVLVIPSVPDPRWMMALCNHRGRAKDIDDSCRLMEWPPSPWRVDVFSSRKSTREAVPYLGRSPNGLCFGISDCDAQLWIWILRESHGKMEWILKYHDDLKPFAKQLLSYYGYRRKVFCGQPWIIEEANNRKHQNTQKKPDPKVNFEWDLDNDDFISIDGAVEGAVDEYCYTFFDMIGFHPYKEVIFLGDILTVFAYHLDTSKLQYLGHTRPEDYCQMYTNGIYGSFVYTPYVSGHFYAVITGAGAHPQHLHQMLRNNAAHAIDQPKEPAD

SEQ ID NO: 179372 - protein, 91 aa, Oryza sativa
  unsure (1)..(91): unsure at all Xaa locations
  Clone ID: PAT_MRT4530_76841C.1.pep
MSRYQGTINPIVKMIRXREMHGFSKGMGSKIVQSVYSASVLFMVKKELAKFVVMLIAKSRTVAGPSSKNRKAFPLNRISLNSPLCNYFQDW

SEQ ID NO: 179373 - protein, 76 aa, Oryza sativa
  unsure (1)..(76): unsure at all Xaa locations
  Clone ID: PAT_MRT4530_76842C.1.pep
IYXQYWSFIKAGCLKKCKYVGFMYAGCLHLTSLYSFCLIVTPFLAVXSSGKHQANHEYGRMGQLMSRLWYCLLAAA

SEQ ID NO: 179374 - protein, 885 aa, Oryza sativa
  Clone ID: PAT_MRT4530_76843C.1.pep
MEAQADAGGDDLAAMREQCRSLEEAIGFRRETQMGLVASLQRLVPDLVPSLDRSLRIIAAFNDRPFVPTPNPDGGHGKSPAALKPHHRRALPDPARSTRRKTSPGSSPASVAAAPGGLDAVRTMVAVCLLELVPFAEIDAAALARRMQAESSSASEAERTALADLAAELGGSAASAVVLALRRIAEDTGGVQIEEAMIGGKSMTMVWAIDRNKLLKELPESATLPLLQPPPAPQMPPSETDAGSAMIPRTPQQQQPQPDMWPHSMPPIFPRPRGMTMQGMQRVPGVPPGLMPLQRPFMGPAGVITMGGGVGPSPNQQKQKSEEDELKDLELLLNKKTYREKQNTKTGEELLDLIHRPTAKETAVAAKSHTVSPVVVNELAVADLGFEPRGLNVKTIAYKEMGDTRSKSSKIYSMFKTKGGSQLKEYCTNLTKEDCRRQSGSFVACDKVHFRRIIAPHTDTNLGDCSFLDTCRHTKTCKYVHYELDQTPDIPPMMAGALAPPRQIRLQRAEYCSEVELGEAQWINCDIRNFRMDILGQFGVIMADPPWDIHMELPYGTMADDEMRTLNVPALQTDGLIFLWVTGRAMELGRECLELWGYKRVEEIIWVKTNQLQRIIRTGRTGHWLNHSKEHCLVGIKGNPLVNRNIDTDVIVAEVRETSRKPDEMYPMLERISPRTRKLELFARMHNAHAGWLSLGNQLNGVRLVDEGLRARYKAAYPDSEELLEGAHTGSPMRPRGGEGVAVSLPGETHTTVGFPGRIRAPNPMGLSGAIGLHLGPCQLFSKLSPRMTISPAGPGPLRGPDPTGAGAISDPWIVKKARLVKKEVEPIFSDSDAMKNAPKTTTTCPRCQNGEAYYRQMQIRSADEPMSTFYKCCREECQFDWRED

SEQ ID NO: 179375 - protein, 55 aa, Oryza sativa
  Clone ID: PAT_MRT4530_76844C.1.pep
PRVRIRVELLPYTSSSLILVEGSMFWMVEGPFYYKDPNLTPLDCLGSPLIWCHLN

SEQ ID NO: 179376 - protein, 845 aa, Oryza sativa
  Clone ID: PAT_MRT4530_76845C.1.pep
MSVVGFDLGNESCIVAVARQRGIDVVLNEESKRETPAIVCFGDKQRFIGTAGAASSTMNPKNSVSQIKRLLGRKYSDPELQRDIAAFPFRVSEGPDGFPLVHARYLGEERVFTPTQLMAMVLSNLKGIAESNLNTAVVDCCIGIPVYFTDLQRRAVLDAATIAGLCPLRLFHETTATALAYGIYKTDLPENDQLNVAFVDVGHASMQVCIAGYKKGQLKILSHAYDRSLGGRDFDEVLFKHFAAKFKDEYKIDVYQNARACIRLRVACEKLKKVLSANPESPMHIECLMDEKDVRGFIKREEFEKISASILERVKGPLEKALAEAGLTTENVHFVEVVGSGSRVPAIIKILTDFFGKEPRRTMNASECVARGCALECAILSPTFKVREFQVNDGFPFSIAMSWKPDSQNGDNQQTVVFPKGNPLPSVKALTFYRSNTFQVDVTYVDTGDLQISPKISTYTVGPFNPGKGDKAKLKVKVRLNIHGVVTVESATMLEEEEVEVPVAATTEPPKDSAKMETDDAPNEAASGTDVNMQEAKAPADAAADGAENGAPNSEEKSVPMETDAKVEPSKKKVKKTNVPVAELVYGALGTTELQKAVEKEYEMALQDRVMEETKDKKNAVESYVYDMRNKLYDKYNDFVTAEDKEAFIAKLQEVEDWLYEDGEDETKGVYVAKLEELKKVGGPIEARYKEWMDRGPSIDQLAYCINSFRDAALSKDPKFDHIEMEEKQKVINQCSEAEVWLREKIQQQDALPKHANPVLLSSDLKKKAETVDRFCKPIMMKPKPAPKPQTPPQTPPTETPAGGAQTPEQQPQGAEAAGEASEGGASESTGEQMETDKPEGTEAA

SEQ ID NO: 179377 - protein, 136 aa, Oryza sativa
  Clone ID: PAT_MRT4530_76846C.1.pep
MGNCFGSDDGEVEAVKVMARHALPQAAMARPVMVAIAQPNARVAMSPGRPPTGKLPSQATATSTGGGRSVAGGGGRTNAGGDASAEGRILEAPNLRIFTFAELRADTRNFKADTVLREGRFWRVHKVWVDERTMSP

SEQ ID NO: 179378 - protein, 39 aa, Oryza sativa
  Clone ID: PAT_MRT4530_76847C.1.pep
AMDIPPPRGPLWILGDVFMGAYQTVFDYGKMRVGFSKSA

SEQ ID NO: 179379 - protein, 57 aa, Oryza sativa
  unsure (1)..(57): unsure at all Xaa locations
  Clone ID: PAT_MRT4530_76848C.1.pep
GNERVFLFHTGDREYMIKYLLGLNIANLALQRQVNHIKMSERAATXLFPFSEGLILR

SEQ ID NO: 179380 - protein, 103 aa, Oryza sativa
  Clone ID: PAT_MRT4530_76849C.1.pep
MGTTAYLVSPSSRIARRWEQPPPRGRAATADTFGERASAGPRRGSRRRQHALGRRHLAHGAPAAAANSSPRAPSPPPPRRARDLAADSAPRARPRHHHRCPAR

SEQ ID NO: 179381 - protein, 258 aa, Oryza sativa
  unsure (1)..(258): unsure at all Xaa locations
  Clone ID: PAT_MRT4530_7684C.1.pep
MEEYLANMKTLRSYMSDLEEEATKRSAEEQRQRTAIDAHGADLAQVRAQTKQASEESEQLSKARAELCVEISEKQGRIATLEIECATLKQRQGKNFLLHQEIASTSSKLNEKRLFYTKTIESLTVKLQEQQEWXLVHLSLRYTKIIESLTVKLQDKQYWLGAVKLKSKQNLQVQSVLIASIXQEKNAISGFLAPLQQMDMKSLEEEHKALQADKAGEIEYFQSLEERINEMKGVSDAVKCRCGLEYKVELGGEAMDLS

SEQ ID NO: 179382 - protein, 106 aa, Oryza sativa
  unsure (1)..(106): unsure at all Xaa locations
  Clone ID: PAT_MRT4530_76850C.1.pep
LHPKARTRQNKTKAKGWRCAEIVLNVNLSLHGNYHEAHXLNSMMYAESYCWNRLYRLTPSDSNSADLIIADLDGSRFLLCFHNSLRLGFLFDLIFIPDTEVTKFGR

SEQ ID NO: 179383 - protein, 117 aa, Oryza sativa
  unsure (1)..(117): unsure at all Xaa locations
  Clone ID: PAT_MRT4530_76851C.1.pep
SREFRDRQCQXEVQDSPLDACRQVLDRQLTGRERFQPMFRRPGALGLRMQCXQQLQDVRGGGGCSSIRRMVRSYEESMPMPLEQGWSLXLLEYYGGEGXLYEXGVXGEGLLEEGYYG

SEQ ID NO: 179384 - protein, 263 aa, Oryza sativa
  Clone ID: PAT_MRT4530_76852C.1.pep
WESAALFSLAFGGLCYFGSQRVIGAVNGFLVFSILASFTTLVVVASGNLQWSSLLEANFAAAPQSIPIIALSFVYQGDLSKVRKAIVVGTAIPLALFLIWDAVILGTLPGLAGDGTIIDPLEQLRSSNGTVGPIVEAFSFLAIGTSYIGFVLGLSDFIADLLKLPSGQNKPLPYLVTLLPPLVLSLLDPEIFRHWTSGTWSLVLFGVFPAAMSWSERYSDDLEAPVPPIVPGGKFTLSFVMGGALLVIFSEIFKDIMQLQGLH

SEQ ID NO: 179385 - protein, 113 aa, Oryza sativa
  Clone ID: PAT_MRT4530_76853C.1.pep
PPSGKNVVELNGPPPQGWGPPPPPPSGGQGNRIMGWGGASPPPGGGHCPYYFRGPYGPRGGPQKKRWGEGPRFFFLKKKILLPPPGGFLTRKGVPPGGGRGKAFFYPVGQNPC

SEQ ID NO: 179386 - protein, 95 aa, Oryza sativa
  unsure (1)..(95): unsure at all Xaa locations
  Clone ID: PAT_MRT4530_76854C.1.pep
AXSCXYGPDKXNYLGAFSAQXPSYLKGXFPGXYRWXDTGGLSAEXXAFAKXKALEVIHXXWGDXPAPXVHHPEVLQKIGXRVHQGPCGSKGQNLP

SEQ ID NO: 179387 - protein, 315 aa, Oryza sativa
  Clone ID: PAT_MRT4530_76855C.1.pep
MARRGGRGVGDQRRQKKGGEENRGDSMSSGGELALRQEYVIGDEIGRGRFGTVRRCYAVATGEAFAVKSTPKAPLREAEAADALDLALAEQEPKVHLVASAPGPGASPHVVALHAAFEDDAAVHLVVDLCAGGDLLSLVSSRGRLPEHEAADLVAQLASALASCHRRGVAHRDVKPDNLLFDGGGVLKLGDFGSAGWFGDGRPMTGLVGTPYYVAPEVVAGREYGEKVDVWSAGVVLYMMLSGTLPFYGATAAEVFQCVLRGNLRFPPRAFASVSPEAKDLMRRMLCKDVSRRFSADQVLRHPWIVSRGGAAVMG

SEQ ID NO: 179388 - protein, 657 aa, Oryza sativa
  Clone ID: PAT_MRT4530_76856C.1.pep
MAIKGGGGSAENRGRSPLAMVVAVGLCCFFYLLGAWQRSGYGKGDSIAMAVNRQTAACGGVGLSFETHHGGAGVENETMAAPAPEFAACAAAMADHTPCHDQERAMRFPRENMVYRERHCPGDGERLRCLVPAPPGYVTPFPWPRSRDYVPFANAPYKSLTVEKAVQNWVRHEGRLLRFPGGGTQFPGGADKYIDQLATVVPFADGSVRTVLDTGCGVASLGAYLDARGVIAMSFAPRDSHEAQVQFALERGVPAFIGVLGSIKLPFPPRSFDMAHCSRCLIPWSANGGMYMMEIDRVLRADGYWVLSGPPINWRTNHKAWERTEADLAAEQQLIEEYAAMLCWEKLAEMGEAAVWRKRPDAAVVSCPTATPAPPRTCDAAAASPDDVWYKKMEPCITPPQAAGEVMLRPFPERLTAVPPRVAAGEVPGLTGESYAEENARWERHVAAYRKVNYRLDAGRYRNIMDMNAGVGGFAAAVFSPKSWVMNVVPTAAELSTLGVVYERGLIGIFHDWCEAFSTYPRTYDLIHGNGVFTLYKDKRCKMEDILLEMDRILRPEGTVILRDDIEVLLKVQRIASGMRWKMIMANHEDSPHIPEKVLYAVKRYWTADDKSSEPEPEPEKMKKKAGSSSQERRAPRRRRRVQQVLQKRRVQRSKRC

SEQ ID NO: 179389 - protein, 161 aa, Oryza sativa
  Clone ID: PAT_MRT4530_76857C.1.pep
MSRVFHPCPSPASAATGGAHDVMEYGSLPRHTMSFCPASLSRWFGGTERMRFVLLGGNHNMVVTADQSSRTVLYDLGKYAIRTLSAFVFPTYLRASDSLDSITASISATTSTSFDTTRSLVVATMGSSTAATRNGAVVVSRRLPFDLIPTLWSATQTYFFS

SEQ ID NO: 179390 - protein, 163 aa, Oryza sativa
  Clone ID: PAT_MRT4530_76858C.1.pep
MESKRRAFRRGLYQSLDIRGRWKSWEEARRTIPPCVPVGRPTNHTAWRKKPAFLPQFVIAWVASHTAPKFWVVVSSDTRPTMDVRSLLRWHGAWLQPTTISMGGPPNLCRWVALASQLGVKMEVGSVLKRAKVQTAVEILVNGENGQCVYERMRILRIEAENC

SEQ ID NO: 179391 - protein, 44 aa, Oryza sativa
  Clone ID: PAT_MRT4530_76859C.1.pep
VPSPQLMKPLQLNPILVQKFSFVNDQIGIHKKRNRCGVPHSLDG

SEQ ID NO: 179392 - protein, 1858 aa, Oryza sativa
  unsure (1)..(1858): unsure at all Xaa locations
  Clone ID: PAT_MRT4530_7685C.1.pep
MSYYVDPYTGVPQYPLYPVYGYPPSTVVRQVGELGIQGSTTMPSSFVDNNINTSSDQVLPTIMLVWTQVGEIIYSVYTTMPISTGPPMTRNENAVATNQDASTSKNPPVETESGLMTTSKFVKDSDAARPCPSDTNHGPAKMTSETIKSWCPIHKKKKHTLQDCWAFANACAEIRACKERGIQRTSSTRSVYCPIHKTKNHDLSNCKVLLSAMRTPASKSYIPVRDNDREQGATPAPDRFVGVIDLNPQEPSVLHLLEDYGSSTSDVAREVLAIDDVGTAVQAILRETPYDPVLNNDLERWTERLRASVANLSNAFEEAATAAQQNRSPIGDANGEIPEHRESPQRATPPPRGTGDLRDQINGRREARRTRDEANRSRHHVSSQRHDRGSRPNENRDHDDRDRRGPDNTSHGRRRNDEDGGDRRRDNNERRRQDSRDPGRHPRNRTPEPSDPSSSSSSSASSSSSDRHPRRSRDHRQPTTPSAGCRAFGRSLRDVRWPERFRPRAIEKYDGSTDPEEFLQVYSTVLYAARADDNALANYLPTALKGSARSWLMHLPPYSISSWADLWQQFVANFQGTYKHHAIEDDLHTLTQNSGESLREYVRRFNECRNTIPEITDASVICAFKSGVRDRYTTQELATRHITTTQSLFEIVERCGHVDDALRRKNDKSKTGGEKKSAADTSESSKKKNRKNGKRKAQAEVLAVEYANPPKRPDPQGSDTKKSWCPIHKTDRHSLEDCLVFKKSLEKHMAFEKGKRVRVVEKNEESPPHETDSAYPDSDLHVSHIFGVIPGRYPIVVEPPIRNIKVARVLIDGGSSINLLFASTLDAMGIPQSELTPTDQPFHGITPQSSSRPLGKITLPVTFGQANNFRTEQITFDVAEFDTAYNAISGRTALAKFMAASHYAYQVLKMPGPKGTITIQGNAKLAVQCDKRSLDMVEQTPTPPATFEPPKKELALITFLRDNADVFAWQPSDMPGVPREVIEHKLMVRPDAKPVKQRLRRFAPDRKQAIREELDKLLKAGFIREVLHPEWLANPVVVRKANGKWRMCVDFTDLNKACPMDHFPLPRIDQLVDSTAGCELLSFLDAYSGYHQISMAKEDEEKTAFITPFGVFCYVKMPFGLITAGNTFQRTVQGALSNQLGNNVEAYVDDIVVKTKTSNSLIDDLRETFDNVRRYRLMLNPEKGIEANPEKIKAIKNMKSPTRLKEVQKLTGCMAALSRFVARMGERGQPFFALLKKQDKFVWTQEAEEAFIALKRYLSNPPVLVAPQPNEELFLYIAATPHSVSTVIVVEREKVHRPVYYVSEALHDTKTRYPQIQKLLYAVIMTSRKLRHYFQAHRVTIVSSFPLGEVVRNKDVVGRIVKWVVELSQFDVHFVPRTTIKSQVLADFVADWTMLDNKSDNQGDNKTWIMAFDGALKSQGAGAGFILTSPSGDQFKHAIHLNFRATNNTAEYEGLLAGIRTAAALGAKRLIVKGNSELVANQVHKDYKCSNPELSKYLAEVRKLEKRREPLEPGTFLDDLTKPSVKEVSGEFVPSTPDISSEVIEAERTVADIETTDDWCTPLIKFINSEELPEDDIEAEKITRKAKIYCMIGNDLYKRAPNGIHLKCVSTDDGRQLLLDIHEGICGAHAAGRTLVGKAFRQGFFWPTALKDACDMQTHKATCTSASNNPSDLAVLVLGARHTWAIPTRTRRLQIPIXVAIDKFTKGIEASPTGEIKADKAIKFIKGIFCRYGLPHRIITDNGSQFISADFQDYCIGLGVKICFASVSHPQSNGQVEGANGIVLQGIKTRIYDRLMLHDKKWVEELPSVLWAVRTTPTTSNKETPFILVYGSEAMLPGELRHQSIRVQKHSDKNQDEQ

SEQ ID NO: 179393 - protein, 131 aa, Oryza sativa
  Clone ID: PAT_MRT4530_76860C.1.pep
MASQWRSFRFRSPRTPRYVYTRLPRQLLQDSASSTAPATLASYACRCHHRLASKRSKRIAAKLALAGPSDMTLCAQHNLMRKLGLVPEKGHVLAEAVTAYNALFSQPLPLDHAIALSSLFPSSLPPTQAGV

SEQ ID NO: 179394 - protein, 44 aa, Oryza sativa
  Clone ID: PAT_MRT4530_76861C.1.pep
MPTESRTELLDRLMDKVDLDGLNLYTMKTLIADTINRLLFDFLD

SEQ ID NO: 179395 - protein, 161 aa, Oryza sativa
  unsure (1)..(161): unsure at all Xaa locations
  Clone ID: PAT_MRT4530_76862C.1.pep
EFFTGIQKFKKNQNLIFGHIGVXIGCVRCKKSLRISRVELWSINANIGTRGCEVFHRNKKVQKAPKQDFWTNWSVLGVFVAKXNHFVIRAANFCQLMPILAHMGAKFFXRNEKVQKAPKQDFWTNWSVLGVFVAKNHFVIRAANFCQLMPILAHVCAMVFT

SEQ ID NO: 179396 - protein, 64 aa, Oryza sativa
  unsure (1)..(64): unsure at all Xaa locations
  Clone ID: PAT_MRT4530_76863C.1.pep
HIQHNIFHTXHVKLMLFPHRGDVSNVNTXXNASRASTLSSTTTLPATPXPKWDKHSYLHCQVSQ

SEQ ID NO: 179397 - protein, 1104 aa, Oryza sativa
  Clone ID: PAT_MRT4530_76864C.1.pep
MPPRWRATATRLLVLLACACAVFVPRCHCVGDQGEALLRWKASLLNGTGGGGGGLDSWRASDASPCRWLGVSCDARGDVVAVTIKTVDLGGALPAASVLPLARSLKTLVLSGTNLTGAIPKELGDLAELSTLDLTKNQLTGAIPAELCRLRKLQSLALNSNSLRGAIPDAIGNLTGLTSLTLYDNELSGAIPASIGNLKKLQVLRAGGNQALKGPLPPEIGGCTDLTMLGLAETGISGSLPATIGNLKKIQTIAIYTAMLTGSIPESIGNCTELTSLYLYQNTLSGGIPPQLGQLKKLQTVLLWQNQLVGTIPPEIGNCKELVLIDLSLNELTGPIPRSFGGLPNLQQLQLSTNKLTGVIPPELSNCTSLTDIEVDNNQLTGAIGVDFPRLRNLTLFYAWQNRLTGGIPASLAQCEGLQSLDLSYNNLTGAIPRELFALQNLTKLLLLSNDLAGFIPPEIGNCTNLYRLRLNGNRLSGTIPAEIGNLKNLNFLDLGGNRLTGPLPAAMSGCDNLEFMDLHSNALTGTLPGDLPRSLQFVDVSDNRLTGVLGAGIGSLPELTKLNLGKNRISGGIPPELGSCEKLQLLDLGDNALSGGIPPELGKLPFLEISLNLSCNRLSGEIPSQFAGLDKLGCLDVSYNQLSGSLEPLARLENLVTLNISYNAFSGELPDTAFFQKLPINDIAGNHLLVVGSGGDEATRRAAISSLKLAMTVLAVVSALLLLSATYVLARSRRSDSSGAIHGAGEAWEVTLYQKLDFSVDEVVRSLTSANVIGTGSSGVVYRVGLPSGDSVAVKKMWSSDEAGAFRNEIAALGSIRHRNIVRLLGWGANRSTKLLFYTYLPNGSLSGFLHRGGVKGAAEWAPRYDIALGVAHAVAYLHHDCLPAILHGDIKAMNVLLGPRNEPYLADFGLARVLSGAVDSGSAKVDSSKPRIAGSYGYIAPEYASMQRISEKSDVYSFGVVVLEILTGRHPLDPTLPGGTHLVQWVRDHLQAKRAVAELLDPRLRGKPEAQVQEMLQVFSVAVLCIAHRADDRPAMKDVVALLKEIRRPVEGGATGGGEGKEQNAAAAAAAPPAAERRSPARSTLPKGGSSSCSFAMSDYSS

SEQ ID NO: 179398 - protein, 101 aa, Oryza sativa
  unsure (1)..(101): unsure at all Xaa locations
  Clone ID: PAT_MRT4530_76865C.1.pep
VNGVKPLQKPRTPSPSSCRLAVPXSAHCNKMGGASRRRSRSPPPEEGGESAWWPSTPRPSGTSXGTPQDTTKLVVIASRRRGVAVKMMGRFQXVAAVYXVA

SEQ ID NO: 179399 - protein, 386 aa, Oryza sativa
  Clone ID: PAT_MRT4530_76866C.1.pep
MNIDLNLALQEDEECGEEHGLRQDDVQDEEYGNAALQLDLNLQAEEEKYGKQPDEEQSHQAEEGEEHDQEQIQEYHVTIAHDFDLNMHDFDLNMQVEEEDYQDQPEFESYGEVQQEQEQAPQDQEYHGDATRHSDVNMQVEEEDYEYQPDDDFAVYANHVDIGYGVELEDSDSENLKLKRDTTTIVASLFNIKKSLVQSIWRKAKHCHAEGVPLDLTSKKEKCGRHRVEVDLSLVPTIPLNRRTTIRDIASELHVSKSTMHRSFKDGKLCQESNTIKPLLKDENKEGHVRFCVSMLDNDTLPNHPTFSDMKNIVHLDEKWFNTTVKVRRFYLRPDEPKPLRTVHNKNAIDKVMFLAAVARPRYDNEGNCTFDWTCGLLLRRLAYTF

SEQ ID NO: 179400 - protein, 96 aa, Oryza sativa
  Clone ID: PAT_MRT4530_76867C.1.pep
MVAEAASQLYATACYGVSMAVVSFLQPVNDGDYDGRPAPEAQATHANLEPDGISIRPGEGGWVSGGNQTTCKLIPGLSQAMQFFLKESTKKTLRLQ

SEQ ID NO: 179401 - protein, 76 aa, Oryza sativa
  unsure (1)..(76): unsure at all Xaa locations
  Clone ID: PAT_MRT4530_76868C.1.pep
LDVTVLLLXGLLVYLLFVLGTICXLIGTTTLTWLGRTWVTGYLTHGSCKWQGLTHARVPTRVQPQVSSRNAGSCMI

SEQ ID NO: 179402 - protein, 76 aa, Oryza sativa
  Clone ID: PAT_MRT4530_76869C.1.pep
RLNSSELRKGMCLGLYPFTEGNNSKLNPFSVSICIFLTQSHGCHLTGVKSEGKRGVRFLKEVAKMQTLKSRGKICS

SEQ ID NO: 179403 - protein, 299 aa, Oryza sativa
  unsure (1)..(299): unsure at all Xaa locations
  Clone ID: PAT_MRT4530_7686C.1.pep
MDKSFIDTSFLMFDAKPQYWVKAGPAATLADGWDPPVIAYLPPRRRRARALAPPPPQIAPHPAVPARIKERGITPRVSLSRFPLFPLSLSLGSVXIVPAKFAGAFNGXRDLRARFPLSPAALSPSRRYIIAPRASLLRFRRSPLALAVGFVPATFSSPSAVAAELRFAAVVAPVLLPTGRHLLRLRRVVADPVRRSASPADRRSTVVIVIPSRAAVFLRSVRRFHRLRRLGVSRRPPFAFPLSSSLSGATPPRRWSPAATIGARVRATPVGRAGEAALGRALAAAKWARPSAARARGCG

SEQ ID NO: 179404 - protein, 775 aa, Oryza sativa
  unsure (1)..(775): unsure at all Xaa locations
  Clone ID: PAT_MRT4530_76870C.1.pep
MSQASLSPSSSGDEEEEDEGVEGYRKGGYHAVRPGDQFAAGRYVAQRKLGWGNFSTVWLAFDVHTQMLDKFFWLVMAGSFKCCDKKFVALKIQKSAPEFAQAAFHEIEFLSEITKRDPSNCKCIIQLIDHFKHAGPNGQHICLVFEFLGDSLLKLVQYNRYNGIGFGPVREICRSILIGLDYLHRELGIIHSDLKLENILLISTIDPSKDPIRSGLKPNLERPEGNPNGEVMLNPIEKKLKMRARRVLAKLAEKKKSAAEYARAERSLDGIDMTCKIVDFGNACWADKQFTDFIQTRQYRAPEVILGSGYSFPVDMWSFACIAFELATGEMLFTPKEGQGYSEDXGSLGFDDGNPWEDTKKXIATMGTKSKEYFDRHGDLKRIRRLKFSSIERVLVDKYKISESDAREFAEFLCPLFDFAPEKRPTAAQCLQHKWLQYSDGKNYGTLNISDVKNASVTCSPGTTASSDSKSIDVTRNIGDKPDSYAERADAKCNTSKKSIINSNSENSNVQPNTASVGNRNSKIDDVNSNTGSITNKDSKNTVIKPSIGSFVNRNAETVDVKPNIGSITSRGDSSSDTKSNIGSVASKDAKTIDAKPSTSSITSQDSKIGDGRSNIDGIANRDAKTADVKHNIRSVVNTYLRNFDVKHNTGNIVDGGVKHSDLKPGTVSAANVDSKSISAKPSTGSFENSDAKSISAKTSTGSFDNSDARNIMKANTGIVANNDIKDTDVQTNTESVTSGDDLNDIDRKPNIGRVAASIQRLESSIGKVQSGKYR

SEQ ID NO: 179405 - protein, 49 aa, Oryza sativa
  Clone ID: PAT_MRT4530_76871C.1.pep
FCFILPFIYSTFPYRLYLPSFTYTYVRTIQRILSASELMWDAADYAEGL

SEQ ID NO: 179406 - protein, 57 aa, Oryza sativa
  Clone ID: PAT_MRT4530_76872C.1.pep
NFGPRPRVRVKQAKLEELWLPSWQRRRSARAWAGKKNGCVTLGINCAKARRRTRSWE

SEQ ID NO: 179407 - protein, 468 aa, Oryza sativa
  Clone ID: PAT_MRT4530_76873C.1.pep
MSMALLSLSLAVAFLAAASAAGATGASRSMRRPEEDLVAGLPGQPDVRFRHYAGYVGVGNGKALFYWFFEAEKEPEKKPLLLWLNGAVNLLFLEAPVGVGFSYTNRTSDLRRLGDRVTAQDSYSFLLNWLNKFPEFKNRDFYIAGESYAGHYVPQLAELIYDGNKGASRDRVINIKGFMIGNAVLNDATDQMGMVEYAWSHAIISDELYSAVRRECDSFKEEEDGGKPSKGCSPAVRAFLRAYDDIDIYSIYTPTCLSSSSSSPASASPRRSSPGLVAAPRLFSKHEAWRRMQRVPAGYDPCTEEYVKGYFNREDVQRALHANRTGLSYPYSPCSEAISKWNDSPSTVLPILKKLMGAGLRIWVYSGDTDGRVPVTSTRYSLNTMKLRPRLMRKTAGDGAGEESEWGGWRAWYDRQQVGGWAVEYEEGLTLVTVRGAGHQVPLFAPRRSLAMLYHFLRGSSLPASRSR

SEQ ID NO: 179408 - protein, 89 aa, Oryza sativa
  Clone ID: PAT_MRT4530_76874C.1.pep
GGCRSRRPISPAATPPTRPPPPPPPPPPPPPSPPTALPSLEGQERTFSKRFGQNSCVSTLKGAHIFVVVVVCRDSCAAGGSSSARTPAP

SEQ ID NO: 179409 - protein, 123 aa, Oryza sativa
  Clone ID: PAT_MRT4530_76875C.1.pep
MVYGCGLWNELAVRQAFQSSTVAHSTQGPHTSRKKQWDPPVSTLSVSPRRVSASSSLPHVSGGRRGHDSARPFASLECGWTAGPGATHGPPLLQRGRPISSSRDVVAVGRAKSGAILFSLLPQ

SEQ ID NO: 179410 - protein, 540 aa, Oryza sativa
  Clone ID: PAT_MRT4530_76876C.1.pep
MSSYVTTPHHHHHHGCCSGSRRLQAPAPPARPRLVVAAAARHVALPPRRAVASRAMSAEAPLGVAPAAAEEEMAAVVDEMAEEAAVWCAVHGLVVGDRAEPRSGTIPGVGLVHAPFALLPTRFPASFWKQARELAPIFNDLVDRVSLDGEFLQDSLSRTLLNRHGKVLGLDSKRIPQNWAATQFAEALSMAWTEFNNKRAGYSPNDYPSEAEWRARLLMEQSSAIKCPSISYHLVGTKKIQQELAKPNILERFLNNKEDIAKLRKCFAGLWSLDNEEIVKTAIEKPDLFVLKPQREGGGNNIYGYDLRETLVRLQKEQGEALAAYILMQRIFPRASLTHLVQGGVCFEDLTISELGIFGAYLRFPATACVRGRQPAGGEEQRACEGGGRQGEEQHACHDRGNTPTISASLSHPAFPHSAPLLLRPLTSALSAHVSVAANGAANNLGHLHTIGGTVSTVAAMLDSGEILPASREKVVSVLAAFASSDATAHVLVLGRPWPRVAGWPLSSAQAAAAGVLRNLAAFPDLLPMFREEGVLPSLI

SEQ ID NO: 179411 - protein, 74 aa, Oryza sativa
  Clone ID: PAT_MRT4530_76877C.1.pep
MSAKLNLLIVPNQKAEKHSVPAPPGHHLTVVLQHVDSSTRVDDLDTTSLLIFVEHISTLDLLLTIGASDVQRFQ

SEQ ID NO: 179412 - protein, 57 aa, Oryza sativa
  Clone ID: PAT_MRT4530_76878C.1.pep
GVSSSSAATLTIFPRNHRRAADDRLTASRHTTESEEGTHSFEIVGDSLHKASAWTSS

SEQ ID NO: 179413 - protein, 98 aa, Oryza sativa
  Clone ID: PAT_MRT4530_76879C.1.pep
APFRAMDEFDVFMDAVTPKITLTPLVDFPLPQGSQWIFLPPHNFSRGPPGAGVKNPQMAPPPGCHQYVQPLVKKKKKMGPFGRTPVFCPMFLDPRVCY

SEQ ID NO: 179414 - protein, 115 aa, Oryza sativa
  Clone ID: PAT_MRT4530_7687C.1.pep
HPSTAMPVCPVPRHGRLSAGAGRAPHLAAYSAPGGFPPAPTPAPPSSSMRTAHTWRELGPSFVLLHACMGQMPIRMHPRVLHTCQRIRAFVRTYVRQRIKLLLYHDIAVCLKNTK

SEQ ID NO: 179415 - protein, 87 aa, Oryza sativa
  Clone ID: PAT_MRT4530_76880C.1.pep
VSSSSAATLTIFPRNHRRAADDRLCSQRTRNLIRASQPALIDRLLEISHAVMVYNKKNTTASRHTTESEEGTHSFEIVGDSLHKASA

SEQ ID NO: 179416 - protein, 1008 aa, Oryza sativa
  Clone ID: PAT_MRT4530_76881C.1.pep
MAPAAAVSAAAPAGAGETRRLAGEVARVLDECRASLAVHPRKLRELAALRSSSPAAAGRFLPAFCAALTPLFDLAKRSAGAERVARFAAAFASASSAAAGCGGGDGFLEGFLRFLLAGSAATHRPARLRSCQIIFEIIMRLPDDAEVSDEIWDEVIDGMKVRVQDRIPGIRAFAVRALSRFASDGEDSDIVDLFLETFEKEQNVEVRKAIILSLPPSNATLETVIESTLDRTSLLHRGLSDRSASVNSECLKMLKDEWLMKYCSGDVITLLRFLDVETYEEVGETVMGVLMKDGSVRVQDGQTIRQYFTANTEDEAEKVSNIQLMDAEVALYWKIMCKHLQAEAQIKGSEAATTTGTEAAVYASEASDKNDLLDSVLPSTISDYVDLVKAHLSAGPNYHFASRQLLLLGEMLDFSDTMNRKIASSFLHELLTRPLEHEVDEDGNKMAIGDGVSLGGDKEWAKAVAELAKRVHASVGEFEMVVATVVEELARPCRERTADFMHWMHCLAVTGLLLENASSLQSLQGKAIEPLELLQSLLLPATKQNHDDVQRVALRCLCLFGLLENRPNAELVKQLRLSFINGPDLVSAMACKALIDLVTWHGPQEIDQTIGIESSDATNEKSQFTTVDVSNMNDDDLNIGVLDILFSGFLKDDWEFNLEGDNHDNVPTILGEGFAKILLLSENYARISADLHPIILARLVSLYFMEETKELKRCVSSAFVPVMRAMWPGLYGNVGGSAHAVSKRRKYAAQAARFMVQMVQTPLFSTETTEQASSSPESQSTKPDMLNNFDISEEGLAIRIAVEVANCPDKKTAAAKAYCLALCKVAVLLRFRQSEQKAIKCMRGLINALAASASSDKDLMKELSQMASRLRSLDEHPEEELPQDEAEEIFKKLGLDAGFRLETNSVVPPTPAPRSVRPPPSRRRARRSPSSSDDSDIDGQEDNLHATSVSRVAATPVVMTAARSQRASKTAAMSKMSAKPTVAASSDDESDDQSGVTSGDDSSDEDSS

SEQ ID NO: 179417 - protein, 199 aa, Oryza sativa
  Clone ID: PAT_MRT4530_76882C.1.pep
MSDRRHDREKPRDRDRERGRDGERDRELDRPRDRDHRDRDRDKERDRDRDRDRERRRGERDRKRSRSPSADRSHRRHSHSHSHRGRSSPSPDAGRHKRRRDGSPAAAATDHKDDKKPEAPVVPKSAAGDGVAPGDGDVDVEELEMMKMMGIPVGFDSTKGKHVPDADVSGVRVVTKRQPRQYMNRRGGFNRPLPPERNR

SEQ ID NO: 179418 - protein, 46 aa, Oryza sativa
  Clone ID: PAT_MRT4530_76883C.1.pep
GTQNAQNISIKSPILYATFLNRKPYTVLYTFLTTLTCIKIALLTTI

SEQ ID NO: 179419 - protein, 185 aa, Oryza sativa
  unsure (1)..(185): unsure at all Xaa locations
  Clone ID: PAT_MRT4530_76884C.1.pep
LLQFAHRKTAKVPVISYRSKXPAGWKSEWFYVKVDEDKQKLVQSPLELTFGETRPHCNMTPEGQTQRAMDEFRIIAEHIGTRDLVQEFLAFKVFPTLKKWGMPKLKGQKKEGDLVRLPYHFRFKKYFKKPCQEWLDTVEVMCNAILGNYSKKEDQLMTAAFGTRLKRRLHRVLVHGFRISYYAQG

SEQ ID NO: 179420 - protein, 115 aa, Oryza sativa
  Clone ID: PAT_MRT4530_76885C.1.pep
MWHSSDVPTMAQFPNRIIPAKDHSSDQIHVAHVDDNELHNGRFATFDVSAVIRVLGDAAQCSGYAVAEEPRLQDDEQHILLLVLSARTRFNVVYLYVLDVLAVHSPRTLTNLLRR

SEQ ID NO: 179421 - protein, 73 aa, Oryza sativa
  unsure (1)..(73): unsure at all Xaa locations
  Clone ID: PAT_MRT4530_76886C.1.pep
GCMERYSQESTSPCSIIKYLVYQWIQHAIDTVLDIDRFSDGMTMLYREENAQRQXHWRNYHSCVPTSRLHCGN

SEQ ID NO: 179422 - protein, 321 aa, Oryza sativa
  Clone ID: PAT_MRT4530_76887C.1.pep
MAAVVTNRRVILKRYVTGLPSEDDMEVVTAKTTLAVPAGSEAVMVKNLYVSCDPYMRGRMTRHEVPSYVPDYVPGEVITNCGVMKVVSSGHPDFKDGDLVWGVTGWEEYTLVNNPKPYLHKINYPEFPLSYYTGVLGIAGLTAYGGFFEVPKPKKGDYVFVSAASGAVVKLLKTKFGFHDAFNYKKELDLEGALKRCFPDGIDIYFDNVGGAMLDAVLPNMRIGGKITICGMISQYNLERPDGVRNLFYLFAKSLRMEGFLVSNYIAIYHRYEKEMAGYLREGKVVYVEDIVEGLEAAPAALIGLFTGRNVGKQLVTIARE

SEQ ID NO: 179423 - protein, 143 aa, Oryza sativa
  Clone ID: PAT_MRT4530_76888C.1.pep
MGRWMHRGRMPPAHQHPSRQASLPPLVVPPRTKPASTATRSHLLVSCRPPLPLDVPLRAEPRRCTKAAEHFLAHVALPMGDTRGDATTDFLLPSSFSASPLPERVPAKPRGRKDDDGRALPSVRSDNPGSWPGCGVGNLRRSG

SEQ ID NO: 179424 - protein, 137 aa, Oryza sativa
  Clone ID: PAT_MRT4530_76889C.1.pep
GCRNSARGSHRSVSSFIRRFRRRLQMGTTRSIPLPNPPLPLRSPPPSPSPPPPPPPPCLRLSLPGPCWTATRAVTPPPTQIRDHPCGACAWLPKAVTRGGSMPWATTSKPASTPNRWCGVWIWKRASPMPQNSPLSP

SEQ ID NO: 179425 - protein, 56 aa, Oryza sativa
  Clone ID: PAT_MRT4530_7688C.1.pep
NQLTGRGCTTLGTGKPRRYPTQTLWSSHCFSLLAEHLKGPYQINSRIVAHPKRRRG

SEQ ID NO: 179426 - protein, 293 aa, Oryza sativa
  Clone ID: PAT_MRT4530_76890C.1.pep
MEAAAIHAPTTTTSSDSGSCVTNGTREKREISKHKQLKRKRSTSPAPPPGCGGGQGQEAAVETDADAGAAGRGGGAGEEESSSCGGAGAGEGERKRGDAGRHPSYRGVRRRSWGKWVSEIREPRKKSRIWLGTFPTAEMAARAHDVAALAIKGRAAHLNFPSLAHTLPRPASTSPSDIQAAAALAAAAAATDQCESSSSAVAAATATDAEAAESTSSAAASPCAATSSVEENALFDLPDLLLDLSDGLWCSPVWTTAPADQYDAGDDGDDAAAPLLWAEQCWMDAPAAPVQPD

SEQ ID NO: 179427 - protein, 77 aa, Oryza sativa
  Clone ID: PAT_MRT4530_76891C.1.pep
NSSIYVFGILHIAFVHESNSHKLTTHMPTNQFSLSNLQSISSWTMPSTKKQTQQRPGNTDDRSKLVPAKANTLGNKN

SEQ ID NO: 179428 - protein, 58 aa, Oryza sativa
  Clone ID: PAT_MRT4530_76892C.1.pep
MEPTRSCLRSRYVHTSSCSCSYIGRGTTKVGARVDGDWWWNGRFRAIGETCFITVAAF

SEQ ID NO: 179429 - protein, 184 aa, Oryza sativa
  Clone ID: PAT_MRT4530_76893C.1.pep
MAHLVWMLGENGEEKSFENPNELLPLSRLEEIGVLYWHLDPKKSESEEELTKIRRERGYSYFDRTEICPDKLENYEEKLKSFYCEHIHADEEIRYCLEGSGYFDVRDKDDKWIRIWIKEGDMIILPAGIYHRFIVDSNNYIKLMRLFIGEPVWTAYNRPQEDHPVRQEYVKNVKGDTGFALAAH

SEQ ID NO: 179430 - protein, 95 aa, Oryza sativa
  Clone ID: PAT_MRT4530_76894C.1.pep
MYASDGATGENGSREHVTAIDADIMMQGCRGGRIHGFAPPRIMSHLHGGKDALPQEAPESAAPQAPPQGDDEWRQPRRYLSRCLPTSMVGNNRSS

SEQ ID NO: 179431 - protein, 1548 aa, Oryza sativa
  unsure (1)..(1548): unsure at all Xaa locations
  Clone ID: PAT_MRT4530_76895C.1.pep
LQESARGSHLPWPPPPPSTSTSTSSSPPPAAAAASSSPVPTPIPSPPADAASLPTXATASAAAAVGPLVLPRTPLARADQPPSLSEWERVLLPIDPGVVLLDIAFVPDDPSHGFLLGTRQTILETKNGGNTWFPRSIPSAEDEDFNYRFNSVSFMGKEGWIIGKPAILLHTSDAGDSWERIPLSAQLPGNMVYIKATGEQSAEMVTDEGAIYVTSNRGYNWKAAVQETVSATLNRTVSSGISGASYYTGTFNTVNRSPDGRYVAVSSRGNFYLTWEPGQPFWQPHNRAVARRIQNMGWRADGGLWLLVRGGGLFLSKGSGFQFFYRGLNDAHAISYLHPPNQITEDFEEASVQSRGFGILDVGYRSKDEAWAAGGSGVLLKTTNGGKTWVRDKAADNIAANLYSVNQLIRVQLTLLQTISVSANLAELVDGLYPLSFLNAILVALHLMPYALEVTDRRPQSVPHTRCSTLVDHNTNISFSKGHLIHKPENRNITFATISIGHNSDQKLVPFLPNILQDINKRSCFASGAAGTEIIQFPQPIILYWLDCPNEKNMHDQVDHSKPFSSGSPPPGSTLRQRQHRRKIKKSLTALPPSNVLVNNSSRSVTAPVRSDSDILHDDDKPPRKSPKKKGNKKGKHYRRAVCKGLNLPSETHCEENIDAASPVEVLTDLLADKLSETSSSASSLVKEAHFGEENGGDSGCTGSSNRTVGEIFSCKDVHYLNDESNNYERSLCARVSNSNDAIAYSLFKKLERDNSVNCSVNDEVRDSCHPIGAHLSITHAEDSNDSFGCSSCCSKNVADSSNHTERVKCSSEACSSKTSLPVIPGRSRTRLKEISSYSLTATNGVIGTNKNKHSGKYSSTSVWQKVEKLNVENTSRAGCMVDSAIQNKDVLENINKVAQHNLTRSMKINQRRKACNQHSPDERIEMEHAKENDALNSCQAFSRYKYKKQTSILYQQTSLSSDQGTSQSSGNYHAPKNGIVMVPKNHLQQKDGLPMMQLVYDKDSSVDTGVGSNGSADGDGSSQSGFEKAALASCNMGSYLVPQDTCEECTSTMQADPHYSSTENKAISTNSNSRNLCADPSPAEMDERCYVKLTMENTPQECPKLYSATGKQFLTNCIPISANIGVETNVSSVLASANNEVNKLAAEISDKPNSSGHLDLRCQPHTDTGTDFNKMREAVCDAYRAQQRVEDVQVIIGRPLADFEQFISSASPVLYCSTCPADRNFCSPEWVRDGLCFHQSTDITLSRIWQWYEEPCCYGLEVKAQDFRRSKGLWNSPHQFTTYFVPYLSAVQLFGQAKRASTGRVDKEAAGMDVTSKTSPCPSSLPILTKLLPQQLRETISSSDLYTKGDQQFGNGELIFEFFESEQPFWRRQLFDKVKELISGVKPSSCQISGDPKNLELSLCDLHPASWYCVAWYPIYRIPDGKFQAAFLTYHSLGHWIVQGASEQADDSRVVLPVTGLESYNDKGEWWFEVGRCSGEEDAAESREEESVWREASEVVKERVRTLKEAATVMSRAKVVMSNRSNRHPDHDFFLSRQLYQEPRKNH

SEQ ID NO: 179432 - protein, 94 aa, Oryza sativa
  Clone ID: PAT_MRT4530_76896C.1.pep
LAAVKEDRRRQRAQVDLAVVAMVPVLLVADGTPVCILTRTFSDDLALELLPPPLPAAGPKLQPRPSASHTSSSSSEQPTRRPHRKLSSLCTTKG

SEQ ID NO: 179433 - protein, 124 aa, Oryza sativa
  Clone ID: PAT_MRT4530_76897C.1.pep
PPPLVGPARAKGLPSISPRGSPFAIFCNGGKKIKTPNPPGIGGGLSVQFYPSARKSPGKGGAPFVYKCGAKVGGYNPIYFPEEWSPPGYPPVGGTPRLFIWAVTPPGVLGGGAPLVLNTRAPPG

SEQ ID NO: 179434 - protein, 68 aa, Oryza sativa
  Clone ID: PAT_MRT4530_76898C.1.pep
NHSKFKIHCRERTDLIFFGAKNNCSASAGLDEEGSPSWGCRWDGSRQSHGCCIRIGWRTRTHALERCS

SEQ ID NO: 179435 - protein, 159 aa, Oryza sativa
  Clone ID: PAT_MRT4530_76899C.1.pep
MAWSARARRGAAGGRRHLSARKEEEAVAKRSGGGSGHQSYPFLPLDASGGGGADGGGGADSTGRSSPRSGRKRGAGRQWRQRQRSPRPRAAAPGGGGEPSAGGGCRCWRAIGYWRFSPPPVKSVFGRLLRLLKAPGLWEMFQKCFHCPVNAIFRFNCFC

SEQ ID NO: 179436 - protein, 1602 aa, Oryza sativa
  unsure (1)..(1602): unsure at all Xaa locations
  Clone ID: PAT_MRT4530_7689C.1.pep
MPRYKPEYLFGTEGFVQELRTMSFAIGFGTAPLYAQIPHDRDEEKCCIKVTLNSNREDIPSVMFEAGGGSYIHACQEVARITIGELRESYNDQLADTEYRYHPRQPQGNDRGSYLEPAGIENDATTRHLVEMLWAMDETRVEIVLAAQDREDRNRGKICKLEDKVDRLEKELAALKGEAPPQKARVRLTARKGALFVPRYQLAPKVRVVEKEAAPAPADPPVVNCTDQEKVSFASHHLHGPASEWWDHFRFNRTTAEPITWLEFTAAFRKTHIPSGVVSLKKEFRVLTQGSRFVTKYLDEFNRLPRYTPEDVCTDEERQEKFLEGLNDELSYPLMTGDYHDFQKLVDKAIRQEDKYNRMEKKKHRIAHFKAQQGNSQRPRLAMGPQAVSQGGSSSVVRPQRQLFNNNASNNNRSQAPRPVATPTQHQPAKREQGNKPGVCFNCGEPGHYSDKCPKPRRVKIVPAQNNSSAPASKAHVNHVAAAEAQSAPDVILGTFPVNSVPATVLFDSGATHSFLSMSFAGNHGMEVEDLRRPLMVSTPSNQALSSQRSPSVRIEIQGVPFLANLILLESKDLDVILGMDWLAKYNGVIDCTNRKVTLTSNDGQVVTVHSLPYGPLRSSLNQITLEEIPIVREYPDVFLDDLPGMPPKRDIEFRIDLVPGTTPIHKRPYRMAANELAEVKRQVDDLLQKGYIRPSSSPWGAPVIFVEKKDHTQRMCVDYRALNDVTIKNKYPLPRIDDLFDQLKDATVFSKIDLRSRYHQLRIKEEDIPKTAFTTRYGLFECTVMSVGLTNAPAFFMNLMNKVFMEYLDKFVVVFIDDILIYSRTKEEHEEHLRLALEKLREHQLYAKFSKCEFWLSEVKFLGHVISAGGVAIDPSNVESVTNWKQPKTVSEIRSFLGLAGYYRRFIENFSKIPKPMTRLLQKDVKYKWSEECEQSFQELKSRLISAPILILPDPKKGFQVYCDASKLGLGCVLMQDGKVVSYASCQLRPHENYPTHDLELAAVVHALKIWRHYLFGTRTEVYTDHKSLKYIFTQPNLNMRQRRWLELIKDYDMGIHNHHGKANVVADALSRKGYCNATEGQQLPWELCKEFERLNLGIVSRGFVATLEAKPTLIDQVREAQINDPDIQEIKKNMRRGKAIGYLEDEQGTVWLGERICVPENKELKDAILKEAHDTLYSIYPGSTKMYQDLKEKFWWASMKXKCEIAEYVAVCDVCQRVKAEHQKPAGLLQPLKIPEWKWEEIGMDFITGLPRTSSGHDSIWVIVDRLTKVAHFIPVRTTYFGSRLAELYMARIVCLHGVPKKIVSDRGSQFTSKFWKKLQEEMGSKLNFSTAYHPQIDGQTERVNQILEDMLRACALDFGGSWDKNLPYAEFSYNNSYQASLQMAPYEALYGRKCRTPLLWDQTGERQVFGTDILREAEEKVKIIQERLRIAQSRHKSYADNRRSDLSFEEGDHVYLRVTPLRGVHRFHTKGKLAPRFVGPYKIVSQRGEVAYQLELPQSLAGVHNVIHVSKLKKCLRVPIEEANLEQIEVQEDLTYVERPIRILEIDERRTRNPVIRFCKVQWSNHSEEESTWEREDELKSAHPHLFASSSESRGRDSV

SEQ ID NO: 179437 - protein, 84 aa, Oryza sativa
  unsure (1)..(84): unsure at all Xaa locations
  Clone ID: PAT_MRT4530_768C.1.pep
MRGIVELNITEGTVARKKRSVKTSGVEGDQGRGEAGRXTEASEAARGGTAKRGTGRERDEGERRASGKTESXRSRRQGQXIEVE

SEQ ID NO: 179438 - protein, 182 aa, Oryza sativa
  Clone ID: PAT_MRT4530_76900C.1.pep
MGEFSKESCPSVKNILLLDSEGKRVAVKYFSDDWSSNASKLAFEKSVFTKTLKTNARSEAEITLFDGYIVVYKFVQDLHFFVTAGDDENELIIANVLQGFSDSVGLLLRGDVEKRTALENLDLILLCIDEIVDGGIILETDANTIAGKVATNAVDGSAPFSEQTISQALATAREHLARSLLK

SEQ ID NO: 179439 - protein, 54 aa, Oryza sativa
  Clone ID: PAT_MRT4530_76901C.1.pep
MKEVIEALEKIESIKSKWREPRNSSSEDLSALESCDHLYTHLKHTTSNILLDTQ

SEQ ID NO: 179440 - protein, 138 aa, Oryza sativa
  Clone ID: PAT_MRT4530_76902C.1.pep
MARSRFLATPRLLAAVLGAAVLHGAGGVAAVAMARPLLAGSGGAEPPSAVLAAAPGPAGVVAAAQGGGVMKPDRSIAGADVILVGFAAAVVVVVFWYIRITRKNSSSGGGGGGGGGVEAARKLEILKEPPAVVVEVAA

SEQ ID NO: 179441 - protein, 136 aa, Oryza sativa
  unsure (1)..(136): unsure at all Xaa locations
  Clone ID: PAT_MRT4530_76903C.1.pep
RSLMDFSAGLSKLHRQHRCLLRSKLPPLPPPHAPSAFASRPSTASSATDREYIQSLKGSYPAIGKTTYALFNEKNMSVSQWXNVCLTASYPGRSYYGPPTHECPYCGAVFWFQERVKSLSAVSKRKIVYNLCCKSG

SEQ ID NO: 179442 - protein, 108 aa, Oryza sativa
  Clone ID: PAT_MRT4530_76904C.1.pep
MRARGDARWAMGSSSSSWARGDARWAAASSSAVAHGDTRWDTAATAGSSSSSWACGCRWRAGTPRASLPVRLTPLLVRRRCAGAGAENRAQGREEERAATLASPRSAA

SEQ ID NO: 179443 - protein, 158 aa, Oryza sativa
  unsure (1)..(158): unsure at all Xaa locations
  Clone ID: PAT_MRT4530_76905C.1.pep
AVMVPYPAQGHVTXPMLTLAELISYRGFDVTFGNNEINHRGLLRARGARALDGGHGXRYAGMDDGLPAYDANASQDKPALCHYVRTTWVPRVMSLVDKLDDQAVAAGDRDGAARHGICVVVDRHMDVGMHAMRELGLRCTTLWTGRACGFMGYYHYKH

SEQ ID NO: 179444 - protein, 165 aa, Oryza sativa
  unsure (1)..(165): unsure at all Xaa locations
  Clone ID: PAT_MRT4530_76906C.1.pep
GCPSPLAMPASPISGGGFFPPPLPYPLLSGGGGSSKDEEKRGSHLRRRXSSGAGGXRAAVAALPLSPSVASPLSSAAPLSPLXPCGGDGGIGEERGTTVVPATCGAGGGDEPHDGATPVSPLSPGSSPGCIAQAIPLPPQHSNKSDEELVANFGSPDFTIPLFPH

SEQ ID NO: 179445 - protein, 796 aa, Oryza sativa
  Clone ID: PAT_MRT4530_76907C.1.pep
MAVLSSSSHGLLHPPLRLLAAASASSGSSYSIPHARLRLAVTTPSRLPSPISSSPDPPPDVAHDEDEQEGQHHKEERDERYGFEIQVRKLPKRNRRLVRARVRVDAPLDAVWATLTDYEGLAGFIPGLSECRLLDQSDCFARLYQVGEQDLALGFKFNARGTIDCYEGELQLLPAGARRREIAFNMIDGDFKVFEGNWSVQEEVDGGEISADQEFQTILSYVVELEPKLWVPVRLLEGRICNEIKTNLFSIREEAQRIQRLQDKASSQYYTSLILKNTLQKGSIAVLTAQWEGASRRFNRIGLHKSNPELNDEMRGFLRHAESRTPRAFVQLLAAQPPRPSAAAADQCHAAATKLGFSASNPFANTALLAFYCRSRRLREAQHLFDQMPLRTAVTWNTLIYGHAQSTAPDLAVAAFARMVRAGVSPTASSVSSVLVACVRLENAGAGAMLHSVGLRCGFFASVVVGTALVDMYAKCRRLGAAQQVFGEMEEKNVATFTALVTGFVLSRRPHDAVLLVREMERSGVAPNLMTYSSLLSSFASPEDIDHGKQVHCAVLKKGLEHDPFVLSALVTMYSKCGIWEDFVKVQMSVSCQDQVSFNSVIFGLSCLGRGKEAFQHFLEMRRHGTDMDVFTFASILKAIGSSSSLLEGRQVHTLILKSGYEHGRALLFLPWPPPPTAPSPRRRTPPVAAAATRFPMRASASPSLFGRHCLATSQARTTQRPTPLPPKTNRRTITTRIRGTSGMGLGSRWPRYPSATDDSSAPGPASTARSAPSGPRSATTSAAPASSQATPSAAS

SEQ ID NO: 179446 - protein, 56 aa, Oryza sativa
  Clone ID: PAT_MRT4530_76908C.1.pep
GQRLPFLFFNRSFDRGEQTTYSSLYMPSLVVLDNLQGFGLFTEALTLVCSFQMGFY

SEQ ID NO: 179447 - protein, 95 aa, Oryza sativa
  Clone ID: PAT_MRT4530_76909C.1.pep
GTKVSLGTKIFLGAFFCSSPGLPFQTGKVCFIWISGLSNMSALFLAKKNQLRKWVFWFQSLLVKNFLFWVKNFKVVSKKKKKKKKKKKQKKLKKP

SEQ ID NO: 179448 - protein, 343 aa, Oryza sativa
  Clone ID: PAT_MRT4530_7690C.1.pep
MELSGWKPAVDQAVADLRTKVGELRQQVEQMARTPTTITKPSDLPPLLPTPSKLQVPALKEEEPAPMEGESSHGPNGHRVATIPRGKAIGEESSPKSPPAKGVMGIGSMGTTNAHIEMMSWEEFVDAVCAKFGREEFQGVVRQFNKLRQTGSVTSYAKRMKWPKLFGGNLDGWNFLLTTVGEFGLDELYLLELDAKGLYHTCGERWSHEHKCGPTVQLHVVEELLDLLENFDENQTATVSDEIESEETEVNGEVCQISKEAMLETETSGTLRLQVAECIAREPERWNKSRFAGRDKRRRRLPGKMQLLFVFVSPLHRLGVKPFPKEGEMLRTLLLVQQLKAIP

SEQ ID NO: 179449 - protein, 1392 aa, Oryza sativa
  unsure (1)..(1392): unsure at all Xaa locations
  Clone ID: PAT_MRT4530_76910C.1.pep
MAEKPPPSPSSAREPDSVKAKILKLGLSEVDESNIMPITLDKLTPEQHKDLEAMMQQAKNQFLSSFTQTRKGTLVQKYKLMVVADVPGTGSSKDGELKQAPDGMAQPGDQGVANGSQGNQGDGFQEVQGLGSQGDNSQGLQGGNLSQNGNAAHELFNNFQDRVDYAVHNALINQSGVLVNTLSNMMKSMVDGSMAEYQATGPVYLQGGVFPDYRPLITNTQPSVQTVPPNAPSAQPTAPPIQQTPPRQQFVQPAXQTPPIQQVVQPIQQTPPRRQVLQSIQQMPLTQQPNYQNYQGGNLNYQYQPPSPQAQYQQGGXTQSQFVLQYNQFEPKQQQSQGATQQRPWADVITDVMREQFGLKPKDAGNLYRQPYPEWFERVPLPNRFKVLDFSKFSGQDGVSTYEHISRFLAQCGEASAVDALRVRLFRLSLSGSAFTWFSSVPYGSINTWADLEKQFHSYFYSGVHEMKLSDLTAIKQRHDEPMHEYIQRFREMRNKCYSLNLTDAQLAVLAFQGMIAPIREIFSSEDFDSLSHLIQKVTLHEQRSAEARKNPKRVNHVCPYIYGSDNDDDDCEIAAAEWGVKNSRKEERQQILVAIEGGKIKFDDSKRPMKVDGNPFPVNMVHTAGRTANGGRTRGFQVNSAKIINKYQRKYDKQQERRYEEDNGGFDPHWGCELFRFCYNEGMRLPSIEDCPGCSNVAGRSSRSYDGGNRLKQTRVPIHQRLGPVNQDYSQKDDGDRKIQWCPSAEFEIKQTDVDKVEEESAKLVLSPEQAIFEKPEGTENRHAKPLYINGYVNGKPMSKMMIDGGAAKLGRNAEDLIKTNMVLKDFGGNPSETKGVLNVELTVGSTTIPTTFFVIDRKGSYNLLLGVRPHQQPPRRCKADMLEPVKAEIKRLYDAGFIRPCRYAEWVSSIVHVIKKNGNVRVCIDFRDLNKATPKDEYPMPVADQLVDAASGHKILSFMDGNVGYNQIFMAKEDIYKTAFRCPGAIGLFEWVVMTFGLKSAGATYQRAMNYIYHDLIGWLVEVYIDDVFLGFLVHERGIEITQRSVNAIKKIKPTENKTKLQEMIGKINFVRRFISNLSGRAPASAMNPIIKPWPFRGWGIDMIGMINPPSSKGHKFILVATDYFTKWIEAIPLKKVDSGDAIQFVQEHIIYRFGIPQTITTDQGSIFVSDEFVQFADSMGIKLLNSSPYYTQANGQAEASSKSMIKLIKRKISDYPRHWHTRLAEALWSYRMACHGSIQVPPYKLVYGHAAVLPWEVKIGSRRIELQDGLTADEYYNLMADEREDLVQSRLRALAKVTKDKERVARHYNKQVVPKTFSEGELVWKLILPIGTRDNKFGKWSPNWERPFQIYKVVSKGAYMLQGLHGEVYGRALNGKYLQKYYPSVWVNA

SEQ ID NO: 179450 - protein, 108 aa, Oryza sativa
  Clone ID: PAT_MRT4530_76911C.1.pep
GKGFFLFHPKKFPPKRKKGGGAKLKNWKGLFRGKTTGQKGVWGGKKQKRAPMIPNFPPKFHWDYLGQKKGFKKKKTGGNLMGGGGTFWGGGRGAKRVPYPLGKRGTGG

SEQ ID NO: 179451 - protein, 926 aa, Oryza sativa
  Clone ID: PAT_MRT4530_76912C.1.pep
MATAKRTLRVTCSINFLAQTSLMCGLVAEFPAKGYVELLETSFRYRFSCLGLIQLWGSADVLNICKMRRFFFFGSSTASTGNGGKTPSDDDSRIKKKALDGGDSNGSSSSASNSPVTKVCRSKSRRRNLNNEEPSNPKQLRRSMSFSSPAGNSFLKDRSFSFSGDVPSSLFNESDAPDHVAKSTRLTNLLNKNEVLDRYIDGEQEATILGERQKQNSPTRSAVSNLGRPPRPQSTVPSLPRLTKEILETYPYEDVKDEHLHQLAQEDTRDTCKITTLCNASRNHAGLLDASERFSHLEDYKSESVTSVEDIYEDLQDFNHPSIDPTSEDVETDDKLLQRAKEVEAKFMVSSEKKYELNMSKNKRLSANDMFQMIQCLTEDRKQLAYELSSQIKARLTERFAAKEQCKNLKKELDIRTRRLEKEKMEVQTTLEKEMDRRSDDWSIRLSRFQCEEERLRDRVRELAEQNVSFQREVTFLEAEKVDASNKVACLEMGNKKLIDELEKVRNNCDNLQNSSVELHDCFTKAVEEKDHLRKFLEDKDGENKALHKVISRLQTICNEQERTISGLRQGYSTELDKKSVECSDKIKKRMQMELIRLTGVEQKLRGEVQSCHLESESLRQENIALLNRIQSTGNGPRLSSIRLDQELLARVDNLQIHGLSLLDKTSQLCIKLLELMKCKRHENEAGNGIAALTVTDYTLEFQSIKGRIQSLKQSLGIISSVLTEKENIKGSSGETVVGSSPSREHTDELPLDIPELKLKEEAILNRVLKEALLSKELDVEQLESDLASSLRIQDVMRNEIQRVQDELSCMNHKAKHLELQGLKKDEIISQVQLDFQESAKEISALRGTLKTVTDERDLLWQEAKQLRKTISIMQNETASLKKKIEALEEDILVKEGQISILQDNIKNPQLDFICSPRSVKEFGLE

SEQ ID NO: 179452 - protein, 1682 aa, Oryza sativa
  unsure (1)..(1682): unsure at all Xaa locations
  Clone ID: PAT_MRT4530_76913C.1.pep
MSSSASPSAAPSTEYAEHLSNLVAIPSLLHENYYFLGPVGNPDPTKFIIGETNRIPFRLTNPDLGPMTPTLVDIIIITGLDVTSSANPMSLNTKNQYEFKTKSIGGWLGYVAAYMGQGSVTPPEHVAFLLMWLEKFLFCGSSCGFTTNWQFVAESLETKRQFPLGKILLGYLYQMLNNASAKLAVGSVIGVGGPWWLLQSWLNLVVMKFVNRPSVTEAEFSRLEPIVDNDGEERTHRRCTSYGEYASTPTDAEAKLSAELLKDWFCSFYEGFQKDTRVWFLYEDSALLENPLDFRFEDINHERYQKPREIFSAAISPCILPVGIHQGRNIQVSYEFYHPMSSARQLGMGQLPIGLFFADKIQYRGEISSTLMMDRVLNLQGPPLGSIDNIELATFRSKAFDRWWGEWKLHLFHQSTSMYMTDLFPDVVPQTTEFSPPRQSNSGRNIEYAPGLIPNGGGPSPPVIGFNAPKTSTLLQGLIREPADAGKKRKTRSSAADTSAPAPKKQTKPKKIKLVDDLPALDPSIEQALDEEDIEDDDQAAAETRKGTLVQKYKMKVVPDDPETSSSKEGEKKKVLDGSAQPSDKGATDGSAQENQGDHSQGVHGVQGDGTHGPQGGNLNQDCDAAQDFFNNFQDRVDYAVHNALINQSGVLVNTLSNMMKSIADGSIVEHQAAGPVYLQGAQPTVPVSTSPPAPATSGCTTNPATSRAXVQQTPPRQQALRPIQQTPLRQQVVQPIQQQGSMNASAGFATPGGQPVQQVLNQVVPEHLVHHVQPDGTVMPQVIPEHLGAAQQRPWVDVIADVMREQFGLKPKDTRSLYRQPYPEWFERVPLPNRFKVPDFSKFSGQDGVSTYEHISRLLAQCGEASAVDALRVRLFRLSLSGSAFTWFSSLPYGSINSWADLEKQFHSYFYSGVHEMKLSDLTTIKQRHDEPVHEYIQRFREMRNKCFSLSLTDAQLADLAFQGMIAPIREKFSYEDFDNLSNLIQKVTLLEHRSAEARKNFKKVNHVCPYMYGSDDDDDDSEIAAAEWVGSKKVIPCQWVKSSGKEEKYNFDITKADKIFDLLLREKQIQLPAGHTIPSAEELGKKRYCKWHNSGSHSTNDCKVFRQQIQAVFEKPEGTENRHFKPLYINGYVNGKPMSKMMVDGGAAVNLMPYATFRKLGRNAEDLIKTNMVLKDFGGNPSETKGVLNVELTVGMARRQDRDRASQQMENPSYYFEGVVEGSNIYTKDTVDDLDDKQGQGFMSADDLEEIDIGPGDRRRPTFISKNLSPEFRTKLIELLKEFRDSFAWEYYEMPGLSRSIVEHQLPIKPGVRPHQQPPRRCKADMLEPVKAEIERLYDTGFIRPCRYAEWVSSIVPVIKKNGKVRVCIDFRDLNKATPKEEYPMPVADQLVDAASGHKILSFMDGNAGYNQIFMAEEDIHKTAFRCPGAIGLFEWVVMTFGLKSAGATYQRAMNYIYHDQIGWLVEVYIDDVVVKSKEIEDHIADLRKVFERTSTYGLKMNLTKLRHYLLSNECTVICKADVVKYMLSAPILKGRVGKWIFSLTEFDLRIDLVIISPRGACFEFAYTIKPYATNNQAKYEAVLKGLQLLKEVEADAIEIMGDSLLVISQLAREYECKNDTLMVYNEKCQELMKEFRLVTLKHVSREQNIKANDLAQGASGYKPMIKDVKVEVAAITADD

SEQ ID NO: 179453 - protein, 588 aa, Oryza sativa
  unsure (1)..(588): unsure at all Xaa locations
  Clone ID: PAT_MRT4530_76914C.1.pep
MAEKPPPSPSSAREPDSVKAKILKLGLSEVDESNIMPITLDKLTPEQHKDLEAMMQQAKNQFLSSFTQTRKGTLVQKYKLMVVADVPGTGSSKDGELKQAPDGMAQPGDQGVANGSQGNQGDGFQEVQGLGSQGDNSQGLQGGNLSQNGNAAHELFNNFQDRVDYAVHNALINQSGVLVNTLSNMMKSMVDGSMAEYQATGPVYLQGGVFPDYRPLITNTQPSVQTVPPNAPSAQPTAPPIQQTPPRQQFVQPAXQTPPIQQVVQPIQQTPPRRQVLQSIQQMPLTQQPNYQNYQGGNLNYQYQPPSPQAQYQQGGXTQSQFVLQYNQFEPKQQQSQGATQQRPWADVITDVMREQFGLKPKDAGNLYRQPYPEWFERVPLPNRFKVLDFSKFSGQDGVSTYEHISRFLAQCGEASAVDALRVRLFRLSLSGSAFTWFSSVPYGSINTWADLEKQFHSYFYSGVHEMKLSDLTAIKQRHDEPMHEYIQRFREMRNKCYSLNLTDAQLAVLAFQGMIAPIREIFSSEDFDSLSHLIQKVTLHEQRSAEARKNPKRVNHVCPYIYGSDNDDDDCEIAAAEWVRSKKVIPC

SEQ ID NO: 179454 - protein, 1124 aa, Oryza sativa
  Clone ID: PAT_MRT4530_76915C.1.pep
MSTVHDEDHSISSSQFDEMDESNSTIPVPSESSTDEKPFPFLGLLCYADAVDWLLMALGTVGSIIHGMAFPVGYLLLGKALDAYGTNINDQEGMVHALYKVVPFVWYMAAATLPAGMVEISCWIYSSERQLARMRLAFLRSVLNQEVGAFDTDLTTAKIITGVTNHMSVIQDAIGEKSPLLSFLVIPLILVIGATYTKQMNGISLSRNAIVSEATSIVEQTLSHIKTVFSFVGEKRAMRSFVRCMDNQYKLSKKEAVIKGIGLGLFQAVTFCSWALMVWIGAVAVTSRKATGGGTIAAIMSILFGAISITYAAPDLQTFNQAKAAGKEVFKVIKRKPSISYEKHGSVLGKVHGEIKFRRVHFAYPSRQDKPILQGFSLSIPAGKVVALVGSSGCGKSTVISLLQRFYDPTSGSILIDGHSIKKLDLESLRRNIASVSQEPSLFSGTIKDNLRIGKMDANDDEITKAARTANVHSFISKLPNEYLTEVGERGVQLSGGQKQRIAIARAMLKDPPILLLDEATSALDSESEKLVQDALEKAMSGRTVILIAHRMSTIVNADTIVVVENGKVAQTGTHQELIEKSTFYSNVCSMQNIEKEAGTRVASSSDNVIEDEIDEVYDRQLSPKQGQQNKLEQLNSKQPKQEKDDIAKILLGSSSAAISGISKPLFGYFIMTIGVAYYDLDAKRKVSKYSLIFFTAGVITLASNIFQHYIYGVVGEKAMKILREAIFSSVLRNELGWFEKPKNGVGFLTSRIVSDTSTVKTIISDRMAVIVQCISSILIATVVSMYVNWRMGLVSWAVMPCHFIGGLIQAKAAKGFYGDSAIAHQELVSLASEAASNIRTVASFVYEDEIIKKAELSLQEPMRVTKIESMKYGVVQGISLCLWNIAHAVALWYTTVLVQRKQASFENSIRSYQIFSLTVPSITELWTLIPMVMSAIAVLNPAFEMLDRDTQIVPDRPENPSDGWLMGRTEFQDVSFNYPSRPEVTILDGFSLVIEPGQRVALVGPSGAGKSSVLALLLRFYDPQRGRVLIDNKNIKDYNLRWLRKQIGLVQQEPILFNSSIRDNISYGSEETSETEIIQAAMEANIHEFISSLPKGYDPVVGEKGSQLSGGQKQRIAIAKNSS

SEQ ID NO: 179455 - protein, 40 aa, Oryza sativa
  Clone ID: PAT_MRT4530_76916C.1.pep
LIQQTPPIQQVVQPIQQQVVQSVQQTPPRQQALRPIQQTP

SEQ ID NO: 179456 - protein, 1776 aa, Oryza sativa
  unsure (1)..(1776): unsure at all Xaa locations
  Clone ID: PAT_MRT4530_76917C.1.pep
MMKSMVDGSMAEYKATGPVYLPGGVFPNYRTLITDKQPVIQSALLSASPAQPTAPALAPVPAAPPLAPGQLVNPQLLVREQPQHAGQNVTRLTQDQGSMNASAGFATPGGQPVQHATNQVVPEHLVHHVQPDGTVIPQVIPEHLVLNIQPDLQNYQGGNLNYQYQPQSPHVQYQQAGSAQPQFVPQYNQFEPIPQQPQGTPQQRPWADLIADVMKEHFGLRPKEAGNLYRQPYPEWFERVPLPNRFKVPDFSKFSGGIYEMKLSDLTSIKQKHDEPVHEYIQRFRXMRNKCYSLSLTNAQLADLAFQGMIAPIREKFSSEDFESLSHLTQKVALHEQRFAEARKNSRKVNHVCPYMYGSDDEDDDSEIATAEWVRSKKVIPXQWAKNSGKEERYGFDITKADKIFDLLLREKQIQLPAXAAIEGGKIKFDDSKRPMKKRYSKQQERYHEEDGDGFDPHWGCEFFRFCWNEGMRLPSIEDCPGCGDVAESSSRSYNRGNRLRQTRVPVHQRLGPINQDRGQEDDENRKTQWCPSAEFGIDRADVDEVEEESAKLVLSPEQTVFEKPEGTENWHLKPLYINGYVNGKPMSKMMVDGGAAVNLMPYATFRKLGTNADDLIKTNMVLKDFGGNPSETKGVLNVELTVGSKTIPTTFFVIDGKGSYSLFLGRDWIHANCCIPSTMHQCLIQWQGDMIEIVPADXQSMLPVPIWLSGKWMALIFLSGKGVVEGPNVYTKDTIDDLDDKQGQGFMSADDLEEIDIGPXAIGQGRHLLLIELLKEFRDCFAWEYYEMPGLSRSIVEHRLPIKPGVRPHQQPPRRCKADMLEPVKAEIKRLYDASFIRPCRYAEWVSSIVPVIKKNAKVRVCIDFRDLNKATPKDEYPMPVADQLVDAASGHKILSFMDRNAGYNQIFMAEEDIHKTAFRCPGAIGLFEWVVMTFGLKSAGATYQRAMNYIYHDLIGWLVEVYIDDVVVKSKEIEDHITDLRKVFERTRKYGLKMNPTKCAFGVSAXQFLGFLVHERGIEITQRSINAIKKIKPTENKTELQEMIGKINSIRRFISNLSGRLEPFTPLLRLKADQQFTWGSXQQKALDNIKGYLSSPSVLIPPQKGIPFRLYLSAETRDSPVEKLLCLCLYFSCTRLRHYLLSNKCTIICKADVVKYMLSAPILKGRVGKWIFSLTEFDLRYESPKAIKGQAIADFIVDHRDDSIGSVEIVPWTLFFDGSVCTHGCGIGLVIISPRGAXFEFAYTIKPYATNNQAGYEAVLKGLQLLKEVEADAIEIMGDYLLVISQLAGEYECKNDTLRVYNEKXQELMKEFRLVTLKHVSREQNIEANDLAXGASGYKPMIKDVQIEVATVTADDWRYDVYWYLQDPSQSPSRKLRYKALKYTLLDNELYYRTIDGVLLKCLSADQAKVAIGEVHEGVCGTHQSAHKMKWLLRHAGYFWPTMLEDCFRYYKGCQDCQKFGAIQRAPTSAMNPIIKPWPFRGWGIDMIGMINPLSSKGHKFILVATDYFTKWVEAIPLKKVDSGDAIQFVQEHIIYRFGIPQTITTDQGSIFVSDEFVXFADSMGIKLLNSSPYYAQANVQAEASNKSLIKLIKRKISDYPRQWHTRLAEXLWSYRMACHGSIQVPPYKLVYGREAILPWEVRVGSRRVELQDGLTADEYYNLMADEREDLVQSRLRALAKVTKDKEQVARYYNKKVVPKTFSEGELVWKLILPIGTRDNKFGKWSPNWEGPFQIYKVVSKGAYMLQGLDGEVYGRALNGKYLKKYYPSVWVNA

SEQ ID NO: 179457 - protein, 85 aa, Oryza sativa
  unsure (1)..(85): unsure at all Xaa locations
  Clone ID: PAT_MRT4530_76918C.1.pep
PIKSPSXISPSCSSWSLIKSNSNVKLVNGVGPYRTSAARIVHTXMMERRRGKEGRIRFRLRGELDLPFPASARCELGYIYTHTDC

SEQ ID NO: 179458 - protein, 163 aa, Oryza sativa
  Clone ID: PAT_MRT4530_76919C.1.pep
MDPWYIRKSIAPLLLAKHSSRTSSSAVNGGSISSGAADSTTLARSTTARRIHLTTPSCFDNNDDSGRLAVLSSFDDNDRYLVAPRHGQAKRPVRRRHEKHLDARLGDASESKPPQPISLVKPFPSNQSQPKLETNPFYPLQPNPLAGLAISTPLIIDPTTRYS

SEQ ID NO: 179459 - protein, 370 aa, Oryza sativa
  Clone ID: PAT_MRT4530_7691C.1.pep
MGLSRRFLNLIVDNRFPGAVSLLSIDLRRHKLFNTTTPADLPLINRSVSESERPPCVANANNHQKKRKKKTVKMRMLHLPAPTIDLEASSRGYSWNIKCSPLTDRKLLCTDNYGRHVLFNSEARQVEDLPFLNEPKNSTFSIFIPGAATDTNGCDDNGGGGSSIYIMERCPSHEQEQRLLSVKHTWIRVGDWTLPFTGKVEHVPELKLWFGICTNDWKLGAIDLSTIISTATMEDFQPQLVGTWKELEAPQHWSEMRCPQLANLGSGRFCIARFFHTWTTPMEPNSFGYDSIKVHSFSDFDSDSDSIEFEEHSFTVLTGTDVVPCVHDGNGTGNGNYANGSNGKVELRMIKHNSKSHISYGIDGTIRLVF

SEQ ID NO: 179460 - protein, 119 aa, Oryza sativa
  Clone ID: PAT_MRT4530_76920C.1.pep
MAAMAAVADEADARDGESATAVPRRWLRRTGRWSQRTPPPPTVAANEADAGDDANLGGGGGRTQRLQRQWTTTMGTVAIATNLDTDDRYKGPQNLGRSVQLGDKLVARSRSRLTPLSST

SEQ ID NO: 179461 - protein, 68 aa, Oryza sativa
  Clone ID: PAT_MRT4530_76921C.1.pep
DRFYFSQFIVRYLNSKFGFGEMCFPFKLQGGINKKRVETNWTFLSLLFFQEDMIQFADHLLQTSDCIC

SEQ ID NO: 179462 - protein, 70 aa, Oryza sativa
  Clone ID: PAT_MRT4530_76922C.1.pep
PTPLAAPRAREGLHAACAPCHLAHRRVPPPHYCSLAASPKPRTALLPLRRPKRVEIGAKTKGIVLHGFNI

SEQ ID NO: 179463 - protein, 81 aa, Oryza sativa
  unsure (1)..(81): unsure at all Xaa locations
  Clone ID: PAT_MRT4530_76923C.1.pep
PSLGCNLGRPXAKPWPQRWRWGFGRTMGWPKPAHLRLATSSIASLRRLVNFGLIHRVKSAFLAHSYTSLVLDIVRLIYRLC

SEQ ID NO: 179464 - protein, 1128 aa, Oryza sativa
  Clone ID: PAT_MRT4530_76924C.1.pep
MSKLALLLRGAAMILWLLISQTPSTCCVHARCVTGERDALLSFKASLLDPSGRLSSWQGDDCCQWKGVRCSNRTGNIVALNLRNTNNFWYDFYDADGLNLLRGGDLSLLGGELSSSLIALHHLRHLDLSCNFFNGTSIPVFMGSFKNLRYLNLSWAGFGGKIPSQIGNISSLQYLDVSSNYFFHEQNTFFMSSTDLSWLPRLTFLRHVDMTDVDLSSVRDWVHMVNMLPALQVLRLSECGLNHTVSKLSHSNLTNLEVLDLSFNQFSYTPLRHNWFWDLTSLEELYLSEYAWFAPAEPIPDRLGNMSALRVLDLSYSSIVGLFPKTLENMCNLQVLLMDGNNIDADLREFMERLPMCSLNSLEELNLEYTNMSGTFPTFIHKMSNLSVLLLFGNKLVGELPAGVGALGNLKILALSNNNFRGLVPLETVSSLDTLYLNNNKFNGFVPLEVGAVSNLKKLFLAYNTFSGPAPSWIGTLGNLTILDLSYNNLSGPVPLEIGAVNLKILYLNNNKFSGFVPLGIGAVSHLKVLYLSYNNFSGPAPSWVGALGNLQILDLSHNSFSGPVPPGIGSLSNLTTLDLSYNRFQGVISKDHVEHLSRLKYLDLSDNFLKIDIHTNSSPPFKLRNAAFRSCQLGPRFPLWLRWQTDIDVLVLENTKLDDVIPDWFWVTFSRASFLQASGNKLHGSLPPSLEHISVGRIYLGSNLLTGQVPQLPISMTRLNLSSNFLSGPLPSLKAPLLEELLLANNNITGSIPPSMCQLTGLKRLDLSGNKITGDLEQMQCWKQSDMTNTNSADKFGSSMLSLALNHNELSGIFPQFLQNASQLLFLDLSHNRFFGSLPKWLPERMPNLQILRLRSNIFHGHIPKNIIYLGKLHFLDIAHNNISGSIPDSLANFKAMTVIAQNSEDYIFEESIPVITKDQQRDYTFEIYNQVVNLDFSCNKLTGHIPEEIHLLIGLTNLNLSSNQFSGTIHDQIGDLKQLESLDLSYNELSGEIPPSLSALTSLSHLNLSYNNLSGTIPSGSQLQALDDQIYIYVGNPGLCGPPLLKNCSTNGTQQSFYEDRSHMRSLYLGMSIGFVIGLWTVFCTMMMKRTWMMAYFRIIDNLYDKAYVQVAISWSRLMRKNQDAA

SEQ ID NO: 179465 - protein, 121 aa, Oryza sativa
  Clone ID: PAT_MRT4530_76925C.1.pep
MEGRQRPHPPIHQICAKGKVVGGDAVASVMTAADQAEAMASAASTGDGGLSFARSNERGAVVAPTLFPPPDSASGKAAGSPPPDLVRGGGGLAEAQQIKVARTPTVHRHTYSGKGPITLKD

SEQ ID NO: 179466 - protein, 91 aa, Oryza sativa
  Clone ID: PAT_MRT4530_76926C.1.pep
MVQRELSRARTGDDVALFVELPLLWSLAARSSEDNEAAAAAPSSSPDPALGSLDLASNTILGVTHLLRVMASLAAAASHRMWGRCMGLLPL

SEQ ID NO: 179467 - protein, 72 aa, Oryza sativa
  Clone ID: PAT_MRT4530_76927C.1.pep
QPPLCCSIASCSLHSTSVGCAIATATPSLLFQFLRLLRAEAFCTMRGSFPVATKSIPSWMPSSGPGLLSFPV

SEQ ID NO: 179468 - protein, 124 aa, Oryza sativa
  Clone ID: PAT_MRT4530_76928C.1.pep
QVVPVDFAAAFLIGPVGGVELRQRRPHRALEQRPPASGRRERPAETEAAAAAASLQGPGQRVVGVACPREERALRGRRSSSSSSHARAPVRLCPRDSARLRLSSSSFVTNRWRAKVRRDRTRAR

SEQ ID NO: 179469 - protein, 38 aa, Oryza sativa
  unsure (1)..(38): unsure at all Xaa locations
  Clone ID: PAT_MRT4530_76929C.1.pep
XTXXNXHKQLATATDVWPIAWELGPAADDLELEAGVLG

SEQ ID NO: 179470 - protein, 115 aa, Oryza sativa
  Clone ID: PAT_MRT4530_7692C.1.pep
MEFGWALRRPMRLPDSPRHKRGLPAALRGVGVVKPEVWCAWLEGVMRRVLSQPLSDVDLYVNFVVCVPRPVLDGGFNAHSAGNSIWEFLGVTGISRKILKLIPLSLLDFSLPVPA

SEQ ID NO: 179471 - protein, 99 aa, Oryza sativa
  unsure (1)..(99): unsure at all Xaa locations
  Clone ID: PAT_MRT4530_76930C.1.pep
PHGHSHGCRAGQAPGALSEAILDLQAXIFRAPIRRGNIIVVMSNRYTPAGEPITTNKRHSVCKIXSSCEDALEEPSLGKAYYYTLLQTDINWTLGCHVN

SEQ ID NO: 179472 - protein, 93 aa, Oryza sativa
  Clone ID: PAT_MRT4530_76931C.1.pep
KDRVNSHIKPVWCCWAACVVFVFFMTAINKDHGQAIPNVVTFDPEPGFSHDQLYVALSRGISRGTLSFLANPRIDIDPTGKSTKNIVYRDVLF

SEQ ID NO: 179473 - protein, 360 aa, Oryza sativa
  Clone ID: PAT_MRT4530_76932C.1.pep
YLRDLLFSPAAAALRLHPPMSAPPPPPPNASTPAPAPPLPPSLGAPDPPPPPPPVMPSRPPPAAPPPSPPAASPPPPPAPPVAPRPTPSPPPPPPVMPSKPVKPVPPSSPPPPPVMQPPSPSPPLIPPPPPPTPVMPVLPPTPSPPSPVNPPPPSPSPPPSPVNPLPPITSPPSPVSPPSPANPLPPATSPPSPANPLPPATSPPSPANPLPPTTSPPSPANPLPPTTSPPSPANPLPPTTSPPSPANPLPPATSPPSPAPPPTVPSQPPEAAPAPTTKPPPTPLPPARSPPAPSPASREPSPSPSPSVAPPSLPIFTPSPPGGGRGAATPSPPSSRPSPRSPPPPSSAPQGVMIAIVAA

SEQ ID NO: 179474 - protein, 102 aa, Oryza sativa
  Clone ID: PAT_MRT4530_76933C.1.pep
RRHRRTPPPPLAGYSPSPTPHRPHGALPHAPSHRRSDAARRRTPRAAAPRPGPARLGAAFPRPRLARPPVVSPDAAPPRPALRPPALCAGPSGPPPPDSGLR

SEQ ID NO: 179475 - protein, 112 aa, Oryza sativa
  Clone ID: PAT_MRT4530_76934C.1.pep
MARGVLPAGHASCGITGSVHGENVLLDKLIHIRGGATMSEVVLDASGSGGDEGGKPSSLRKRGAGRGCPRGRQEVGEHGALHIIQRRVYAECINTVLESVTLTKKWILRGNM

SEQ ID NO: 179476 - protein, 110 aa, Oryza sativa
  Clone ID: PAT_MRT4530_76935C.1.pep
MEESSSFLAPTERRWRSGGAVPGDDAGAEDEREAGSQWSCSRLQPGRSGEQQQLLGADEEEIVIWRRRGARREMTLKRRTSGSRSSDPVGGNGGSGGGGGGAEDPRRRMS

SEQ ID NO: 179477 - protein, 376 aa, Oryza sativa
  Clone ID: PAT_MRT4530_76936C.1.pep
MASDDYRLQFTSNLESPLFTGCQIKLEVRMINSDGNVIKSGPLSSAKIELLVLRDDFACDVVGNCTTEQLDEKEVKTRDGHISVLKGVVARRLVEGTCSFPGIQFREGSLRRTFTIAARVNRNEATGGHRVQEAFMGPVVVQTNRNKRIKEDHKDWKTIIEHARECDLKENHYLKAYKVVGNQINDVIFFNCVHDIVGAEFNGKYTAKENFNRYQKAIVDSQRKEAYNALESIPFDYIMNENGAPTKISPNRNVSEDLSLSMQDAAPPPNPSNHNAAYQVNNFIPGLTHVSQTCPSLENCNTAARIPVPGGGGSNPLLADSENDLSVSDGVHGEPFVPMQEAEQPPNHSDYNAAHQQGHRMFYRIFSLHYLRLAIV

SEQ ID NO: 179478 - protein, 48 aa, Oryza sativa
  Clone ID: PAT_MRT4530_76937C.1.pep
VCASGFPFSTSSLRPTLTPLQISPSRSAPPPPRRRRLPPLQPMPPPKP

SEQ ID NO: 179479 - protein, 41 aa, Oryza sativa
  Clone ID: PAT_MRT4530_76938C.1.pep
VLGIMRFYHVSGDTCKVSDDIYQVPCDSYHVEGDTCEVSGS

SEQ ID NO: 179480 - protein, 120 aa, Oryza sativa
  Clone ID: PAT_MRT4530_76939C.1.pep
MEDVPEGDREERRWEEPAVQESGNTPETTECFFKPIGRRCRAVTGGGGLRRKEANDSGAPPAVTRSNYLGWKRTAEAMRAGSATGLEEEGSGSGREDAGRRSIQHLGLDIITKSVHSWTL

SEQ ID NO: 179481 - protein, 1219 aa, Oryza sativa
  unsure (1)..(1219): unsure at all Xaa locations
  Clone ID: PAT_MRT4530_7693C.1.pep
MEDRVAALRAYRKAKGLYHTCGERWSHEHKCGPTVQLHVVEELLDLLENFDENQTATVSDEIESEETEVNGEVCQISKEAMLETETSGTLRLQGLMQHHQIMLLVDSGSTHSFVSAALDDKLGGKQRAVPAIKVRIADGGILHCNKEIVDCLWLVQGESFLTSLKVLPLGNYDVILGMDWLEQHSPMKVDWRAKTLQFHYNQKEICLKGVTANTQTCKTLSATQVQGLVHRSAVLQVVELCSVELAIKDSDIPAEVSQLLLEFAPIFEEPKGLPPIRAFDHSIPLLPEAKPVNLCRYRYNLAQKDEIERQVAEMLQQGVIQPSVSPFSSPVLLVQKKDLTWRFCIDYRHLNAITVKNRYPLPIVDELLDELAGSSLFTSLDLRAGYHQIRMRPEDEHKTAFKTHNGHYEFRVMSFGLIGALATFQGIMNQXLLAPLLRKGVLVFIDDILIYSRTLQEHLILLRQVLQLLSEHQLKVKRSKCSFARSSLTYLGHVISASGVATDPKNIKAVQAWAIPVNVKEVQGFLGLVGYYRKFVRSFGIISRPLTNLLKKNVVFVWTSEHHTAFDALKAALTLAPVLVLPDFTKVFEIETDASDKGVGAVLMQGGHPLAFLSKSLGPRNRGLSTYEKECLAILLAVDHWXSYLQFGEFIIRTNQRSLIHLDDQRLVTPWQQRALTKLLGLQYKLVYKKGLENKAADALSRCHTEEVFQLSVVSSNVPVWLAKVQTGYDXDAATTNLMAQVLLSPHSFPDYSMKNGILYYRGLIWLGNNQQLQSKVIIALHCSAIGGHSGIHVTICRVRNLFAWPGLRKAMRAFIADCSVCKQAKSERVRYPGLLQPLLVPEHAWQNVSLDFIEGLPHSSGFDCILVVVDKFSKYAHFVALAHPFTAFDVALAYLNNIYKLHGLPHHLISDXDRIFTSALWKELFLLADTXLQMSSAYHPQADGQTERVNQCLETFLRCFIHACLKKWFHWLALAEFWYNTAYHSALDISPFKVLYGHPPRHFGVLDISASAVPDLEEWLKERAVITRLLRQHLLRAXAAYEVXADKKRSERVFAVGDWFFLKARPYAQHSLTGHTNHKLVFHYFGPFQVLEQVGKVAYRLQLLASCSIHPVVHVSQLRHTSSPSSSDEIQVPVTLPADEEAVPVHVLSRRVYRKGAGAVEQVKVRWQGQTSAEATWEDAAALRLRFPAAPAWGQAVSKGGGNVTDTAPGPATEGNPV

SEQ ID NO: 179482 - protein, 157 aa, Oryza sativa
  unsure (1)..(157): unsure at all Xaa locations
  Clone ID: PAT_MRT4530_76940C.1.pep
GRVGEATGGHRVQEAFMGPVVVQTNRNKPNAKSNAPKFDDEIYRLKKIAKKGIYYPKLRSXNITTVGHFLRAYNKNPEELNDLLGIKEDHKDWKTIIEHARECDLKENHYLKAYKVVGNQINDVIFFNCVHDIVGAEFNGKYTAKENFNRYQKAIVD

SEQ ID NO: 179483 - protein, 68 aa, Oryza sativa
  Clone ID: PAT_MRT4530_76941C.1.pep
SHHGLSQHHKSFKSHAHRTNHYAIPSKPPNCDLHRTAKNWASRSRFLANKVPGIVNHPPFGQKFGRPF

SEQ ID NO: 179484 - protein, 146 aa, Oryza sativa
  Clone ID: PAT_MRT4530_76942C.1.pep
MGYLDEQFCQVEDLQDEANPNFAEEVVSLFLKDSTRVMLNFEQAIEKHPKDFASWDTQMQQLKGSCSRKTLLGEGEPHIASIGASRVKNECTSFRNFCGEENAEGHAATAAKVKREHAVLRQKWESYFQLLRQAGPAGTATRPAGK

SEQ ID NO: 179485 - protein, 205 aa, Oryza sativa
  Clone ID: PAT_MRT4530_76943C.1.pep
MTKSSPLTLIPETCRDNLAVYARDYQANFILGYCSIYIFMQTFMIPGTIFMSLLAGALFGVVKGGILVVFTATAGASSCYFVSKLIGRPLISWLWPEKLRYFQSEIAKRKEKLLNYMLFLRITPTLPNTFINMASPIVDIPFHIFFAATLIGLIPASYITVKAGRALGDLRSLRELYDSKTLVILFLIGTVAVAPTILKRKRIYE

SEQ ID NO: 179486 - protein, 162 aa, Oryza sativa
  Clone ID: PAT_MRT4530_76944C.1.pep
WIPGLQDRTRGEGQRCVEDNGGEENLEEDVLSFGGILLEVLMGPKRHRKDLSVLSELVLSISKQEEREQVLDPIVLSTSSQDSLSMVISITVKCLSVESSARPSIEEVLWNLQYAAQVQAISDGDQRSEVSSQKPVRLTEHKTPWRLLSISGKRRRRTCKLI

SEQ ID NO: 179487 - protein, 220 aa, Oryza sativa
  Clone ID: PAT_MRT4530_76945C.1.pep
MDAGGCSRRNDGALLGGCLILAVDRVASIGVEELVGASRGEAKAGRGRAATVAKVAAGADERQRSFTEAEAVADKVAAGRGGGDGRGRGGGQARRRRRSRTRRRLVPEATRSRRRGEARTSGGDQSRRWRWRRLQTRRRLGAEAAVVADEVAPSPRGRGGRRGEARRGRAVTVRLRRWRRLRMRRWLGAVAVAGCGGGRGRGQAASIVDELMPCTRPRWD

SEQ ID NO: 179488 - protein, 662 aa, Oryza sativa
  Clone ID: PAT_MRT4530_76946C.1.pep
MPRAVSDGGEAIDADIASRTSSHSHMDGGHHHHHHGHKVEFPPKKKLIDEFTDAVKETFFADDPLRQYKDQPMSKKVLISLQNFFPVLDWGRHYTFRKFRGDLVSGLTIASLCIPQDIGYAKLAGLLPNYGLYSSFVPPLIYAMMGSSRDIAIGPVAVVSLLLGTLLQNEFDPKKNQEEYTRLAFTATFFAGVTQAVLGFLRLGFIIEFLSHAAIVGFMAGAAITIALQQLKGFLGIANFTKKTDIISVMKSVWGNVHHGWNWQTILIGASFLAFLLVAKYIAKKNKKLFWVAAIAPLTSVIISTLFVYITRADKHGVVIVKYIKKGINPPSASLIYFSGPNLMKGFRIGVIAGMIGLTEAIAIGRTFAGLKDYKIDGNKEMVALGTMNIVGSMTSCYVATGSFSRSAVNYMAGCQTAVSNIVMSIVVLLTLELITPLFKYTPNAILSSIIISAVLGLVDYHTAYLIWKVDKLDFLACLGAFFGVIFSSVEYGLLIAVAISLAKILLQVTRPRTVLLGNLPRTTLYRNIDQYPEATLVPGVVIVRVDSAIYFTNSNYVKDRILRWLRDEEERQQEQKLQKTEFLIVELSPVIDIDTSGIHALEDLFRALEKRKIQLILANPGPAVILKLRSAKFTDLIGEDKIFLTVGDAVKKFAPKAVENV

SEQ ID NO: 179489 - protein, 453 aa, Oryza sativa
  Clone ID: PAT_MRT4530_76947C.1.pep
MAQDDAPDSTTSSSSASSASAPAPSAARLNAAAPEFTPRSAAHHHHHHANPRRQHRGGGGGAYHHHQQHYQPHHHHQHHQHWQHYGEDEGDAAAAGAVGEGGIPEDVARRVVKQVEFYFSDVNLATTEHLMKFMIRDPEGFVPMSVVASFRKIRELVSERSALAAVLRTSAELVVSDDGKRVRRRVLFTEADAEEVQSRIVVAENLREEHRYPNLMKIFSAFGSVKSIRTCYPQGGIDGAGTSTGKASKIEMLFANKCFKKKFYKAAYKVAYIQGTGALTLYRVHAFVEYETVEDAEKAVSEFSSGRSWRDGIRVRSLLGCLKQAMGQGRRGGDEVDAADEDDPETTDHPQDYETEDASQISEAHLDHQADDGYHDKGGMRHGRGRGRGGRGRARGQYYGHSRDANHPIGTPPSNHSALADHPSKPPPGPRMPDGTRGFTMGRGKPLNPTNAV

SEQ ID NO: 179490 - protein, 77 aa, Oryza sativa
  Clone ID: PAT_MRT4530_76948C.1.pep
MGYRSGTKDLSYNFTTDWDDLGTPETRDQAPVLRSHSFHYFRPGPLLEVEDPDGNCRASGKDGADCPSARLDPDRNG

SEQ ID NO: 179491 - protein, 84 aa, Oryza sativa
  Clone ID: PAT_MRT4530_76949C.1.pep
SEIVLCCRLGFIIEFLSHAAIVGFMAGAAITIALQQLKGFLGIANFTKKTDIISVMKSVWGNVHHGVGQNNIIPLRTYCFFIIL

SEQ ID NO: 179492 - protein, 2077 aa, Oryza sativa
  unsure (1)..(2077): unsure at all Xaa locations
  Clone ID: PAT_MRT4530_7694C.1.pep
GLMSPSSTWKPPDLRYKRDPPGRTXGIKSQSQHNPHRSMDPCNNVLQYPLYPVYGYHPSIVARQVGALGAQGSTTMSSSFVDNSVNTNLNQVFPASTMLVXTQVGKIVFPVYTTMPISAGPSVTGNENAVDTNQDDSMSKNPPAEAENGTXTTSELEKDSKATKACHSDKNHEPTRMTSKATRSWCPIHKTRKHTLQACWVFLNVRAEIRSCKERGIQRISPTRDVYSPIHKTKNHDLSSCKVFLSAMKAPSPKVQQSHILIRDKDKEXGATPTSDRFVGVIDIDPHEPSVLHLLEDYGSSTTSVPREILAIDDVGTSQRTNAEAENQVATPAQHIRAVNAILRETPYDPVLNDDLARWTERLRESVTNLSNAFEEAAAAAHPEQPPTGDANGENPERRESPQRATPPPRGTGDLRDHLNGSREARRTQDNENRSRRHVSSRRHDNKDRGDRSNEDXDRDNRHDHNDREQRVPGDTGRGRRHNDDDDGDRRRDNSGRRRQDSREPGRQPRNRTLEPSDPSSSSLSSSSSSSDRHPXRTHDRRXPTAPSAGCRAFSRSLHDVRWPERFRPGAIEKYDGSTDPEEFLQVYSTVLYVAGADDNALANYLPTALNGSARSWLMHLPPYSISSWADLWQQFVANFXGTYKRHAIEDDLHALTQNSSESLREYVRRFNECRNTIPEITDTSIIRAFKSCVRDRYTTQELATRRITTTQRLFEIVERCAHADDALRRKNDKPKTGGEKKLATDAPESSKKKNRKNGKRKAQAEVLAAEYANPPKRPDPQGSDAKKAWCPIHKTDRHSLEDCLVFKKSLEKHIAFEKGKRVRVVEKDAEAAPKESDSAYPDSDLHVSHIFXVPQRRYPIVVEPTIRNIKVTRVLIDGGSSINLLFAGTLDAMGIPQSELTPTDXPFHGITPQSSSKPLGKITLPVTFGQANNFRIEQITFDVAEFDTAYNAIIGRTALAKFMAASHYAYQVLKMPGPKGIITIXGNAKLAVQCDKRSLDMVEQTPSPPATTKPPKKVSKTNKTPKPDGAIKIVPLSSANPDKTELALITFLRDNADVFAWQPSDMLGVPREVIEHKLIVRPDAKPVKQRLRRFAPDRKQAIREELDKLLKPGFIREVLHPEWLANPVMVRKANGKWRMCVDFTDLNKACPKDHFPLPRIDQLVDSTAGCELLSFLDAYFGYHQISMAKEDKEKTTFIMPFGVFCYVKMPFGLITAGNTFQRTVQGALSDQLGNNVEAYVDDIVVKTKTSDSLIDDLQETFNNLRRYRLMLNLEKCTFGVPSGKLLGFLVSGRGIEANPEKIKAIENMKSPTRLKEIQKLTGCMAALNRFVARMGERGQPFFALLKKQDKFVWTQEAEEAFIALKRYLSNPPVLVAPQPNDELFLYIAATPYSVSTVIVVEREKVQRPVYYVSEALHDAKTRYPQIQKLLYVVIMTSRKLRHYFQAHRVTVGSSFPLGEVVRNKNVVGRIAKWVVELSQFDVHFIPRTAIKSQVLADFVADWTMPDDKSDNQVDNETWTMAFNGALNSQGAGAGFILTSPSGDQFKHAIHLNFRATNNTAEYEGLLAGIRAAAALGVKRLIVKGDSELVVNQVHKDYKCSNPELSKYLAEVRKLEKRFDGIKVRHVYRKDNIEPDDLAXRAPRRELLEPDTFLDILTKPSVKEVSGEVSPAAPDIGAEATKAERAVADIEITDDWHIPLMKFINSEELPEDDTEAEKITRKAKIXSVVSNDLYKKAPNGVLLKCVSSDDGRHLFLDIHEGIYGSHAAGRTLVGKAFRQGFFWPIALKDACDMXTHKATRASAPDYPSYLAILVLGARYTRAIPTRTGRLQVPIXVAIDKFTKXIEAVPTGEIKADNAIKFIKGIFCRYGLSHRIITDNGSQFISTDFQDYCIGLGIKICFASISHPQSNGQVERANGIVLQGIKTLLWAVRTTPTTSNKETPFFLMYGSEAMLPSELXHQSTRVQKYSDEDQEEXXNVDVNLLEEHRERVAVRAANYQQALRRYHEKRIRARMLTIGDYFLRRVQSQAGRNKLSPKWEGSYTITQVLRPGAFKIADGDGRELANSWNIDQLRKFYV

SEQ ID NO: 179493 - protein, 51 aa, Oryza sativa
  Clone ID: PAT_MRT4530_76950C.1.pep
MPRAVSDGGEAIDADIASRTSSHSHMDGGHHHPHHGHKVEFPPKKKLIDEF

SEQ ID NO: 179494 - protein, 101 aa, Oryza sativa
  Clone ID: PAT_MRT4530_76951C.1.pep
MAAATVSNKRVILKRYVTGLLSEDDMEVVTVEAPPLDVPTGSKGVVVKNLYVSCDPYMRNRMTHHELPSYIPDFVPGEVVAFNVTELHFFLINSNIMIFSS

SEQ ID NO: 179495 - protein, 653 aa, Oryza sativa
  unsure (1)..(653): unsure at all Xaa locations
  Clone ID: PAT_MRT4530_76952C.1.pep
MPRAVSDGADNLDADMDNGAAQQQHDGYNVGAPPKKNLLAEFAGTVKETFFSDEPMRRYKDQPRSRKLWLALQHVFPVFEWGRQYTLAKFKGDLIAGLTLASLVIPQDIGYAKLANLPPEIGLHSSFVPPLIYALMGTSRELAMGPVAVISLLLGTLLQEEIDSKKNPLDYRRLAFTATFFAGVTQAALGFCRLGFIIAFLSHAAIIGFMAGAAITIALQQLKGFLGIANFTKKTDIISVMKSVWGNVHHGXQWNWQTILIGASFLAFLLVAXGKKNKKLFWVPAIAPLISVIISTLFVYITRADKQGVAIVKNVKKGINPPSASLIFFTGPYLLKGFKIGVVAGMISLTEAIAVGRTFAGLNDYQIDGNKEMLALGTMNVVGSMTSCYIATGGFARSAVNCMAGGKTPMSNIVMSTVVLLALLWITPLFKYTPNATISSIIISAVLGLFDFESAYLIWKVDKLDFMACLGAFLGVIFSSVEYGLLIAVVISLIKVLLHVTRPRTALLGNLPRTIIYRNVEQYPEATKVPGMLIVRVDSAIYFTNSNYVKERMLRWLRDEEEHQKEQKLPKIEFLIVDLSPVNDIDTSGIHAFKELLRTLEKRQIQLIFANPGAAVIQKLRSAKFTELIGEEKICLTVGDAVKKFAPQLTENV

SEQ ID NO: 179496 - protein, 81 aa, Oryza sativa
  Clone ID: PAT_MRT4530_76953C.1.pep
IPYNLRPFFLFLKPTAVLYYIKIALTQHHIIVTHTTFTSNQKEISSNKNKLTSLSHKIKTLPTNILLTQQSLTHHPIKHEQ

SEQ ID NO: 179497 - protein, 447 aa, Oryza sativa
  Clone ID: PAT_MRT4530_76954C.1.pep
REKALGRRRRVLRRRRLLLLRIVVLGLVGEFGWLAMAFAGDARIVVVAVAVAVAAFVLVGVAAEGKGEGGGGGGVGVCFERIFSFGDSLTDTGNFLLSVPEDFPDPARSLPYGQTFFGRPSGRYSDGRNLLDFFAEAFGLPFVPPYLAGGDFRQGANFAVGGATALNGSFFRDRGVEPTWTPHSLDEQMQWFKKLLTTVSSSESELNDIMTKSLFLVGEVGGNDYNHLIVRGKSLDELHELVPKVVGTITSAITELINLGAKKLVVPGNFPIGCVPLYLSIFPSQKEDYYDEKTGCIKWLNEFTEYHNRLLQEELEKLRNLYPDVSIIYADYYGAALNIFLAPLQFGFTVPLNSCCGSDAPYNCSPSILCGHPGSVVCSDPSKYTSWDGLHFTEATYKIIIQGVLGSYANPPLSETCRGGAYKVSQLHQCTDNPTNTVTYDSMSSFI

SEQ ID NO: 179498 - protein, 85 aa, Oryza sativa
  Clone ID: PAT_MRT4530_76955C.1.pep
NKIIECKWQLNTTKKSIIASGRKGSSQAGRPSACKPTIVKIADLRRRGGRPLAKIIFAGGRWLVRSACENRNRPLAKKKNFHLRR

SEQ ID NO: 179499 - protein, 60 aa, Oryza sativa
  unsure (1)..(60): unsure at all Xaa locations
  Clone ID: PAT_MRT4530_76956C.1.pep
WMSPPXKRTAPRSGSGTLHCPSVFDADIKSVWLVCLLCHPTSDLIPVLLCILNYWHFRLR

SEQ ID NO: 179500 - protein, 362 aa, Oryza sativa
  Clone ID: PAT_MRT4530_76957C.1.pep
MAGQMLPPIALVAVAICITAAAAAKVPAIYVFGDSTADVGNNNYLTGAAVPRANFPHNGIDFPTSRPTGRFSNGYNGVDFLALNMGFRRSPPPFLAVANKTSNPLFRGLQGTNFASAGSGILDSTGQSIIPMSKQVQQFAAVQRNISARISQQAADTVLSRSLFLISTGGNDIFAFFSANSTPSSAEMQRFVTNLVSLYTNHVKDLYVLGARKFAVIDVPPIGCCPYPRSLQPLGACIDVLNELARGLNKGVKDAMHGLSVSFSGFKYSIGSSHAVVQSIMKHPQRLGFKEVTTACCGSGKFNGESGCTPNATLCDNRHDYLFWDLLHPTHATSKIAAAAIYNGSVRFAAPINFRQLVDDQH

SEQ ID NO: 179501 - protein, 65 aa, Oryza sativa
  Clone ID: PAT_MRT4530_76958C.1.pep
RRVPQKEHPGLRDFLPPPGPGVLPPPVSRDGKRPNGFRPVQPSAHGRFLCLPHVWGGHGLDLFFP

SEQ ID NO: 179502 - protein, 40 aa, Oryza sativa
  unsure (1)..(40): unsure at all Xaa locations
  Clone ID: PAT_MRT4530_76959C.1.pep
AIWRILHRLSSELSPXYIHAPFTVITLHPQQGAPIKLKKI

SEQ ID NO: 179503 - protein, 121 aa, Oryza sativa
  Clone ID: PAT_MRT4530_7695C.1.pep
ILLYSYHQRGHHYAENFAVGLPFSCQIYKNNPLPKSKTTMMALILQFNKYSFTCEYPHKHVINFQQLPSCPDNPNQARIRAELVQEAQSSGKAASPASCSSATGSFAAAVGLGCSEPGGRI

SEQ ID NO: 179504 - protein, 159 aa, Oryza sativa
  unsure (1)..(159): unsure at all Xaa locations
  Clone ID: PAT_MRT4530_76960C.1.pep
MSRQPEVLWAQRSEKIYLTISLPDAKDVVLKTEPQGLFSFLAVANGEPFSFTLELFDSVLXEGSKTKTKMGLRKHXCCSIQKEKKGWWKRLLKSEEKHPYIKVDWNKWCDEDEESDAPLDSDDAFDEXMYRDETDDDDDGMLYLPDLEKAKRPVISQLR

SEQ ID NO: 179505 - protein, 227 aa, Oryza sativa
  Clone ID: PAT_MRT4530_76961C.1.pep
MPRRDCPSRILDQLITAKLIADLNSDTDFNSNSDSAGYKSMRGRLRIHQQFLPPILALPAALSSSMALPRRSSPRSSRPIIHRRSELAVEAQGRVVSKKPSGSGSPINKMFLQEGRRGARPHAGGEARDHGAAPRHVARRGRRLRRRRRRRTPRGHLQRQLPARRPLPDRARRRQGRQAARAAPGPDPGKHGGPAAEQGRQEAAAAEDVCAGEGAAACQLRGLVGIV

SEQ ID NO: 179506 - protein, 153 aa, Oryza sativa
  Clone ID: PAT_MRT4530_76962C.1.pep
GASPPLESPLLAPDHPPRRRRQGEEAVRRIAARQQDVIRAGRASSVLPEGRRGARPHAGGEARDHGAAPRHVARRGRRLRRRRWTPRGHLQRQLPARRSLPDRARRRQGRQAARAPPGPDPGKHGGPAADHGRQVAAAAEDADAGEEATAGQL

SEQ ID NO: 179507 - protein, 470 aa, Oryza sativa
  Clone ID: PAT_MRT4530_76963C.1.pep
MERIDEETYRGGARGGGQGSFAAGGRGGFQGFNHGYATGGGWSYGVGDRGRSMVAEATKIVASTTVAMEVGDTVATSRGIGKAVERSALSDVHRQHAAGIGSMAGNIAGGMASMGGGMVSGVAGMAGGNVDGGMGSQGAAGMGIIGNGAAAVVAQLRSLTVVAHGGSTPMVLTGIETGKKTGLIEVHAGGVTSSGQPGVMPEAIVSHGGSMAQCPVFKSANKHMASLCGYAVDGLGFYYIPLPAGQKVKHESNVALIHITKGVLTVMNVTSELDRLIPSKWKWEVYDNGNNTFRTIFPSKVELQRMVEWGQVNTKFVKAKMEMKERDVGNEIKYAIPKIVDMKLTKRYDAAHLQVLVLDHSLIPESVDVIIGDFLYELQFKVGPKNDDEPVPMEMDNFDGPNDDTKKEGDDLDGKNDMGLTVSDEYDGLRKHNDGGDWPATFGTCASDGSVGSGQMIRSRILLRWQISLR

SEQ ID NO: 179508 - protein, 436 aa, Oryza sativa
  Clone ID: PAT_MRT4530_76964C.1.pep
MPPRIRRAPARRAAPEEVPDRVSALPDEALHAVLSLLPAHDAVRTCVLARRWRHLWEHAPALRVTDVEGWNPRLRGDGLGRFIRFVDGLFVSRRRRDAPLELCDLDFDFPEDKGKDWHVNRWIMLALLRHHARVLRISLPAYITLPDVPLISQRLTRLELDGVLGNDNILDFSCCPALIALKMKCCRINAEKMSSPSVKILSLASCEFYPATRTQMSFPSVVSLELDGCSGSVPFLESMPSLVAAIVIFDDDYADRCDNSVLGDCGDDSCVDCCNYSDRSKCVCLNGLLEATHLELSAEPAMYVFRRDLNLLLACHTFAKLKTLALGEWCMTHDLSALIRFLQQSPILEKLTIKIPEEPKCSMDAGQQKIPEEPFVSNHLKIVEIKCKGKEVMWVCKFLKTLGTFGIPLEKINIKLTSEHCRSECFNFVCTGFSCS

SEQ ID NO: 179509 - protein, 154 aa, Oryza sativa
  Clone ID: PAT_MRT4530_76965C.1.pep
MALPRRSSPRSSRPIIHRAVDAKGKKPSGRSPVNEMSFKKGDEVRVRTPLGRLGTTTLRLVMWLGAVVVSDADAADDNGHLEVIYNGNFPRDDPFRAVRVAVKDVKLPGPRPAPTPANMAAPRPTTAGKSLPRLKMQMLEKEQLRANSEAFLAL

SEQ ID NO: 179510 - protein, 184 aa, Oryza sativa
  unsure (1)..(184): unsure at all Xaa locations
  Clone ID: PAT_MRT4530_76966C.1.pep
SQPLSTDFNSNSVSDLLPSPISTRTPLRLPINPSAPPLTVSAFTTIPSTHPRSSASSSSMALPRRSSPRSXAPDHPPRRRRQGESXSPRSHQQGRPSRRCHPRRRRRRPWRRGARPHAGGEARHHGAAPRHVARRGRRLRLRRRRRTPRGHLQRQLPARRPIPDRARRRKGRQAARAAPGPDPG

SEQ ID NO: 179511 - protein, 123 aa, Oryza sativa
  Clone ID: PAT_MRT4530_76967C.1.pep
CRPAPTRSRRRRSRRCPTSGGRAPPAAGNPNREATPPRPAAPTRRHRGHPPHGNRARRTPTRRPAAQGSGPRGEEEEGTRRRRSRNQTRWPGTAARRRGRRRCPTGPRRSRRHRRSSRRRRAG

SEQ ID NO: 179512 - protein, 194 aa, Oryza sativa
  Clone ID: PAT_MRT4530_76968C.1.pep
MAASVGLNPEAFFFSNSYSYSSSPFMASYTPEFSAAAIDANLFSGELDFDCSLPAPAQEYPENENTMMRYESEEKMRARVNGRIGFRTRSEVEILDDGFKWRKYGKKAVKNSPNPRNYYRCSTEGCNVKKRVERDREDHRYVITTYDGVHNHASPAAAAAALQYAAAAGDYYSPPLSSAGSPPAAYSAGGSLLF

SEQ ID NO: 179513 - protein, 69 aa, Oryza sativa
  Clone ID: PAT_MRT4530_76969C.1.pep
MGHTYLHSAGRSELHVCPSSCNDFLAMVAMKPGIYLTGTDVSSPGAGTPSPVRDERQEALIQMTGRGKE

SEQ ID NO: 179514 - protein, 383 aa, Oryza sativa
  Clone ID: PAT_MRT4530_7696C.1.pep
MASSPNLLGGEEGEPGRDDVRIHGGQGSRGGPAATRENDTALAAGALLVFARGVDADPARWLVEEFGAAAPPVSDELELARRGAESCTTASWHPFPAVPWQLVLRSLLRMTGHPPLATAALACDKRGSAWRPWRTRRTAQRRTAGRPPRRRATASTEEIRQHGHHPAVAAGARPHTWSAAGMWRAAVARWSRGCMWPRAGYGMSCMSRTCGAGATSKAGVEEFVCCATVHGVGPSIGLFDSIRDGGGVVGAGAGAGAGANAQARRVSPLPMPLPGSSSQRRSHGMTLDEIDSIRAGCRLTLTIAAPILPSPAAATDDSDGPPSRATPPAPLPANSPPPLIQIDSAGTKAPLLLDRVPTLPVPPRSDRVAPPSNPVSIVKLIAH

SEQ ID NO: 179515 - protein, 937 aa, Oryza sativa
  Clone ID: PAT_MRT4530_76970C.1.pep
MGGAAAAAAVLVVLWLAVAAAGAGAGERPSEVSIGALYTYDSVIGRAAGLAIELAVGDVNADRTVLAGTTLSLISQDTNCSGFLGTIEALQLMEKNVVAVIGPQSSGIGHVISHVVNELHVPLLSFAATDPTLSASEYPYFLRSTMSDYFQMHAVASIVDYYQWKEVTAIFVDDDYGRGAVAALSDALALSRARISYKAAVPPNSNAATINDVLFRANMMESRVFVVHVNPDAGMRIFSIANKLRMMDSGYVWIVTDWLAAVMDSSMSGDLKTMSYMQGLIVLRQHFPDSETKREFISKWNNVARNRSIASGLNSYGFYAYDSVWIVARAIDQLLDNGEEINFSADPRLHDSMNSTLRLSALKLFDSGEQLLQQLLLTNFTGLTGQLQFDSDRNLVRPAYDILNIGGSVPHLIGYWSNYSGLSVAAPEILYEKQPNTSTSAQRLKNVVWPGHSASKPKGWVFPNNGQPLRVGVPNKPSFKELMSRDTGPDNVTGYCIEIFNAAIKLLPYPVPCQFIVIGDGLKNPNYDDIINMVAANSLDAAVGDFAIVRNRTKIAEFSQPYIESGLVIVVPVKEASSSAWAFLKPFTLEMWCVTGVLFIFVGIVVWILEHRTNEEFRGSPRRQMITIFWFSFSTMFFAHRQNTVSALGRFVLIIWLFVVLIINSSYTASLTSILTVQQLATGITGLDSLLSSALPIGYQAGKFTRNYLIEELNVPESHLVPLNTIDEYADALNRGPKDGGVAAIVDEMPYIEIFLSYHCNFRIVGQEFTKEGWGFAFQRDSPLAADMSTAILQLSESGQLQRIHDEWFSRSSCSSDDSEMGATRLGLRSFWGLFLMCALICVFALVMFFARVCWQYSKYSGSEEPDEPKDDSAGTAEIAAEAVAEMQRRRPKRLGSFKELMQFVDKKEEEVRKSMKRRPSEKDNQGVGSSDAQSVA

SEQ ID NO: 179516 - protein, 97 aa, Oryza sativa
  unsure (1)..(97): unsure at all Xaa locations
  Clone ID: PAT_MRT4530_76971C.1.pep
MGARGAGLEAVAARAAXQWDGDGDGVAAAIGRRRSDGMARRCAGLGARRWDGRAAGQGRGARGDATARGAAAAMATAXAAGGDGDATGGGGAGRTAG

SEQ ID NO: 179517 - protein, 174 aa, Oryza sativa
  unsure (1)..(174): unsure at all Xaa locations
  Clone ID: PAT_MRT4530_76972C.1.pep
LRRPEWRKSPGTVRDDDEGGAPAVGGRSGASDGVGNLSAKPMEVAPSREEXRSHDGGETELGGDGGERGARRGHETDGESERRAAETEERSTRDDFIASEGREGGRGGRKPAAEFSGSIDAPATITGRKSDESEGXEREGKTGETGEGITGNDSPLIKARGEGGMRRNPRRRRR

SEQ ID NO: 179518 - protein, 370 aa, Oryza sativa
  unsure (1)..(370): unsure at all Xaa locations
  Clone ID: PAT_MRT4530_76973C.1.pep
MMGRQSSSAARRVVVVVCAAMVVAAAAAQKYNAVYNFGDSITDTGNLCTNGRPSQITFTQPPYGETYFGSPTCRCCDGRVVVDFLASKFGLPFLPPSKSTSADFKKGANMAITGATAMDANFFXRSLGLSDKIWNXNGPISFQIQWFQQISSSVCGQNCKSYLANSLFVFGEFGGNDYNAMLFGGYSADQASTYTSQIVDTISNGVEKLIAMGAVDVVVPGVLPIGCFPIYLTIYGTSSSSDYDSLGCLKKFNDLSTNHNNQLKTKISALQSKYKSARIMYADFYSGVYDMVRNPGNYGFSTVFETCCGSGGGKFNYNNNARCGMSGASACSNPASHLSWDGIHLTEAAYKQITDGWLNGPYCSPAILHS

SEQ ID NO: 179519 - protein, 550 aa, Oryza sativa
  unsure (1)..(550): unsure at all Xaa locations
  Clone ID: PAT_MRT4530_76974C.1.pep
APTLHPPLHPRISLFKDIEYEKKNSLQDSDPIPRNIENILAERILHVFKIPERFCEEYEQMVRNFWXGHDKGERKVHSIGWEKLMSPKLFRGLGFRDIRCFNQALLATQAWRLFDNPDNLCAWVLKVKYYPNGSLIDTAFPSSSSPTWKGIEYGLELLKKDLIWIVGDGHQIKIXRSQWVAHRENPVILXKKAWNRLTYVHELMLPETKTWNQPLIRHVVQENDASEILKIKIPGREMSDFPAWHLEKTGIFTVRSAYRLAWNQSGKARVESSSSTATNGERKLWKNIWQTNAQPKVRIFAWKLXQDRLPTWGNKRKRKIEQSGICPICGMAEENGFHXTVECTLARGLREAMRTHWLLPVETSFAYTGPDWLLVLLDSSQCSEKAHVMYLLWRVWHLRNNMIHGKGSASIADLVSFLVSYEGQLLPIRQQEDDHKGKGPIYMEPNQISLSLEGLRAATDLIHMPIVLEMDNAEIVRDLIREEQLKSAWATTIEEIKGVMQSARLDSYAHIKREANRVAHVLAQMTMSCRSYAEWRLCAPARILDLLNQE

SEQ ID NO: 179520 - protein, 90 aa, Oryza sativa
  Clone ID: PAT_MRT4530_76975C.1.pep
MVKASAARRWRMRRGPMLKGGGGRCGSCLSGMEAASSWSGGQILPFLVMPAATPVLEDETYDDCSPDRARGEGGITGGPRRTTAGGRRRI

SEQ ID NO: 179521 - protein, 188 aa, Oryza sativa
  Clone ID: PAT_MRT4530_76976C.1.pep
PISRFLPRPPIATARSRGGEVARENDGAGDHHHLLPPPPPPPCRRHPFPSLATSSQCCGPSRPQPASCPPPVFRGVRARAHRISRLRAPYGARLLGGGAFAYVRSGSKGSIFGGLSGSALMGIAYYLMQSPETKALGDAVGFGSAFLFASVFGIRLYNTRKLVPSGLLLVLSLGALGVFYSAYMQDKV

SEQ ID NO: 179522 - protein, 1384 aa, Oryza sativa
  Clone ID: PAT_MRT4530_76977C.1.pep
MVVSPTICNVKLGRVLIDGGAALNIISPAAFDAIKAPGMVLQPSQPIIGVTPGHTWPLGHIDLPVTFGGSANFRTERVNFDVADLSLPYNAVLGRPALVKFMAAIHYAYLQMKMSGPGGPISVHGDLKVALACMEQRADHLAAASKPEGGDERLGTSAPTAPGQRIVTCAEVPEDALVSFLRANADVFAWRPADMPGVPREVIEHRLAVRPGARPVRQKVRRQAPERQAFIREEVARLLEAGFIREVIHPEWLANPVVVPKANGKLRMCIDYTDLNKACPKDPYPLPRIDQIVDSTAGCDLLCFLDAYSGYHQIRMAREDEEKTAFITPVGTYCYTSMPFGLKNAGPTFQRTTRISLGSQIGRNVEAYVDDLVVKTRNQETLLLDLAETFENLRSARIKLNPDKCVFGVPAGKLLGFLVSARGIEANPEKIQAIERMRPPSKLRDVQCVTGCIAALSRFISRLGEKALPLFKLLKRSGPFTWTEEAERALTQLKTYLSSPPVLVAPGPNEPLLLYLAATPQGGEAPESNGGLRPLTTGVGPLPACQTVLGAPDPQEGPEATAGRPHLSPFGPEANPVLTRPGRKQGEEAPEPNGGLRPLTTGVGPLPACLTTPGAPDPQDGPEATVGRPLLSSSDPEVIGTEDECAPRGHLDEERPGDAAPSEEDRPRRKVQRLVYFVSEALRDAKTRYPQAQKMLYAILMASRKLRHYFQAHRVTVVTSYPLGQILHNREGTGRVVKWAIELSEFDLHFEPRHAIKSQALADFVAEWTPAPETVSIPEASTDPSQLPHTAHWVMQFDGSLSLQGAGAGVMLTSPNGDVLRYLVRLDFRATNNIAEYEGLLAGLRVAAGLGIRRLLVLGDSQLVVNQVCKEYRCSDPQMDAYVRQVRRMERHFDGIELRHIPRRDNMVADELSRLASSRAQTPPGAFEERLTQPSARPDPLGETDAPDRPPRPVGVQASGPEGSAPSSLRLIAWISEIQAYLTDKTLPEDREGSERVQRISKRYVLVEGTLYRRAANGILLKCIPQEQGVELLADIHEGECGAHSASRTLVGKAFRQGFYWPTALNDAVDLVRRCRACQFHAKQIHQPAQALQIIPLSWPFAVWGLDILGPFKRAPGGFEYLYVAIDKFTKWPEAYPVVKIDKHSALKFIKGITARFGVPNRIITDNGTQFTSELFGDYCEDMGIKLCFASPAHPRSNGQVERANAEILKGLKTKTFNILKKHGDSWIEELPAVLWANRTTPSRATGETPFFLVYGAEAVLPSELTLRSPRATMYCEADQDQLRRDDLDYLEERRRRAALRAARYQQSLRRYHQRHVRARSLCVNDLVLRRVQTRAGLSKLSPMWEGPYRVVGVPRPGSIRLATGDGTELPNPWNIEHLRRFYP

SEQ ID NO: 179523 - protein, 2073 aa, Oryza sativa
  Clone ID: PAT_MRT4530_76978C.1.pep
MAEQAKVHDLSPSVSGDDGEPNPRRRARTPPPPPRQSPKQGEALERVERSAASPIAGDGGERRDGERRLLVYGDGSTPQGALQAAGVLLRHPPVVPDPESPAQRWLDDVAKLVMTARQRLDAGGRSSATKTSGAATTGSASSRRRARRAAAAVRRSVATPSSTPSTREDLRREQGARASLERRRNDRSAAHAMEGASSSRVSPRHGRGNQPSVPPVGGVGCRAFVASLRNVRWPPRFRPTIAEKYDGSVNPAEFLQVYTTGIEAAGGDDRVMANFFPMALKGQARGWLMNLPPASVHSWEDLCQQFTMNFQGTYPRPGEEADLHAVQRRDDESLRSYIQRFCQVRNTIPCIPAHAVIYAFRGASAAPGSAAQSGRRDRRRKKRSVRSDDEGHVLAVEGASRATRKGRPASDKKKEASVPSRERPTGKWCTVHNTSLHDLADCRAVKSLAERTRKWEEERRQERREGKSPAVPSGRRRSEAKQKAPAEDIDDGDNDLGFQEPGATIATVDGGACAHVSRRSLKAMKRELLAAAPTHEATRRARWSEVALTFDQTDHPPCVARGGQIAMVVSPTICNVKLGRVLIDGGAALNIISPAAFDAIKAPGMVLQPSQPIIGVTPGHTWPLGHIDLPVTFGGSANFRTERVNFDVADLSLPYNAVLGRPALVKFMAAVHYAYLQMKMPGPGGPISVHGDLKVALACMEQRADHLAAASKPEGGDERLGTSAPTAPRQRIVTCAEVPEDALVSFLRANADVFAWRPADMPGVPREVIEHRLAVRPGARPVRQKVRRQAPERQAFIREEVARLLEAGFIREVIHPEWLANPVVVPKANGKLRMCIDYTDLNKACPKDPYPLPRIDQIVDSTAGCDLLCFLDAYSGYHQIRMAREDEKKTAFITPVGTYCYTSMPFGLKNAGPTFQRTTRISLGSQIGRNVEAYVDDLVVKTRNQETLLLDLAETFENLRSARIKLNPDKCVFGVPAGKLLGFLVSARGIEANPEKIRAIERMRPPSKLRDVQCVTGCIAALSRFISRLGEKALPLFKLLKRSGPFTWTEEAESALTQLKTYLSSPPVLVAPGPNEPLLLYLAATPQVVSAALVVERDEDNPHFAHPRPVLTWPGSEQGGEAPESNGGLRPLTTGVGPLPACQTVLVATGKICLFPNASVLIPVPGRAGTEPQTKPYPLDMWKYGSALQQRPELNPYSGRGATSHNWHAPKPHRKQGEQGNNNNNNNSMVITKDVTVLGAPDPQEGPEATAGRPHLSPFGPEANPVLTRPGRKQGEEAPEPNGGLRPLTTRVGPLPACPTTPGAPDPQDGPEATVGRPLLSSSDPEVIGTEDECAPRGHLDEERPGDAAPSEEDRPRRKVQRPVYFVSEALRDAKTRYPQAQKMLYAILMASRKLRHYFQAHRVTVVTSYPLGQILHNREGTGRVVKWAIELSEFDLHFEPRHAIKSQALADFVAEWTPAPETVSIPDASTDPSQLPHTAHWVMQFDGSLSLQGAGAGVTLTSPNGDVLRYLVRLDFRATNNMAEYEGLLAGLRVAAGLGIRRLLVLGDSQLVVNQVCKEYRCSDPQMDAYVRQVRRMERHFDGIELRHVPRRDNMVADELSRLASSRAQTPPGAFEERLTQPSARPDPLGETDAPDRPPRPVGVQASGPEGSAPSSLRLIAWISEIQAYLTDKTLPEDREGSERVQRISKRYVLVEGTLYRRAANGILLKCIPQEQGVELLADIHEGECGAHSASRTLVGKAFRQGFYWPTALNDAVDLVRRCRACQFHAKQIHQPAQALQIIPLSWPFAVWGLDILGPFKRAPGGFEYLYVAIDKFTKWPEAYPVVKIDKHSALKFIKGITARFGVPNRIITDNGTQFTSELFGDYCEDMGIKLCFASPAHPRSNGQVERANAEILKGLKTKTFNILKKHGDSWIEELPAVLWANRTTPSRATGETPFFLVYGAEAVLPSELTLRSPRATMYCETDQDQLRRDDLDYLEERRRRAALRAARYQQSLRRYHQRHVRARSLCVDDLVLRRVQTRAGLSKLSPMWEGPYRVIGVPRPGSIRLATGDGTELPNPWNIEHLRRFYP

SEQ ID NO: 179524 - protein, 114 aa, Oryza sativa
  Clone ID: PAT_MRT4530_76979C.1.pep
MRRKGWRQQPPLECACGGRESRGGAASAAHRPQAAYGARAPPPRHYRPLHAPVEAKKSAVPLRAAAVATAPAVRRRRSGRRHCSGRSPSWSPSCRRPRPPLRRRCQPPEYRRRR

SEQ ID NO: 179525 - protein, 359 aa, Oryza sativa
  unsure (1)..(359): unsure at all Xaa locations
  Clone ID: PAT_MRT4530_7697C.1.pep
MSRVSTSWGFVYSRVNKEIIRGARTGSTGVGPTRQPHGPRWTGRTWARTGRRRGPHASAARCARRRPRRRXGGWRRARAPMVTGGGHRHGGAAAERGEGMGEKRRRSTAHPRSTATTKKAAGAEEGAGAARVDRVGVPAVGGLGEGVDGVAGGAAKPEEETPGRETVRGGDGGGPELGGNGGERGRRRELESGEEEGRREAETDGGGTGRVYIGLEGGEGGRRGRNXAREVRPPSMAPARFAXGQIRPFECEREREKWGERKTGSRGIFPPTLLHAGTTGGGGIRGSGGARARARRRERREVRDDGWAPPVSEGGGRARPSAARPRGGRPNGPRGEEREGDGPNSAHQREGGILGFFFL

SEQ ID NO: 179526 - protein, 106 aa, Oryza sativa
  Clone ID: PAT_MRT4530_76980C.1.pep
MRNDVELQSVRQSSPQMIKHPWLIASTQVWQALGEQSTTHCGAHAGATVSVYSHEWAHDSTTAVSKTYSPSTSRRRRRRGQPAPRKPWWRRGRPPYEIEATPVDIL

SEQ ID NO: 179527 - protein, 1914 aa, Oryza sativa
  Clone ID: PAT_MRT4530_76981C.1.pep
MTAQQRLGAGGRSSTTRTSGAATTGSVSSRRRARRAAAVARHSAATPSSAPPTREDQRGEPDARLDIERRRNDRRAPHATEGASSSRVSPRHGREDQPSVPPAGGVGCRAFVASLRNVRWPPRFLPTITEKYDGSVNPTEFFQVYTTGIEAAGGDDRVMANFFPMALKGQARGWLMNLPPASVHSWEDLCQQFTMNFQGTYPRPGEEADLHAVQRGDDESLRSYIQRFCQVRNTIPCIPAHAVIYAFRGGVRHNRMLEKIASKEPQTTTELFQLADRVARKEEAWTWNPSGSGVAASAAPGSAAQTGQRDRRRKKRSVHSGDEGHVLAVEGAPRATRKGRPASDKKKKAGAPSRERPAGKWCTVHNTSLHDLADCRAVKSLAERTRKWEEERRQERREGKSPAVPSGNRRSEAKQKAPAEDIDDGDDDLGFQEPGATIATVDGGACAHVSRRSFKAMKRELLAAAPTHEATRRARWSEVTLTFDQTDHPPCIARGGQIAMVVSPTICNVKLGRVLIDGGAALNILSPAAFDAIKAPGMVLRPSQPIIGVTPGHTWPLGHIDLPVTFGGSANFRTERVNFDVADLSLPYNAVLGRPALVKFMAAVHYAYLQMKMPGPGGPISVHGDLKVALVCLEQRADHLATASKPEGGDERLGTSAPTAPRQRIATCDEVPEDALVSFLRANADVFAWRPADMPGVPREVIEHRLAVRPGARPVRQKVRRQAPERQAFIREEVARLLEAGFIREVIHPEWLANPVVVPKANGKLRMCIDYTDLNKACPKDPYPLPRIDQIVDSTAGCDLLCFLDAYSGYHQIRMAREDEEKTAFITPVGTYCYTSMPFGLKNAGPTFQRTTRISLGSQIGRNVEAYVDDLVVKTRNQETLLSDLAETFESLRSARIKLNPDKCVFGVPAGKLLGFLVSARGIEANPEKIRAIERMCPPSKLRDVQCVTGCMAALSRFISRLGEKALPLFKLLKRSGPFTWTEEAERALTQLKAYLSSPPVLVAPEPNEPLLLYLAATPQVVSAALVVERDEDNPHSAHPHPVLTWPGSKQGGEAPEPNGGLRPLTTGVGPLPARQTVLGAPDPQEGPEATAGRPHLSPFDPEANPVRTRPGREQGEEAPEPNGGLTPLTTGVGPSPACPTTPGAPDPQDGPEATVGRPPLSSSDPEVIGTENECAPRGHLDEERPGDTAPSEEDRPRRKVQRPVYFVSEALRDAKTRYPQAQKMLYAVLMASRKLRHYFQAHRVMVVTSYPLGQILHNREGTGRVVKWAIELSEFDLHFEPRHAIKSQALADFVAEWTPAPEPVSLPEVSSDPSQPPHTGHWVMQFDGSLSLQGTGAGVTLTSPTGDVLRYLVRLDFRATNNMAEYEGLLAGLRVAAGLGIRRLLVLGDSQLVVNQVCMEYRCSDPQMDAYVRQVRRMERHFDGIELRHVPRRDNMIADELSRLASSRAQTPPGAFEERLTQPSARPDPLGKTDVPDRPPRPVGAQASGPEGSASSSLRLIAWISEIQAYLTDKTLPEDREGSERVQRISKRYVLVEGILYRRAANGILLKCIPQEQGVELLADIHEGECGAHSASRTLVGKAFRQGFYWPTALNDAVDLVRRCRACQFHAKQIHQPAQALQIIPLSWPFAVWGLDILGPFRRAPGGFEYLYVAIDKFTKWPEAYPVIKIDKHSALKFIKGITARFGVPNRIITDNGTQFTGELFGDYCEDMGIKLCFASPAHPRSNGQVERANAEILRGLKTKTFNILKKHGDSWIEELPAVLWANRTTPSRATGETPFFLVYGAEAVLPSELTLRSPRATMYCEADQDQLRRDDLDYLEERRRRAALRAARYQQSLRRYHQRQVRARSLCVDDLVLRRVQTRAGLSKLSPMWEGPYRVIGVPRPGSVRLATGDGTELPNPWNIEHLRRFYP

SEQ ID NO: 179528 - protein, 292 aa, Oryza sativa
  unsure (1)..(292): unsure at all Xaa locations
  Clone ID: PAT_MRT4530_76982C.1.pep
LFLKRKRDLLRQXVGFTVDRVHGDGSRKRTAEIYPSKTDGXDRPVHDRTTADGNDDDGDDVITGDGSASRARRRSTARRRKRRTPTRCGRHDELTGDQNSDGGDLRLNDGGGIPAVDSDGEGADEDGGSLATTTVTSXRAVTTTGATAAHGWSGGDGGGAKRHGARALPATRDXGEGGSGGXGAAAKAHGDRRREGKFRVRRREIDPNXTQIRRFPKRFRRCFQKGKGRVDHGDPFPSINSTGDRKGRWDPHVSGXARARAGGRSAWADLGRARERDLWAQSQKRILKTFFH

SEQ ID NO: 179529 - protein, 2027 aa, Oryza sativa
  Clone ID: PAT_MRT4530_76983C.1.pep
MAEQAKVHDLSPSVSGDDGEPNPRRRARTPPPPPHQNPKQGEALERVEKSAASPVAGDAGERRDGERRLLVYGDGSTPQGALQAVGALLRHPPVVPDPESPAQRWLDDVANLVMTAQQRLGAGGRSATTKTSGAATTGSVSSRRRARRAAAVARHSAATPSSAPPTREDQHGEPDARLDIERRRNSRRTPRATEGASSSRVSPRHGREDQPSVPPAGGVGCRAFVASLRNVRWPPRFRPTITEKYDGSVNPTEFLQVYTTGIEAAGGDDRVMANFFPMALKGQARGWLMNLPPASVHSWEDLCQQFTMNFQGTYPRPGEEADLHAVQRGDDESLRSYIQRFCQVRNTIPCIPAHAVIYAFRGGVRHNRMLEKIASKEPQTTAELFQLADRVARKEEAWTWNPSGSGVAASAAPGSAAQTGRRDRRRKKRSVHSGDEGHVLAVEGAPRATRKGRPASDKKKEAGTPTRERPAGKWCSVHNTSLHDLADCRAVKNLAERTRKWEEDRRKERREGKSPATPSGKRRSEAKQKAPAVDIDDGDDDLGFQEPGATIATVDGGACAHVSRRSLKAMKRELLAAAPTHEATRRARWSEVALTFDQTDHPPCVARGGQIAMVVSPTICNVKLGRVLIDGGAALNIISPAAFDAIKAPGMVLQPSQPIIGVTPGHTWPLGHIDLPVTFGGSANFRTERVNFDVADLSLPYNAVLGRPALVKFMAAVHYAYLQMKMPGPGGPISVHGDLKVALACMEQRADHLAAASKPEGGDERLGTSAPTAPRQRIVTCAEVPEDALVSFLRANADVFAWRPADMPGVPREVIEHRLAVRPGARPVRQKVRRQAPERQAFIREEVARLLEAGFIREVIHPEWLANPVVVPKANGKLRMCIDYTDLNKACPKDPYPLPRIDQIVDSTAGCDLLCFLDAYSGYHQIRMAREDEEKTAFITPVGTYCYTSMPFGLKNAGPTFQRTTRISLGSQIGRNVEAYVDDLVVKTRNQETLLSDLAETFENLRSARIKLNPDKCVFGVPAGKLLGFLVSARGIEANPEKIRAIERMRPPSKLRDVQCVTGCIAALSRFISRLGEKALPLFKLLKRSGPFTWTEEAERALTQLKTYLSSPPVLVAPGPNEPLLLYLAATPQVVSAALVVERDEDNPHFAHPRPVLTWPGSEQGGEAPESNGGLRPLTTGVGPLPACQTVLGAPDPQEGPEATAGRPHLSPFGPEANPVLTRPGRKQGEEAPEPNGGLRPLTTGVGPLPACPTTPGAPDPQDGPEATVGRPLLSSSDPEVIGTEDECAPRGHLDEERPGDAAPSEEDRPRRKVQRPVYFVSEALRDAKTRYPQAQKMLYAILMASRKLRHYFQAHRVTVVTSYPLGQILHNREGTGRVVKWAIELSEFDLHFEPRHAIKSQALADFVAEWTPAPETVSIPEASTDPSQLPHTAHWVMQFDGSLSLQGAGAGVMLTSPNGDVLRYLVRLDFRATNNMAEYEGLLAGLRVAAGLGIRRLLVLGDSQLVVNQVCKEYRCSDPQMDAYVRQVRRMERHFDGIELRHVPRRDNMVADELSRLASSRAQTPPGAFEERLTQPSARPDPLGETDAPDRPPRPVGVQASGPEGSAPSSLRLIAWISEIQAYLTDKTLPEDREGSERVQRISKRYVLVEGTLYRRAANGILLKCIPQEQGVELLADIHEGECGAHSASRTLVGKAFRQGFYWPTALNDAVDLVRRCRACQFHAKQIHQPAQALQIIPLSWPFAVWGLDILGPFKRAPGGFEYLYVAIDKFTKWPEAYPVVKIDKHSALKFIKGITARFGVPNRIITDNGTQFTSELFGDYCEDMGIKLCFASPAHPRSNGQVERANAEILKGLKTKTFNILKKHGDSWIEELPAVLWANRTTPSRATGETPFFLVYGAEAVLPSELTLRSPRATMYCEADQDQLRRDDLDYLEERRRRAALRAARYQQSLRRYHQRHVRARSLCVDDLVLRRVQTRAGLSKLSPMWEGPYRVIGVPRPGSIRLATGDGTELPNPWNIEHLRRFYP

SEQ ID NO: 179530 - protein, 32 aa, Oryza sativa
  Clone ID: PAT_MRT4530_76984C.1.pep
QRASDAHLVGLPPSPIQSKIKTWHGHRHNCKL

SEQ ID NO: 179531 - protein, 65 aa, Oryza sativa
  Clone ID: PAT_MRT4530_76985C.1.pep
MPPRPLVARASGTQLHGALPTAGYKSVMRRVLTRPAVNRMSIASFYTPGAGAVIFPAPALAAADP

SEQ ID NO: 179532 - protein, 76 aa, Oryza sativa
  Clone ID: PAT_MRT4530_76986C.1.pep
FFFFFFLNVLCTYFSFQTLVSHPDMVSTLVSTTTMHAMHFFWGLLIHYTHTRVTNSSTRITTGTGVEMLTDVGTPV

SEQ ID NO: 179533 - protein, 1068 aa, Oryza sativa
  Clone ID: PAT_MRT4530_76987C.1.pep
MAEICLEKLKEKLLPNYLPLPRLAIHDTVARAEAQVRTRVGKKLPKPNKQSVRLDPPRPVGILRPIEADGFMPNPYIGKIQIWNQENIILGQCGKTRVGANVSSFVGANRDRCKERGAYAPMSTGFAAQAKLDQLEPSCANAIVQYANISKPSWISWYAFSARDEAIQALINEAKSYYMRFPPIQHLQQLPLLQSPSTRYDYESPSLYLEPQFQSLNIPGDGLPRDYLNAQVNVLGSDVHEMHNQRQSHPRGRHRDFFGEGSDFTIYITINFDGGRLTKENIWDYFKKFGPVINVYLSCKPGNEKYTFGFVTFENADTVSLLLSKSTPHFIFGVKVRVKRYLEWTKQEQRKLPQENDHFDNVAHRTSCANAFDGMPRDYLNAQVLGSGVPELHNQRLSHPRGSQRDFFGHNQRQSHPHGSQRDFFGQSTEFTIYITIAKNILTWKNIRDYFKQLPQRNDRFDNVAHRTSCDNAIEGHSGQKMPNFIELSQETLTHQFGDFDSPLTHNLSEKKTESPEDDHATKESNVDESSEFSAILNSLISTCPGSKYFSIEFHHGGFFCGMGVNRTYMDGKVDWFDNIDSRDWGRCLHLADFVAMLGYDSDGKLKTYWLLPGKNMSDGLRIIDSEVEINVMKSVSNKIKNFVIYFDHTNHVSGRNIDDIVLSPEAELPEVFNPSRQCQQTEEAESEDRNPRNAPDGHVVHEELDVDDSESDSDFVDSDYEWEDDDDDLFEENVDGDVEEGDRKKFNHKKAAGSVLKGKKVVADLSEGDTSDDEQLHLPSDDDDDEFNLKFKSFNPEDINNPIFKVGMVFSSVELVRKAISEYSMKNRVDIKMPRNDRTRIKAHCAEGCPWNFYASMDSRAKAFIVKTYEPHHKCKKEWILKRCTAKWLAEKYTESFRADGKMTIPSFAKTVQKEWNLTPSRSKLARARRLALKEIYGDEIAQYNLLWDYGNELRRSNPGSSFYLRLDEGKFSSLYFSLDVCKRGFLSGCRPIICLDGCHIKTKFGGQLLTAVGIDPNDCIYPIAMAVVEVESFSTWTWFLDTLKTELGIVNTSPWTIMTDKQKVTI

SEQ ID NO: 179534 - protein, 118 aa, Oryza sativa
  unsure (1)..(118): unsure at all Xaa locations
  Clone ID: PAT_MRT4530_76988C.1.pep
IAQQRSLKLRVFRXLRAIYHQDLRRREISIATRXVXCDTPHRTNDRSMHSSSTSARRRLTTRVSSAAXXQAGRXSGXYVFXQYIYXNTDTPLSXHXASYHLSCTGXPGALXVEXXCGS

SEQ ID NO: 179535 - protein, 69 aa, Oryza sativa
  Clone ID: PAT_MRT4530_76989C.1.pep
MERGRPCDGLCRFRIHLGTRGDCPLPCAEWGNHIVDDVREMPIVEGTGAFRFARGYVQAHTYVGSNHKN

SEQ ID NO: 179536 - protein, 98 aa, Oryza sativa
  Clone ID: PAT_MRT4530_7698C.1.pep
SLLQLPGSPPGGLNAHMNPISADGRYLMRTCLTHLRIHDRRVSPSVIMPSFTRGREPHWLGTEYTHTAKISVGARTIVCKGSAPCLSTLANSADRSLT

SEQ ID NO: 179537 - protein, 92 aa, Oryza sativa
  unsure (1)..(92): unsure at all Xaa locations
  Clone ID: PAT_MRT4530_76990C.1.pep
PPRHNRLDPRRRFVYIELLPXSCRRLFKTSRALNTIPKDEGDRQAALPSTSLKDMTTSSTENTPLSPDKKAEAVLLSAEKQLKSDRKKSLMA

SEQ ID NO: 179538 - protein, 1595 aa, Oryza sativa
  Clone ID: PAT_MRT4530_76991C.1.pep
MAVNASFSSHGFGEGHHVAQLRDLARFLGFSCPEYTGYSVDRVPPHCELSVYLYPRGDARYPCPYSESQPVLTRMVELSEAQATQHDLLLEAYRSLARRYAALEACLAEEGVTSVDTISWDSGRLCHASHLSSHSSRGSARTPSGPRSPSSRAPYSPVYSPYPHPVSPSYTPGHTPVASSRRGPRFIRTARKRVVGSSTVFRFHYPAPPPLAMASRPRRTARAPARFGFEDGRVEPEANHESANEQSHHSNRSHRTVSRNAEVEQPRRSSRSHRTVSRDAEMEQSHRSHHTASHNSGEERLPSPPHVENNMQHLMAVQTQILQGLTTAIASFQHNAHGNGHPHMGNNRSKLTDFLRSRPPEFSQTVEPVEADDWLKDVDRKLNLVQCTPVEKTLYASHQLRGPAADWWENYCNAHLEPTNIAWDEFATAFRAAHVPESTIDMKKEEFNRLKQGNSSVNEYLSQFNKLARYAPEEVDTDKKKIRKFLKGIAVGMRLQLLAHDFPTFQHMINKALLLEDARKEATEEYKKRKSNHQGNSSRGAPRPRYGQPMQYHQSVTQANRQPGYAPRPQMNRPAPPPQQRAPSGNTAPNSVTSFKSPQGPSAVQCFRCNQMGHYARQCPQNPTNTNSGHANGSTARTPTPAAAQSRPSSQASGQGSRASNNFGRGRVNHIQAETAQDAPDVVMGPGGKQIRFTPNTPTASRSILTCLQVTSLESVPIVCAYPDVFPEELTRMPPDREIEFAIELALGTAPIAKRPYRMAANELAEVKRQIEELESKGYVRPSSSPWGAPVLLVKKKDGSERMVIDYRALNEVTIKNKYPLPRIDDLFDQLKGARVFSKIDLRSGYHQLKIRSEDIPKTAFSTRYGLYEFTFVVVFIDDILIYPKNVSEIRSFLGLAGYYRRFIKGFSKLARPMTELLKKEKKFQWSAACEDSFQEMKKRLTTAPVLTLPDIRKDFEIFCDASRQGLGCVLMQERKVVAYASRQLRPHEVNYPTHDLELAAVVHALKIWRHYLIGNRCEVYTDHKSLKYIFTQTELNMRQRRWLELIKDYDLGIHYHPGKANVVADALSRKAYCNVAQIRPDQDHLCRELEKLRLTMVQSGVPASLTVQPTLESQIREAQKDDEGIKELIKRIQEKKDTNFSIDDQGTVWCGPRIYVPAKKELRDLILKEAHESAYSIHPGSTKMYQDIKAYFWWAGMKRDVAEYVALCDICQRVKAEHQRPAGLLQPLPIPEWKWEEIGMDFITGLPRTPSGYDSIWVIVDRLTKSAHFVLVKTTYDGKKLAELYMTHVVCRFGCPKKIVSDRGTQFTSRFWKQLHEALGTDLNFSTAYHPQTDGQTERVNQILEDMLRACALDFEGTWDRCLPYAEFSYNNSYQASIQMSPNEAMFGRKCRTPLCWNEVGEALVFGPDILKSAEEQVKLIRERLKTAQNRQKNYADNRRRDLEFEKGDHVYLRVSPLHGMRRFGMSGKLAPRYIGPYLITARRGEVAYQLELPEGLADVHNVFHVSQLKKCLRIPEEQVPLVSEPEDPQCEDFEDQAPDLEQGKPPLNILSLLLVWDPSRRHMVNLCRLSKCLVMKAWRSPDVADPHGLDDPG

SEQ ID NO: 179539 - protein, 201 aa, Oryza sativa
  Clone ID: PAT_MRT4530_76992C.1.pep
MTARAGCTGGGDARVAATRRAGSPSTRRAWRKDLTAGGARRRSPTTLSHIVFGVGASARTWDKRRGYAELWWRPGEMRGHVWLDEQPVGPWPAATCPPYRVSADASRFGDRASASRMARIVAGLMANGTTDSPEARWFVMGDDDTVFFPDNLVAVLNKYDHEEMYYVGAPSESVEQDVMHSYGMAFGGGGFAVSYPAAAEL

SEQ ID NO: 179540 - protein, 1545 aa, Oryza sativa
  Clone ID: PAT_MRT4530_76993C.1.pep
MAVNASFSSHGFGEGHHVAQLRDLARFLGFSCPEYTGYSVDRVPPHCELSVYLYPRGGIHGAGLRPHHFTVARPTLQIAYQDLSWTALRRLAHDYSHRLGGSAFRQLPRLPSGHADARYPCPYSESQPVLTRMVELSEAQATQHDLLLEAYRSLARRYAALEARLAEEGVTSVDTISWDSGRLCRASHLSSHSSSGSARTPSGPRSPSSRAPYSPVYSPYPHPVSPSYTPGHTPVASSRRGPRFIRTARKRVVGSSTVFRFHYPAPPPPAPRAAAGPRQLRGPAVDWWENYCNAHPEPTNIAWDEFATAFRAAHVPESTIDMKKEEFNRLKQGNSNVNEYLSMFNKLARYAPEEVDTDKKKIRKFLKGIAVGMRLQLLAPDFPTFQHMINKALLLEDARKEATKEYKKRKSNHQGNSSRGAPRPRYGQPMQYHQSVTQANRQPGYTPRPQMNRPAPQPQQRAPSGNPAPNSVTSFKSPQGPSAVQCFRCNQMGHYARQCPQNPINTNSGHANGSTARTSTPAAAQSRPSSQASGQGSRASNNFGRGRVNHIQAETAQDAPDVVMGMFFVNSIPTIVLFDSGASHSFISQAFVKRNGWKTQNLRVPMIVHSPGRNIRATQICPEVNLRIEEVDFLAKPIVLDSQSLDIILGMDWLAKHKGQIDCAEKSITLQGPGGKQVRFTSNTPTASRSILTCLQVTTLESVPIVCEYPDVFPEELTGMPPDREVEFAIELAPGTAPIAKRPYRMAANELAEVKRQTEELESKGYFVVVFIDNILIYSKNEEEHAEHLRMIIEKLRDHQLYAKFLKCEFWLDRVAFLGHVISSNGVEVDPSKVEAVLAWNPPKNVSEIRSFLGLAGYYRRFIEGFSKLARPMTELLKKEKKFQWTAACEDSFQEMKKRLTTAPVLTLPDIQKDFEIFCDASRQGLGCVLMQERKVVAYASRQLRPHEVNYPTHDLELAAVVHALKIWRHYLIGNRCEVYTDHKSLKYIFTQTELNMRQRRWLELIKDYDLGIHYHPGKANVVADALSRKAYCNIAQIRPDQDRLCREMEKLRLTVVQSGVPASLTVQPTLESQIREAQKDDEGIRELIKRIQEKKDTNFSIDDQGTVWCGPRICVPAKKELRDLILKEAHESAYSIHLGSTKMYQDIKAYFWWAGMKRDVAEYVALCDICQRVKAEHQRPAGLLQPLPIPEWKWEEIGMDFITGLPRTPSGYDSIWVIVDRLTKSAHFVPVKTTFDGKKLVELYMTHVVCRFGCPKKIVSDRGTQFTSRFWKQLHEALGTDLNFSTAYHPQTDGQTERVNQILEDMLRACALDFEGTWDRCLPYAEFSYNNSYQASIQMSPNEAMFGRKCRTPLCWNEVGEALVFGPDILKAAEEQVKLIRERLKTAQNRQKNYADNRRRDLEFKKGDHVYLRVSPLRGMRRFGMSGKLAPRYIGPYLITARCGEVAYQLELPEGLADVHNVFHVSQLKKCLRVPEEQVPLGNIKLEKNLTYKERPIKVLEEAERQTRRKTTKFYKVQWSNHSEDKATWEREDLLRAEFPELLN

SEQ ID NO: 179541 - protein, 1776 aa, Oryza sativa
  Clone ID: PAT_MRT4530_76994C.1.pep
MAVNASFSSHGFGEGHHVAQLRDLARFLGFSCPEYTGYSVDRVPPHCELSVYLYPRGGIHGAGLRPHHFTVARPTLQIAYQDLSWTALRRLAHDYSHRLGGSAFRQLPRLPSGHSDARYPCPYSESQPVLTRMVELSEAQATQHDLLLEAYRSLARRYAALEARLAEEGVTSVDTISWDSGRLCHASHLSSHSSRGSARTPSGPRSPSSRAPYSPVYSPYPHPVSPSYTPGHTPVASSRRGPRFIRTARKRVVEVEQPRRSSRSHRTVSREAELEQSHRPHRTASHNSGEERLPSPPHVENNMQHIMAVQTQILQGLTTAIASFQHNAHGNGHPHMGNNRSKLTDFLRSRPPEFSQTVEPVEADDWLKDVDRKLNLVQCTPVEKTLYASHQLRGPAADWWENYCNAHPEPTNIAWDEFATAFRAAHVPESTIDMKKEEFNRLKQGHSSVNEYLSQFNKLARYAPEEVDTDKKKIRKFLKEIAVGMRLQLLAHDFPTFQHMINKALLLEDARKEATEEYKKRKSNHQGNSSRGAPRPRYGQPMQYHQSVTQANRQPGYAPRPQINRPAPQPQKHAPSGNTAPNSVTSFKSPQGPSAVQCFRCNQMGHYARQCPQNPTNTNSGHANGSTARTPTPAAAQSRPSSQASGQGSRASNHFGRGRVNHIQAETAQDAPDVVMGMFSVNSVPAIVLFDLGASHSFISQAFVKRNGWKTQNLRVPMIVHSPGRNIRATQICPEVNLRIEEVDFLAKPIVLDSQSLDIILGMDWLAKHKGQIDCAEKSITLQGPGGKQVRFTPNTPTASRSILTCLQVTSLESVPIVCEYPDVFPEELTRMPPDREIEFAIELAPGTAPIAKRPYRMAANELAEVKRQIEELESKGYVRPSSSPWGAPVLLVKKKDGYERMVIDYRALNEVTIKNKYPLPRIDDLFDQLKGARVFSKIDLRSGYHQLKIRSEDIPKTAFSTRYGLYEFTVMSFGLTNAPAFFMNLMNKIFMEYLDQFVVVFIDDILIYSKNEEEHAEHLRLIMEKLRDHQLFAKFSRCEFWLDRVAFLGHVISSNGVEVDPSKVEAVLAWNPPKNVSEIRSFLGLAGYYRRFIEGFSKLARPMTELLKKEKKFQWSTACEDSFQEMKKRLTTAPVLTLPDIRKDFEIFCDASRQGLGCVLMQERKVVAYASRQLRPHEVNYPTHDLELAAVIHALKIWRHYLIGNRCEVYTDHKSLKYIFTQTELNMRQRRWLELIKDYDLGIHYHPGKANVVADALSRKAYCNVAQIRPDQDHLCRELEKLRLTVVQSGVPASLTVQPTLESQIREAQKDDEGVKELIKRIQEKKDTNFSIDDQGTVWCGSRICVPAKKELRDLILREAHESAYSIHPGSTKMYQDIKAYFWWAGMKRDVAEYVALCDICQRVKAEHQRPAGLLQPLPIPGWKWEEIGMDFITGLPRTPSGYDSIWVIVDRLTKSAHFVPVKTTYDGKKLAELYMTHVVCRFGCPKKIVSDRGTQFTSRFWKQLHEALGTDLNFSTAYHPQTDGQTERVNQILEDMLRACALDFEGTWDRCLPYAEFSYNNSYQASIQMSPNEAMFGRKCRTPLCWNEVGEALVFGPDILKSAEEQVKLIRERLKTAQNRQKNYADNRRRDLEFEKGDHVYLRVSPLRGMRRFGMSGKLAPRYIGPYLITARRGEVAYQLELPEGLADVHNVFHVSQLKKCLRVPEEQVPLGNIELEKNLTYKERPIKVLEKAERQTRRKTIKFYKVQWSNHSEDEATWEREDLLRAEFSELLP

SEQ ID NO: 179542 - protein, 111 aa, Oryza sativa
  unsure (1)..(111): unsure at all Xaa locations
  Clone ID: PAT_MRT4530_76995C.1.pep
MSPMVLFTSSKIKSKVHYRSLNLYRCVIPVSKLVNRPFRSSNLFDCVIPVPKLAYHSFRSSNLFRCVTPVPKFGFEYHLGXIGRDRGDTTEQVGXPKRVICKFRXRDDTVE

SEQ ID NO: 179543 - protein, 127 aa, Oryza sativa
  Clone ID: PAT_MRT4530_76996C.1.pep
VFRFHYPAPPPPAARAAAGPRQVPPVPSRQPIDVSSTEEPTTGGSQADEDRPRRAARAPARFGFEDGRVEPEENHESANEQSHHSNRSHRTVSRNAEVEQPRRSNRSHRTVFRNAEMEQSHRSHRTA

SEQ ID NO: 179544 - protein, 99 aa, Oryza sativa
  unsure (1)..(99): unsure at all Xaa locations
  Clone ID: PAT_MRT4530_76997C.1.pep
PVTLQINLLIDTSPRKHRVGVQSSRAADRSRAHNCITKGKRKPGLGPNNTGATWELGRNPKTHRSRLAPGRTPRQRDPLHLLQQLXGGDYLYRARVSTG

SEQ ID NO: 179545 - protein, 669 aa, Oryza sativa
  Clone ID: PAT_MRT4530_76998C.1.pep
MGHYARECPQNPTNTNSGHANGSTARTPTPAAAQSRPSSQASGQGSRASNSFGRGRVNHIQAETAQDAPDIVMGYHQLEIRSEDIPKTTFSTRYGLYEFTVMSFGLTNAPAFFMNLMNKIFMEYLDQFVVVFIDDILIYSKNEEEHAEHLRLIMEKLRDHQLLAKFSKCEFWLDRVAFLGHMISSNGVEVDPSKVKAVLAWNPPKNVSEIRSFLGLAGYYRRFIEGFSKLARPMTELLKKEKKFQWSAACEGSFQEMKKRLTTAPVLTLPDIRKDFEIFCDASRQGLGCVLMQERKVVAYASRQLRPHEVNYPTHDLELAAVVHALKIWRHYLIGNRCEVYTDHKSLKYIFTQTELNMRQRRWLELIKDYDLGIHYHPGKANVVADALSRKAYCNVAQIRPDQDRLCRELEKLRLTVEKKDTNFSIDDQGTVWCGPRICVPAKKELRDLILKEAHESAYSIHPGSTKMYQDIKAYFWWAGMKRDVTEYVALCDICQRVKAEHQRPAGLLQPLPIPEWKWEEIGMDLITGLPRTPSGYDSIWMSPNEAMFGRKCHTPLCWNEVGEALVFGPDILKAAKEQVKLIRERLKTAQNRQKNYADNRRRDLEFGKGDHVYLRVSPLRGMRRFGMSGKLAPRYIGPYLITARRGEVAYQLELPEGLADVHTVFHVS

SEQ ID NO: 179546 - protein, 484 aa, Oryza sativa
  Clone ID: PAT_MRT4530_76999C.1.pep
MVIDYRALNEVTIKNKYPLPRIDDLFDQLKGARVFSKIDLRSGYHQLKIRSEDIPKTAFSTRYGLYEFTVMSFGLTNAPAFFMNLMNKIFMDYLDQFVMVFIDDILIYSKNEEEHAEHLRLIMEKLRDHQLFAKFSKCEFWLDRVAFLGHVISSNGVEVDPSKVEAVLAWNPPKNVSEIRSFLGLAGYYRRFIEGFSKLARPMTELLKKEKKFQWSTACEDSFQEMKKRLTTAPVLTLPDIRKDFEIFCDASRQGLGCVLMQERKVVAYASRQLRPHEVNYPTHDLELAAVVHALKIWRHYLIGNRCEVYTDHKSLKYIFTQTELNMRQRRWLELIKNYDLGIQYHPEHQRPAGLLQPLPIPEWKWEEIGMDFITGLPRTPSGFGMSGKLAPRYIGPYLITTRRGEVAYQLELPKEEQVPLGNIELEKNLTYKERPIKVLEEAERQTRRKTIKFYKVQWSNHSEDEATWEREDLLRAEFPELLP

SEQ ID NO: 179547 - protein, 61 aa, Oryza sativa
  Clone ID: PAT_MRT4530_7699C.1.pep
MLRKTWNSHMPPCSRTDSASGYTYGRSHRVEATFVLLRLLRERETRKCRDAVRETMTHRRP

SEQ ID NO: 179548 - protein, 123 aa, Oryza sativa
  Clone ID: PAT_MRT4530_769C.1.pep
MASAGSGGCGISASTTTTSIVGGVPRWLDALPNLMVLRLSHNSISGHIPPSLANLTKIVQLEFDQNLLESSIPDGLPRLPALRMLALSQNSLTGEILPSFFNMTSLRGLALANNVFRSELLAD

SEQ ID NO: 179549 - protein, 437 aa, Oryza sativa
  unsure (1)..(437): unsure at all Xaa locations
  Clone ID: PAT_MRT4530_76C.1.pep
MAAMAMDHDHDHASSPAPPARLPAPPYHHSPSAAAAAAVEEVATPPRKSAAGAGAQRSSPMPSPLQLSGCSLQELLLMSPPPGSARRNWSRHRGAGLDESLEMVAAPAAGTPPRRRRRVAAEQCAAPAVASPRNGRRARRRLEKEIEVEDDAARRARRRKSTRAAATKAAPAAADKVATAAADKEDTSMALVLASTDAIRGADALEQSGWEDLWERIVDLVMWKNVAKSALWFGLGSMFFFSCSFSREITFSPISALCHLGVMVLGLAFFKDSIPQSRQQVERGRSFRLTEDDVLRAARAVLPVANSMISTAQVIFSGEPSMTLKXFFTSFTLPKLYSCYSSQIHKRGRXLNFLLFLVEILRDRALEAWKSCPRKKLVAGTAVTMCWNMFSVKTRIIAAFISVVILRYNQKYRKAVVNAGAESCQDEQEQKMEIEES

SEQ ID NO: 179550 - protein, 54 aa, Oryza sativa
  Clone ID: PAT_MRT4530_77000C.1.pep
PYRLHNSRHDPPTTYSSFNKSTDNEWFGMSPANTDRTCCDATCWYNYKFRWYYV

SEQ ID NO: 179551 - protein, 1322 aa, Oryza sativa
  Clone ID: PAT_MRT4530_77001C.1.pep
MASRPRRAAHAPARFGFEQGRVEPEANHESANEQSHHSNRSHHTVSRNAEIEQPHRSNRSHHTASRNAEVEQSHRSHRTASHNSGEERLPSPPHVENNMQHLMAVQTQIVQGLAAAIAGFQHNAHGNGHPHRGNNRSKLTDFLRSRPPEFSQTVKPAEADDWLKDVDRKLNLVQCTPVEKTLYASHQLRGPAADWWENYCNAHPEPTNIAWDEFVMAFHAAHVPKSTIDMKKEEFNRLKQGNNSVNEYLSQFNKLARVTSFKSPLGPSAVQCFRCNQMGHYARQCPQNPTNTNSGHANGSTARTPTPAAAQSRPSSQASGQGSRASNNFGRGRVNHIQAETAQDAPDVVMGMFSVNSVPAIVLFDSGASHSFISQAFVKRNGWKTQNLRVPMIVHSPGRNIRATQIYPEVNLRIEEVDFLAKPIVLDSQSLDIILGMDWLAKHKGQIDCAEKSITLQGPGGKQVRFTSNTPTASRSILTYLQVTSLESVPIVCEYPDVFPEELTSMPSDREIEFAIELAPGTAPIAKRPYRMAANELAEVKRQIEELESKGYHQLKIRSEDIPKTAFSTRYGLYEFTVMSFGLTNAPAFFMNLMNKIFMEYLDQFVVVFIDDILIYSKNEEEHAEHLMLIIEKLRDHQLFAKFSKCEFWLDRVAFLGHVISSNGVEVDPSKVEAVLAWNPPKNVSEIRSFLGLAGYYRRFIEGFSKLARPMTELLKKEKKFQWSTACEDSFQEMKKRQGLGCVLMQERKVVAYASRQLRPHEVNYPTHDLELAAVVHALKIWRHYLIGSRCEVYTDHKSLKYIFTQTELNMRQRRWLELIKDYDLGIHYHPGKANVVADALSRKTYCNVAQIWPDQDHLCRELEKLRLTVENKGTDFSIDDQGTVWCGPRICVPAKKELRDLILKEAHESAYSIHPGSTKMYQDIKAYFWWAGMKRDVAEYIALCDICQRVKAEHQRPAGLLQPLPIPEWKWEEIGMDFITGLPRTPSGYDSIWVIVDRLTKSAHFVPVKTTFDGKKLAELYMTHVVCRFGCPKKIVSDRGTQFTSRFWKQLHEALGTDLNFSTAYHPQTDGQTERVNQILEDMLRACALDFEGTWDRCLPYTEFSYNNSYQASIQMSPNEAMFGRKCRTPLCWNEVGEALVFGPDMLKAAEEQVKLIRERLKTSQNCQKNYADNRRRDLEFEKGDHVYLRVSPLRGMRRFGMSGKLAPRYIGPYLITARRGEVAYQLELPEGLADVHNVFHVSQLKKCLRVPEEQVPLGNIELEKNLAYKERPIKVLEEAERQTRRKTIKFDKVQWSNHSEDEATWEREDLLRAEFPELLP

SEQ ID NO: 179552 - protein, 466 aa, Oryza sativa
  Clone ID: PAT_MRT4530_77002C.1.pep
MVPVGKSGTDGGYPTSTNSPFFSSANITINTGVDPNEEVAPPVVVRPSEPATSTADKILLSTLDKPVATIPVTVLLAFDHPIHDATAETIKTALAQSLVHYYPIAGRISCDNDDGGHFYIDCTGEDLGVTFVAASANCTMEELMCLVDDQAPDDETAVVQQLAFNCTPDDLHHRLLWVQVTTLNCGGFVVGVTWSHGVADGPGIAQFIQAVGELARGLPSPSVVPVRLDDKIATQAVPPFTMAVHRFISGLKPVSNLDVRNVTVSSSLINHIIVGARRRATVFEAVAAVLWQCRTRVVMTDPEAPAVLLFAVNARKYLGAKDGYYGCCTAMHMAVSKSGTVANGDIMKLVGIIRRAKEQIPEQLKADDGEMMLRTMVGEKQVNGYESLLYLTSWRNIGFEDVDFGSGKTARVMTYPPRMLSMMPRIAPICFMLKATEEGVRVMSDCVTADHADAFYQEIAKLKATT

SEQ ID NO: 179553 - protein, 1137 aa, Oryza sativa
  Clone ID: PAT_MRT4530_77003C.1.pep
MAVNASFSSHGFGEGHHVAQLRDLARFLGFSCPEYTGYSVDRVPPRCELSVYLYPRGGIHGAGLRPHHFSVARPTLQIAYQDLSWTALRRLAHDYSHHLGGSAFRQLPRLPSGHADARWLAAPAVQLVHQPASVLKKLRGPAADWWENYCNAHPEPTNIAWDEFATAFRAAHVPESTIDMKKEEFNRLKQGNSSVNEYLSMFNKLARYAPEEVDTDKKKIRKFLKGIAVGMRLQLLAHDFPTFQHMINKALLLEDARKEATEEYKKRNVTSFKSPQGPSAVQCFRCNQMGHYARQCPQNPTNTNSGHANGSTARTPTPAAAQSCPSSQASGQGSRASNNLGRGRVNHIQAETAQDAPDVVMVLLVKKKDGSKRMVIDYRALNEVTIKNKYPLPQIDDLFDQLKGARVFSKIDLRSGYHQLKIRSEDIPKTAFSTRYGLYEFTVMSFGLTNAPAFFMNLMNKIFMEYLDQFVVVFIDDILIYSKNEEEHAEHLRLIMEKLRDHQLFAKFSKCEFWLDRVAFLGHVISSNGVEVDPSKVEAVLAWNPPKNVSEIRSFLGLAGYYRRFIEGFSKLARPMTELLKKEKKFQWSAACEDSFQEMKKRQLRPHEVNYPTHDLELAAVVHALKIWRHYLIGNRCEVYTDHKSLKYIFTQTELNMRQRRWLELIKDYNLGIHYHPGKANVVADALSRKAYCNVARIRPDQDRLCRELEKLRLTVVQSGVPASLTVQPTLESQVREAQKDDEGIKELIKRIQEKKDTDFSIDDQGTVWCGPRICVPAKKELRDLILKEAHESAYSIHPGSTKMYQDIKAYFWWAGMKRDVAEYVALCDICQRVKAEHQRPAGLLQPLPIPEWKWEEIGMDFITGLPRTPSGYDSIWVIVDRLTKSAHFVPVKTTFDGKKLAELYMTHVVCRFGCPKKIVSDRGTQFTSRFWKQLHEALGTDLNFSTAYHPQTDALVFGPDILKAAEEQVKLIRERLKTAQNRQKNYADNRRRDLEFEKGDHVYLRVSPLRGMRRFGMSGKLAPRYIGPYLITARRGEVAYQLELPEGLADVHNVFHVSQLKKCLRVPEEQVPLGSIELEKNLTYKERPIKVLEEAERQTQRKTIKFYKVQWSNHSEDEATWEREDLLRAEFPELLP

SEQ ID NO: 179554 - protein, 350 aa, Oryza sativa
  Clone ID: PAT_MRT4530_77004C.1.pep
METPLSSRRITRSMAKASAAAPDATSTAHPPRPALHDITNDSPIVGLASSGLRTPASTAAKARPTRASRRTPGSGEALLRGQVKTLLQKVHHDASSSSSCAAAAPPSPNILRIHAPIGLARSPAHLLAPTPANTPHLTAAAPHAFTMTVPCVLEEELLSKLQVIADALPPPPAQAEENHLGECNRALVFDDSPGKSDLSNAASVLSSSSLSFQDSSSTDRSPDDDSSSAWSIQVNASSEKGDEDTFTDQDPEEEEEEWLTEDDDDDECFDDLCEGMSKMSVFDDEEEEDKKAGLPAFQGKHTRFIYDSDGEMEREDVAHVPVENCTMVLRGLPVPEGKHLRFHEVEEDEE

SEQ ID NO: 179555 - protein, 77 aa, Oryza sativa
  Clone ID: PAT_MRT4530_77005C.1.pep
ATPKAEPLVYMEKEVWGSFLGGGFWRSPSQQKDRRCFPPGRGPPPPPFFFFPSPRLLVFWLFSPLFLGKKKTNNSIL

SEQ ID NO: 179556 - protein, 256 aa, Oryza sativa
  Clone ID: PAT_MRT4530_77006C.1.pep
TLGFLLCIFFGLALALVSSGILPAFTEDIARSVNVVHVVDTTTVNSGNTEPSSYVTLFSNTPGKLTKELVDLRDEEFSCGRNRAIDFVTFTMKYGCLSYEGTNTGWSKSEVPVLSLKSDSVTNDARQTIISVDTKSSTRWSLAINKQEIDDFTVHVDSENLVPLGNKSEIDGWHTIQLAGGKDSPTKFQLTLFWASNSKDAFPMQVESEDHSFLLKLRTDVNRVTPLVGRVLEKLPRWCAPFGKSTSPYTLAFLTA

SEQ ID NO: 179557 - protein, 250 aa, Oryza sativa
  unsure (1)..(250): unsure at all Xaa locations
  Clone ID: PAT_MRT4530_77007C.1.pep
AKNSPLKNALLSDVCIGTSSAPTYLPAHCFRTHDGASGETREYNLIDGGVAANNPMLTMVAMTMITEEXHGEGEGGGAVPAEAAAGEEEEHGRFLVLSIGTGLTSDEGLYTAEKCSRWGALSWLRHGGMAPIIDIFMAASSDLVDIHVAVKFQLLHSERNYLRVQANSLRGAAAAVDAATRENMGSLVGVGERLLAHGVSRVNVETGRYEEVPGEGSNADALARIAGNLSEERTARIKRRNTVQAGVTGF

SEQ ID NO: 179558 - protein, 93 aa, Oryza sativa
  Clone ID: PAT_MRT4530_77008C.1.pep
ERGNPPQTKNIRAPQKKGAQVRARTHTTGGNPKNKRADKQGGKKTKTQGGGRSQQKGAPHRLVYKPGDLKKRPQIFFTRNKNGWIWGPLARRA

SEQ ID NO: 179559 - protein, 72 aa, Oryza sativa
  unsure (1)..(72): unsure at all Xaa locations
  Clone ID: PAT_MRT4530_77009C.1.pep
QTXNLNKGRISHQASSPQHTHDSQMQSNPPTTPFKHRRSTIPXRVXXISVGHPRGHHHTHNRVIPTSVGHIS

SEQ ID NO: 179560 - protein, 321 aa, Oryza sativa
  Clone ID: PAT_MRT4530_7700C.1.pep
MQGIIKEELKWADVINWAPAANLYGGGVDEVDLGRANPTAATARELATREGKKRKEEEERELCSFRFGRKGMRTSRASRFWMHAAWGAGPERMTPAMTAKGRGRFEGKRGHGGRRGRRRPRVAMAAPRRSATRTGARESKEAAGILGDLGQKFEKENRGAVTSDGGAGASSPGAAGKGEEEVPGAPRHTSMHAPASLAREVGFGGGNRLRWSRELGWQSCSELAAKRRQWRWSEWQGGMGCCAAQAARANVAATEQEGEELCLHCLEGRDLEQRTGGDAGGDHGGLCLPVLDASGVQRQSGSARNWSIQNRGMQNRLLPRN

SEQ ID NO: 179561 - protein, 333 aa, Oryza sativa
  Clone ID: PAT_MRT4530_77010C.1.pep
MGRARTVKAATAAAAAVLVAFGVRMAAPAAAGFVADELPRAQAAAATWLTPPYLYLVINAIILSIAASSRFQPNRPQAASADASLVRPAPVPVPVPVVAVPAPAVTMPMEVPVVPVPEAMAPEPIPVEVTVPEVVKTAPEAEEAEENFTISRSAWTPRRRSTAEAEAEHEALSPFADLTNSREKPLVSTRFGRKPVKASPEGSSRALGVSRPRKEQTLESTWKAITEGRAPPLARHLKKSDTWETRPGRRQSGSGGGEDAPPPATAMRKAETFNEAAGGGGGGKKVRREPSLGQDELNRRVEAFINKFNMEMRLQRQESLKHYNEMISRGSVY

SEQ ID NO: 179562 - protein, 64 aa, Oryza sativa
  Clone ID: PAT_MRT4530_77011C.1.pep
LESGEGIENYRFHGMRLDMTGVIFLPCSGKLRELVQTPISLKLGMRLHGATLHNQHGQIWNGRR

SEQ ID NO: 179563 - protein, 1003 aa, Oryza sativa
  unsure (1)..(1003): unsure at all Xaa locations
  Clone ID: PAT_MRT4530_77012C.1.pep
MSTGGNGGGVGVRRRRWNLYWCYVCRRALRVVVPSATSDVYCPRCFGRFLHEIDLPVPRVSPPAEDQFFQPPFLPYDGPRRWVLYTGGGGGGDYGGADVTARRRRLPSPPPAPGTRRQDGAGDGDPPPPAPAIDPGEYFAGPDLNALIDALTQDDRPGPPPAPESAIESLPTVHISPDHLPADGGSECPVCKEEFELGEAARELPCKHAYHSDCIVPWLRLHNSCPVCRQEVPPPPEPDGESPGIDGGCDDGVGGGGEPAEPPRPAMAGWDPIALLAIALRPDLNGWENSHGRSESEADDDEVAGGGVSPHLLKRTTTLTFWVLHPPIITGVHALTKPALDERCRWNRFGFFLFDEKIGMIARDTVLRFAVRLFVVIVVSSRSSSADDGGGDGGVDFIYQGFQHAANLTMDGSAKVLHGGALQLTNDSNRLVGHAFHAAPVRFLDDGAGGGGGGVVSSFSTAFVLDIVTVGSGGGHGLAFVIYLGVLGPRTNGNASDHVFAVEFDTVMDLEMNDTNGNHVGVDVNSLVSVVSEPVAYYAGDGSTKVPVQLESAQQIQAWIDYDGGSSILNVTVAPATVTERPRRPLISTKLDLLPIFKENMYVGFSSATGKLASSHYILAWSFRTNGVAQSIDLRRLPKVPRQSSPPPKLLIIKFAAVACAGTLTLIAAAMVAVLWLRRRAALADTLEEWELEHPQRIPYKELYKATKGFKESELLGAGGFGQVYRGVLRRRSGEAVAIKRISNGTRQGMREFVAEVASLGRMRHRNLRFAILKGVAHGLLYLHEEWEHVVVHRDVKANNVLLGAGDTGAARLGDFGLARLYEHGATPATTRVAGTLGYMAPELTFTSRATTATDVFSFGALLLEVACGRRPIEPAAAGEADGDVLLVRWVRDRALDGDGGGGDVLRAVDPRLEGCYXDEEEARLVLWLGLMCSQARXEARPSMRQVCQXYLDGEEMLQEDATPAAIFSGADSSDLFGGSFVVSMTSSSAGGTMSASSLQGGR

SEQ ID NO: 179564 - protein, 97 aa, Oryza sativa
  Clone ID: PAT_MRT4530_77013C.1.pep
PAKKRGPFWAFYGPDKKGGIKFKLKLMVIIPLSLFGAFSRGVTIGLSTSKFLSCPFHHFPPKCFCPGVSLGKTKPFSFVKKVAMIFRKTANVVVFAP

SEQ ID NO: 179565 - protein, 95 aa, Oryza sativa
  Clone ID: PAT_MRT4530_77014C.1.pep
MIKTHQIEQNTRRTTTNRGDDGKGRKEENPNPSFERGGERGKGCVLTGEKMAAGGERRAVTIASASRRPRRCTTSNRLYVVLPLRVLRVASRLPS

SEQ ID NO: 179566 - protein, 98 aa, Oryza sativa
  Clone ID: PAT_MRT4530_77015C.1.pep
GVKGENVRAPAGPTVPFPYDVLLAASGDGDPSSPVAIRLHRRRRLLRRRGYRLRLLLLRIVALRLRLHRRCRALRYRVHQLRFVSISVSLSPSVFASL

SEQ ID NO: 179567 - protein, 262 aa, Oryza sativa
  Clone ID: PAT_MRT4530_77016C.1.pep
MAAASRAPLARRSLLLLRYKALPLSSPSSSSSSTHSLLPRPPALWPPPPPPPPHGCERRRAFHDGRPRGPLWRSKKLIGKEALFAIQGLKRFKGDEERLGEFVRRYVARLLKADKLAVLGELERQEEVDLAVKMFRIIQKEDWYKPDVFMYKDLIVALAKCKKMDEAMVIWGNMTDENLFPDAQTYAEVIRGFLRYGSPSDAMNIYEEMKKSPDPPEELPFRVLLKGLLPHPLLRNRVKQDFEELFPERHIYDPPEEIFGLR

SEQ ID NO: 179568 - protein, 89 aa, Oryza sativa
  Clone ID: PAT_MRT4530_77017C.1.pep
YETYIPPSKFNVSSILLCSTYAREGSLYISPHCSTCFSPCHSAYYQLSLRTMIILPASAIIPTMEHRHQRRQYLWVIHEKKTLQRSRDH

SEQ ID NO: 179569 - protein, 105 aa, Oryza sativa
  Clone ID: PAT_MRT4530_77018C.1.pep
EKGKVRKKLLHLSKAQIKIPWYLTRREPCPPLIWTPRGQGCRENQATQAELTAPPGSLSLVEAGDSWEKQEHHACQRRQIIPHPNRPPRGRLTTGRASPPPGTLG

SEQ ID NO: 179570 - protein, 622 aa, Oryza sativa
  unsure (1)..(622): unsure at all Xaa locations
  Clone ID: PAT_MRT4530_77019C.1.pep
MGVGEEEGRGMASLLAARRALRAGVERSRALSHALARAGPRLGEIRARLPPMEAAVRPIRAPRDALYGAGECVDRAVGPAAAVLKEALHFLSDNCGIASQWLADIVEYLGDRSLADPRFVSDLAEALSHLKTPSANLDGGLLAAALDILEAEFPPTLAPSRRRGCPASAVHKLSLILDRLAANGRLGTCTAAYADARGDTVSASLRALGLDYLHDPAEDAQVLTPNVEHWGRHLEFAVRHLLEAERKLCVAVFERRPEAASSCFAEIASRAGILDFLKFGRAICDARKDPIKLLRLLDVFDSLSKLRMDFNRLFGGKACVEIQTRTRELVKRVVDGSVEIFEELLVQVELQRNMPPPADGGVPRIVSFVAKYCNQLLGDPYRSVLTQVLVIHRSWRKETFNDKMLVDAVLNIVKALEANFEAWSKAYEDVTLSYLFMMNTHWHFFKHLKGTKMGEILGDEWLREHEQYKEKFSAVLLKEIWGTHAKLLGWAGVILFATVPATARIIMKQQLXSFLTNFDEMNHKQFAWSVSDRDSKLNTWHLLLQAAVHVFQSFMQDYGPLVDQQDASANKYVKFTAEGLDKMLSTLFLPKPRRAGSFQIRHSNGKITSAMTGLYRSSSTLK

SEQ ID NO: 179571 - protein, 111 aa, Oryza sativa
  unsure (1)..(111): unsure at all Xaa locations
  Clone ID: PAT_MRT4530_7701C.1.pep
AHRGSPAGARPTCPSRPFPPPKAEAKAERASSSPSSSPAAPPCRGSPSREKHEGEREGGARLDPHGEAKAKKKERPRPARWCKGIRNPEGGQSAHGKGRGWXXXXMAXRVG

SEQ ID NO: 179572 - protein, 237 aa, Oryza sativa
  unsure (1)..(237): unsure at all Xaa locations
  Clone ID: PAT_MRT4530_77020C.1.pep
TRPLRHRLQWLADIVEYLGDRSLADPRFVSDLAEALSHLKTPSANLDGGLLAAALDILEAEFRRLLTEHSAPLAMKEPNNSSDPGSITPPRIPASAVHKLSLILDRLAANGRLGTCTAAYADARGDTVSASLRALGLDYLHDPAEDAQVLTPNVEHWGRHLEFAVRHLLEAERKLCVAVFERRPEAASSCFAEIASRAGILDXLKFGRAICDAXKDPIKLLXVLDVXDSLSKLRMDF

SEQ ID NO: 179573 - protein, 77 aa, Oryza sativa
  Clone ID: PAT_MRT4530_77021C.1.pep
KKLWDFIFWGLKKKGGVVLNGPGPPITFGGFPGPGFFGTYTFKRVAYPFKSLGGPPPISWGGIFQLGVPRPPGKGGG

SEQ ID NO: 179574 - protein, 292 aa, Oryza sativa
  unsure (1)..(292): unsure at all Xaa locations
  Clone ID: PAT_MRT4530_77022C.1.pep
LFLKRKRELLRQRLGFAVDRAHGSGSRKRTAEIDXSKTNGRDRPVHGRTTRDDDDDVSGDVTTGGGSGLQTRRRTTARRRERRAPARRGXRGELTGDQRRSGGDLRLDDGGGVPAVDSNGEGADEDGDATATTMATSXRATAMTGAMAEHGWSXGDDGVARLHGARALPTARDESKGGDGGWRAAAKAHGDRRREGKVRVRRKEADPNRTRIHEFPKRFRRCFQKGKGRGDLGKHFPSMDFTREGKGRWGPPVSGRERXRAAARLRTGPAWAEKEREKVLGRLSAQSQKRLF

SEQ ID NO: 179575 - protein, 67 aa, Oryza sativa
  Clone ID: PAT_MRT4530_77023C.1.pep
ERETDNNYLFYFGETTKRGEILVNFLPHKPKTQSRHSTFFLTLNHEAPDHIYSSTKHYHIEPHAAKS

SEQ ID NO: 179576 - protein, 80 aa, Oryza sativa
  Clone ID: PAT_MRT4530_77024C.1.pep
DKQGKKYRAWVDRLVVSQCGSEGWLVRFNLWELEGDVWSCCLTSLALNAKPETPEGFVVTHIHKTWLKGYSSADEQSSKL

SEQ ID NO: 179577 - protein, 436 aa, Oryza sativa
  unsure (1)..(436): unsure at all Xaa locations
  Clone ID: PAT_MRT4530_77025C.1.pep
MDKLNGSARLMIVSDLDHTMVDHHDEENLSLLRFGALWESVYCQDSLLVFSTGRSPTLYMELRKEKPMLTPDITIMSVGTEITYGEEMVPDDGWVEYLNNKWDRNIVVEETANVSELKLQVESEQRPHKVSFYVDKKSAQEVIKSLSEKLEKRGLDVKKIFCGGQDLDVLPQGAGKGQALAYLLKKLSSCGKPPNNTLACVICLATRRGXPGNDAELFSIPGVHGVMVSNAQEELLQWYSENAKDNPKIIHATERCAAGIIQAIGHFKLGPNVSPRDVGFPYVKENPVKPTDAVVKFYVLYEKWRRAEVPKSDSVTQYFKNITHANGVIIHPAGLECSLHASIDALGSCYGDKQGKKYRAWVDRLVVSQCGSEGWLVRFNLWELEHTNAICDVWSCCLTSLALNAKPETPEGFVVTHIHKTWLKGYSSADEQSSKL

SEQ ID NO: 179578 - protein, 89 aa, Oryza sativa
  Clone ID: PAT_MRT4530_77026C.1.pep
MMNFNVLLNKKTKNKKKTKNKTKNKQKKAYSLKPIIPSVNEQPTYNNIPKLPAKKQNTNQQFNRAGTVKKPSITTTMTAGKTSPIGHLK

SEQ ID NO: 179579 - protein, 1493 aa, Oryza sativa
  Clone ID: PAT_MRT4530_77027C.1.pep
MAASGRDDGDDVPLFFLHAAGAAAHLAVAVAVAARMVFGWWCRRGKDGEVRGGGGGGGGFRWRWVAASATWVLGGFGVILAAYEGYLGGGGGGGGWSRGAVVEEADAAARAVAWLLLAAYLQYRFGWRREERFPAPLRLWWALFLLLSVLAVAVHAVTGLDGRPVPAHSWALDAVSVLAGVVLLFAGFLGRREPGDSAIEEPLLNGSGASATAAGENNSNNCAADASMFTGAGFLSVLTFSWMGPLLAVGHRKTLDLDDVPGLDPGDRVAGLLPPFKTNLEALAGDGSGRKVTAFTLSKALVRTVWWHVAVTAFYALVYNVSTYVGPYLIDSLVQYLNGDERYASKGQLLVLAFIVAKVFECLSQRHWFFRLQQAGIRARSALVAVVYQKGLVLSSQSRQSRTSGEMINIISVDADRVGLFSWYMHDLWLVPLQVGMALFILYSTLGLASLAALGATVVVMLANVPPGQMQEKFQQKLMDCKDVRMKATSEILRNMRILKLQGWEMKFLSKIIDLRKTETNWLKKYLYTSTIVTFVFWGAPTFVAVVTFIACMLMGIPLESGKVLSALATFRVLQEPIYNLPDTISMLIQTKVSLDRIASFLCLEELPTDAVLKLPSGSSDVAIEVRNGCFSWDASPEVPTLKDLNFQAQQGMRIAVCGTVGSGKSSLLSCILGEIPKLSGEVKTCGTMAYVSQSAWIQSGKIQDNILFGKQMDNEKYDRVLESCSLKKDLEILPFGDQTVIGERGINLSGGQKQRIQIARALYQDADIYLFDDPFSAVDAHTGSHLFKECLLGELASKTVVYVTHQIEFLPAADLILVMKGGRIAQAGKYDEILGSGEEFMELVGAHKDALTALDAIDVTNGGNEASSSSKTASLARSVSVEKKDKQNGKEDDANAQSGQLVQEEEREKGRVGFWVYWKYLTLAYRGALVPFILLAQILFQVLQIASNYWMAWAAPVSKDVEPPVSMSTLIYVYVALAFGSSLCILVRALILVTAAYKTATLLFNKMHMSIFRAPMSFFDSTPSGRILNRASTDQSEVDTSIAYQMGSVAFSIIQLVGIIAVMSQVAWQVFVVFIPVLAACFWYQRYYIDTARELQRLVGVCKAPIIQHFAESITGSTTIRSFGKENQFVSTNSHLMDAFSRPKFYNAAAMEWLCFRLDMLSSLTFAFSLIFLVNLPTGLIDPGISGLAVTYGLNLNMLQAWVVWSMCNLENKIISVERILQYMSIPAEPPLSVQDDKLTQDWPSEGEIMLNNVHVRYAPHLPFVLKGLTVTFPGGMKTGIVGRTGSGKSTLIQALFRIIDPTVGQILVDSIDICTIGLHDLRSRLSIIPQEPTMFEGTVRTNLDPIGEYTDSQIWEALDRCQLGDEVRRKELRLDSPVIENGENWSVGQRQLVCLGRVILKRSKILVLDEATASVDTATDNLIQKTLRQQFSDATVITIAHRITSVLDSDMVLLLDNGVAVERDTPTRLLEDKSSLFSKLVAEYTMRSTHT

SEQ ID NO: 179580 - protein, 428 aa, Oryza sativa
  Clone ID: PAT_MRT4530_77028C.1.pep
MAATLAQEPRHHPSRPPLAPAAAHAPNSAAAACSTPRRGKTSPHASSRHASSSSSSSSLPSCSAARVAVTPAPHATATAPVTMRMRSLSVSFQGESFVYETPRAAAPRRAPAAAAARPRPTTRRRGEAENERPSPPPASKATDALARSLDCSLHRKESILAAVRLLRSSISPGNAAAAAAPDADAATDTDTDAAPPSIPTQTRFWQETNSRLRRLPESGLPHPISTSRKPFLDGPISPTLLETSPANAPSIISFATAVRRANKGEDKIEEAHRLRLLDNRQLQWRCLNAHADAAAVARSCAAEKALHSAWKDISTLRDNVSFKRSKLQLQKQKLKLFGILKGQISYLEEWSDVENNHSSSMSEAIKALEASTIRLPIVCGAKADAQGVKKVVSSALTKMDTMASSMWSLLSKKLVVMENKTIEHFIRI

SEQ ID NO: 179581 - protein, 205 aa, Oryza sativa
  Clone ID: PAT_MRT4530_77029C.1.pep
MSTSASPSAAPSAEYAEYFLGPIGDSDPTKFISEETNRIPFRLANPNLGHWKNTFKSWPSLEKSSPEKSWPVWYKRVSESKQVLWDELGINQALALTLANSAKDEPLMASATYFWFNTLNTFLFNQGPMTLTLLDVIMITGLDVTSSANPMTMNSKNQFEFKTKTIGGWSGYIAAYMGKVSVTPREHIAFLSMCHSCIHILPPID

SEQ ID NO: 179582 - protein, 80 aa, Oryza sativa
  Clone ID: PAT_MRT4530_7702C.1.pep
LILPLFWASRAPLSSPARAPPDPAGRGLRARPGSDRCRAGQPPQATPPRTASATPPTTVTAPLAVQLQRRKHGQTPSGFA

SEQ ID NO: 179583 - protein, 60 aa, Oryza sativa
  Clone ID: PAT_MRT4530_77030C.1.pep
HDLDFHQTHVPARLFQLNKQSEAPMPKPSWGTSWRTSWAIRTPCRRWWPCPPSLWAKPTA

SEQ ID NO: 179584 - protein, 261 aa, Oryza sativa
  Clone ID: PAT_MRT4530_77031C.1.pep
MDLNSALSASMCTVSMIFTTAGGGGGGPCLVVSSAPLVDIYTSRAGSEQTQGSATRTGGLNSRVNNAQYCSSTPLGRVGMYLPRQRHDGGRHRLQRPYRGVVVSVIPVRTSRQLAAAHRFGRSKRGFSSRTHFGYRHASATNGSERAMPKKRGRIAILGEAESYMKREAASGLLPHIPLVQQEQLQHIFNHPILSETLILRQELVQQQQLGELRRGIPLNRLRRRMVDRDESKEHRGSIFHRRERMRRPEVEDGPDEWARP

SEQ ID NO: 179585 - protein, 72 aa, Oryza sativa
  Clone ID: PAT_MRT4530_77032C.1.pep
MGYGLARLLLVALAALSLLAMGGLDDHHAGLSLAALPRDGMSEPAGPAGEGVGGRVISGFMVKGCDSTSGMS

SEQ ID NO: 179586 - protein, 257 aa, Oryza sativa
  unsure (1)..(257): unsure at all Xaa locations
  Clone ID: PAT_MRT4530_77033C.1.pep
AATGDHWGAGYHGGGGGRGGKSAAGPGVQCDVDVVSWRERRVFASVAVAADVDTVWRVITDYERLAEFIPNLVHSGRIPCPHQGRVWLEQRGLQQALYWHIEARVVLDLKEVPDAVNGRELHFSMVDGDFKKFEGKWSIRSGPRSSSAILLYEVNVIPRFNFPAIFLERIIRSDLPVNLGALACRAENIYLGXKDMELQNLVVQAPGFITSVMQPLRMMPLLLVSSKKHLXSGLGGVLASPPSELNSKWGVYGNVCR

SEQ ID NO: 179587 - protein, 113 aa, Oryza sativa
  unsure (1)..(113): unsure at all Xaa locations
  Clone ID: PAT_MRT4530_77034C.1.pep
GGGRGGPHPGGNKKGPRKKGRLSKGHKGGGGQKREGQGEPRPQPRGGGGPPPPWGRSGXHPRPRMSPTGPGGTKEXPAPLGPQGRRPGGPGPQQAPPCRGNPGGGRAPPPQSP

SEQ ID NO: 179588 - protein, 740 aa, Oryza sativa
  unsure (1)..(740): unsure at all Xaa locations
  Clone ID: PAT_MRT4530_77035C.1.pep
MTSRVLVSSSSSSSSAAAAAFLPRIPNPCANPSHRGAPPCGAALWRHHSGRAVTTAAAAAATGDHWGAEYHGGGGGRGGKSAAGPGVQCDVDVVSWRERRVFASVAVAADVDTVWRVITDYERLAEFIPNLVHRSTFHLSFSCVIANSRMLIEGLIGGNLCVVRQRSGRIPCPHQGRVWLEQRGLQQALYWHIEARVVLDLKEVPDAVNGRELHFSMVDGDFKKFEGKWSIRSGPRSSSAILLYEVNVIPRFNFPAIFLERIIRSDLPVNLGALACRAENIYLGXKDMELQNLVVQAPGFITSVMQPLRMMPLLLVSSKKHLXSGLGGVLASPPSELNSKWGVYGNVCRLDRPCVVDEIHLRRFDGLLEHEGAHRFVFASITVKAPVREVWNILTAYEKLPELVVLSSFSFYSSDILLYKYELTKLSVRFVPNLAISRIIRRDNNKVRILQEGCKGLLYMVLHARVVMDLREKLEREISFEQVEGDFYSFKGKWRLEQLGDQHTLLKYMVETKMHKDTFLSESILEEVIYEDLPSNLCAIRDYIEKAEAESGNSTSSSIVASNADTIAIDYAEGRQSEQASTSCSSSPVKQRPKVPGLQKDIEVLKSELEKFIAKYGQDGFMPKRKHLRLHGRVDIEKAITRMGGFRKIASIMNLSLSYKNRKPRGYWDNLENLQEXGRYDIARALEKWGGVHEVSRLLSLELRRPRRRANSDDENKGGQVSCLQYWITTLACSKLFIDI

SEQ ID NO: 179589 - protein, 643 aa, Oryza sativa
  unsure (1)..(643): unsure at all Xaa locations
  Clone ID: PAT_MRT4530_77036C.1.pep
MATRRRSKLSAVRVEPDSDTTTSGPPRTDTTMSGGACPKKKRGEKGRNLMPKETYYIAALDVDGKPVEPQHVRVKFSTACGALARLHGPLNVDEWKHVSIHIKNLMWEGLQEHRIYPPESEALGRKFALQTIAHRWRQWKSDMNTNYVQKNKTPFEEWGTISAEAQSYKKRDAYKAKMRQEITNQVTQQVTQQFYSLAAQHPQAFPDLVPHGLQSTQILSSVGSVENTTYPVDSITGPTPCSFVVPIGRAGKTKEVASGLAIPGRQFHNSLIPADYVSVQVALVHGDQMSLELDIPTPEGIELLRDAVNQFILWHRRDIILTGQFMSMTPAPSPDTSKEQPKTCEARKLIPVMVSTYNKEKMAECETRMVLQSFKGRGGPLKPVGPDQYSDAQKSVVGLADKMQSWTSNEVPKEYEYGKPFLPFNLMCELPWPMRLMHEWYLRASELGLGMITVHVPEGAFKDGPNANFAFSFKDLHALFKMDKMDINLVDAQRTGTLIGYVNPTMVCETAHTVRISEDSAVLKNKTPQEKKDYIERMRKRKMAEVGNYLATSFLAHSDKRVIMVPYHFGEHYILFLVYPTDQTVVVLDPADYDKDAYMEFLCLLNLAHGRYKKRGGXYKQPSFTNLCDYYVCEMLRVNGRYN

SEQ ID NO: 179590 - protein, 434 aa, Oryza sativa
  Clone ID: PAT_MRT4530_77037C.1.pep
MVQRKQARKKPKDSQLGSNDGLPADHARGGAIVRTALPNYMRATSSSDARGGGREAAAATGAPPRRERGAARGKAMVLADGGGPFVSRATCSSAMRGLGRGLGLRGGAAHACPYSYCSFKCHAADADVVPLRTLVASRRRLIKTQQSMKLKGASPFRKPSNGGGAADGFFVEIYSGAAAAAAPTVSSGASCSDLSTEDNDAAVREGEYAVFDHRSRGDDEDKARDSDGSVDGSCGSSDVISGGSVDLFVTKSRGGKQEIDGGKGIYLDQEAEDFDACKSDISEELDAKYEDGGVDASNGSSIDDISSAFGGMNFKDACPDPTGAASSQRKRWNIAKRTTSEQGEKMRLFNPRAPNFLPVEPDPEAEKVDLRHQMMGDRKNAEEWMVDYALRRAVNKLARAQKRKVEMLVQAFETVQQDDDKKSITLTKSSQPCR

SEQ ID NO: 179591 - protein, 67 aa, Oryza sativa
  Clone ID: PAT_MRT4530_77038C.1.pep
IRAFRQEDRFYRSNLSLLDNHSRPWFHLMAAVEWLSFRMNLLCNFVFGFSLVLLVRLPQGFVNPSKF

SEQ ID NO: 179592 - protein, 858 aa, Oryza sativa
  Clone ID: PAT_MRT4530_77039C.1.pep
MRRKAAGDAALVGGCFLLLLHPLLSHGADMPLGSSLSPANQALWSSPNNTFSLSFTASPTSPSLFVAAITYAGGVPVWTAGNGATVDSGGALRLSSSGDLQLVNGSGAVVWSSNTGGQGVTTAALQESGNLLLRNSSATLWQSFEHPTDTVVMGQNFTSGMNLTSASYQFSLDRNTGNLTLKWTGGGTVTYFNKGYNTTFTANKTLSSPTLAMQTNGIVSLTDGSLTSPVVVAYSSNYGESGDMLRFVRLDTDGNFRAYSAARGSNAPTEQWSAVADQCQVFGYCGNMGVCGYNGTSPVCRCPSENFQLSNPADPRGGCRRKIELQNCPGNSTMLQLDNTQFLTYPPEITTEQFFVGITACRLNCLSGSSCVASTALSDGSGLCFLKVSNFVSGYQSAALPSTSFVKVCFPGIPNPPLGGGGSPSGRASGVRGWVVAVVVLGAVSGLVLCEWALWWVFCRHSPKYGAASAQYALLEYASGAPVQFSYRELQRSTKGFKEKLGAGGFGAVYRGVLANRTVVAVKQLEGIEQGEKQFRMEVATISSTHHLNLVRLIGFCSEGRHRLLVYEFMKNGSLDAFLFADAPGGRMPWPTRFAVAVGTARGITYLHEECRDCIVHCDIKPENILLDEHHNAKVSDFGLAKLVNPKDHRHRTLTSVRGTRGYLAPEWLANLPITAKSDVYSYGMVLLELVSGHRNFDVSEETGRKKYSVWAYEEYEKGNIAAIVDKKLPGEDIDMVQVERALQVSFWCIQEQPAQRPSMGKVVQMLEGIMDLERPPPPKSSDSFLSLTSATTATGVSGSGSTSMVSTFTSSAAPPAPTPSPNVDEVQQEMAVGRSASARIRDRASRSLLGQEPYMTM

SEQ ID NO: 179593 - protein, 87 aa, Oryza sativa
  Clone ID: PAT_MRT4530_7703C.1.pep
PLNSERTVLTPAKELELLPARITAKGRSQVSKKRERAPFANRLFPGVGRIIKASWNTGFPMEKVAIRRMAIMLGRSVNWHPRVYLLR

SEQ ID NO: 179594 - protein, 36 aa, Oryza sativa
  unsure (1)..(36): unsure at all Xaa locations
  Clone ID: PAT_MRT4530_77040C.1.pep
MTDAPYVPREKLITQQXIXETITKHTYLKGRDYVIT

SEQ ID NO: 179595 - protein, 520 aa, Oryza sativa
  Clone ID: PAT_MRT4530_77041C.1.pep
MSSMSDSGTGGRGGAELMVEQFHLKVLHAVLAVRGPRPLQPAASASFRRRDRWFHLPLHDPQPPPAAEGVEAPEAGEPLVVDILLAHAAAGGGGGGGAGGEVVERWTVVCEPWPDAAAGEGIPVNRAYKRCMTMLRSVYATLRFLPAYRVFRLLCANQSYNYEMVHRVGSFAVPLSRDEEAAMRSYQFVPVETQHGRLVVSVQYLPSLAAFNLEISSLSPSMLIADYVGSPAAEPMRAFPASLTGATGSAFPQALSNQPQRPHSWATPALWPQAPRQQARFSPPHLLNASPTPSPPNFPSGYLQSRPKGGSAPMSIPQVGDRRSPIHRPITLPPTSPRRVGETGTSSAQQSPSERCPSFGRADGFRIMDPYASLSPGRKGKDTKDESGRFSALSSCDSPRQDDIDDADYPFAVDDVDTPSSQPGSSDGKEARDQASSSSHKSQDAAVGSLVHLLKTARPLRNSNCPSQASAVESSEAASTSSVVSRRKSDALEELQSFKEIKERLMSRSRAKQQEPPEKP

SEQ ID NO: 179596 - protein, 131 aa, Oryza sativa
  unsure (1)..(131): unsure at all Xaa locations
  Clone ID: PAT_MRT4530_77042C.1.pep
HRTSSASTTTSRSRPPPPPPCSPSALRGSPPRPPXAATSTVPPPPPPCPRRSPPPTSTPPASPPTTPATWRTSRWNTAPAPSATPHRRLATALPPXLPPPPPASSPPAGCAAASTHVEVHRWRRRGESDGG

SEQ ID NO: 179597 - protein, 375 aa, Oryza sativa
  Clone ID: PAT_MRT4530_77043C.1.pep
LQEFGTRTPSLPSFFSLVCISCKKPKRMMDHHHTMQIQFHDLKHCNPGSDARITRSSGVSQVAFVLAAIALISLVSPSSVEYTVFSSTLPAPLRALGSFVMSKKALFVLSNAIFLFLAADYYRCFFSLSPSTSDFTACGHTGVGDKQEQHHHQVGVEPSSATESCVPDHSEAPYRDNDDASEDCSHGERMDGEGSRRNIVRTPDDEMPSGEQKAHGDIAMPSQPEFFRLDEDDVILESAVVKEPSCGTTGQELDKLGIDELNKKFEEFIKSRRTKWEKEEASLRQRQVGRRPAGRGRRGGAAADGGGGGSMGGGEGGAWGGPTARLPRRRCGAPSWLRERLSTMRNGTARHRAGGERGGGRRRATLVPAGWRDGG

SEQ ID NO: 179598 - protein, 94 aa, Oryza sativa
  Clone ID: PAT_MRT4530_77044C.1.pep
MTHKTINGVWRISSNRSDEKGNGALDLALRAPPPVFSAIAEEPNTGQALHGCRRCGVPRGGGQPNNQTVGVPSAPTKLLESESPKAFVIAERPQ

SEQ ID NO: 179599 - protein, 65 aa, Oryza sativa
  Clone ID: PAT_MRT4530_77045C.1.pep
NRGNNQSFSVQKFWGVNPFFIFLSQLKLQKSFPVCSNRLSGSFFFSGCWVTASEKRFLSKKRNQM

SEQ ID NO: 179600 - protein, 145 aa, Oryza sativa
  Clone ID: PAT_MRT4530_77046C.1.pep
MEALDDCKWRQIPAFGDWNIWDDMPVTQYFESGTFFFTAQAEKDEDLFKVPQFPANPYNYKKCVVRVKGEKENANANANAVRVRKGGRKQQYLNEQQKWKPKTAVDEDLYKISPKLICRVKKAKEVAEEFARRVPWRELHRLKNN

SEQ ID NO: 179601 - protein, 191 aa, Oryza sativa
  Clone ID: PAT_MRT4530_77047C.1.pep
MAMTSGVTLTQGVEDIIRWKWTPSGSYTAKSAYQMQILGGIPSISTNVIWKCWAPSKCKFFAWLLLQNRIWTVDRLQQREWPNNYFCQLCFRNLETAQHLFYECSITSTLWDAIATRLGIPQLRPQNWPQTAILEDWWVQTVHAMAKEKRKGVKSILILLSWDIWKERNSMVFRNLETLPHRIIDKVTDEI

SEQ ID NO: 179602 - protein, 124 aa, Oryza sativa
  unsure (1)..(124): unsure at all Xaa locations
  Clone ID: PAT_MRT4530_77048C.1.pep
LHPHERAYGTPPIKLRFRIVVFKINYSPKVELCFAKTRSQYTTITSVCGENLVKRVTFASSVPSHVPXPSSNMDFVVAFASSVPSNGVSVXLSNLDVLXYSVLCLYWISNLTENEISLLLMTRR

SEQ ID NO: 179603 - protein, 72 aa, Oryza sativa
  Clone ID: PAT_MRT4530_77049C.1.pep
MSSRTASDYAWSAWTRERTCMVMVALRAMVTLAKGLVDSRLDERTAIEAEARERRVARMEASGQSFERSDSA

SEQ ID NO: 179604 - protein, 540 aa, Oryza sativa
  Clone ID: PAT_MRT4530_7704C.1.pep
MQARRRHARQCRLVVAGLIIVTTLLFFTGDAPRVFIDAPTQNQLPRRLPLSLAAVREAATWPADAVLLPDWEVLLLLHPNATAIAHNATCAFQGAASSPARALGRLPSSGRHAYTCAMPEPARRHQPFHAPRIVAMDAVHASPHDDDELVMMVKWSGRLVYDSVVVDGGDVLVFAKGVNPRQGVNRPASDVRCVYYRGRGGSADDVVASLPAATSAQQVFRCPPPPPAALLRVTLALAGEEEPIPSVATYSLPPASAAATHKRRHKICACTMVRDVGKFVREWVAYHAAVGVGRFILYDNGSEDDLDEQVRRLTAEGMDVTTLAWPWPKTQEAGFSHSAAVHRDACEWMAFIDVDEFIFSPNWATAASPSSSMLRSIVAVKPDVGQVSLGCVDFGPSGRTTHPPEGVTQGYTCRRRAVERHKSLLRLEAAERSLVNSVHHFELREGKRGEWNRRARVNHYKFQAWDEFRLKFRRRVSAYVADWTHRVNLQSKDRTPGLGFDPVQPAGWAAKFCEVNDTLLRDVTRRWFAAAGESQLQAAR

SEQ ID NO: 179605 - protein, 59 aa, Oryza sativa
  Clone ID: PAT_MRT4530_77050C.1.pep
LTARLWHQREKGCSGTFVDPLQGLKSTDELLYRQRCNNSCLDYVSNGRWIKHMQVQSTE

SEQ ID NO: 179606 - protein, 163 aa, Oryza sativa
  unsure (1)..(163): unsure at all Xaa locations
  Clone ID: PAT_MRT4530_77051C.1.pep
RPELSGICQDVLNVLDKHLIPAAQSNEAKVFYYKMKGDYYRYXAEFKAGDLRKDAADKSLGAYQSASDIATKELASTHPIRLGLALNFSVFYYEIMNSPDKACQLAKQAFDDAIAELDNLTEDSYKDSTVIMQLLRDNLTLWTSDGQGDNDKDGGDDKDDKDE

SEQ ID NO: 179607 - protein, 945 aa, Oryza sativa
  Clone ID: PAT_MRT4530_77052C.1.pep
MASAPPAAPAPAPSLVDTLFQRSLDDLVKSLRADPSAAGESAAVARALSEIHREIRAPDTATKAVALQKLTYLSSLHFAPVASHPLAFPAIELIASPQLPHRRLAYLAASLSLHPASLSLLPLATHQLHKDLSPSTSSAANHHVTALALQLLASPAAAAAPDLPVHLAHDLVPHLSRGSPRAIAAAARVIAASPSAAVPVLFKPLAACLASPDPRASAAAAAAFCELSAPPADAAPFLPLAPDLYNLLTTSRSNWALIKVLKVFARLAPLESRLAARIVDPVCQLLARSAAMSLTFECIRTVLTALPAHDAAVRLAIGKAKEFLAAEDDPNLRYLGLLALGMLGPAYASTLHECRGVIAQSLGDADSNICREALHLMMGLIDDSNVTDIAGMLVSHASKSDPEFANDILGAVLSACGRNVYELVSDFDWYVSLLTDMGRNLHCAQGDEIGRQLVDVGLRVQDARPELVHSSRTLLIDPALLGNHLLCPVLSAAAWVSGEYVNFTKDPVELVEALLQPRISLLPMSVRAVYIQAVLKVITFCCNLYVERLSDSSKEVSVALNGLSMDQTVSGGSDAPIGSSNGQITVPRMMEKDPFSLKSVVHMINLIETTVGPLVECNEVEVLERARNLIGFVYSLREIQELKESKFDDDKHSRVKELVKNMQTVLSHEIGPVSLNAQEKVSLPDDLVLNENLAELVDIISEDDTTLSSSIVFYPRSCGSVETRDEPALSLGSSSLLSEHRKRHGLYYLPTGKAEDGPVDYPHANDPLLPASSESALDDKLKTIQPVTGGKKPKAVKSRPKVVKLDGEDFLSSMVASASVPKEDSLSGAVRGVLLGRDLKPSSSQKASDKAYEGIINKMDSGESSSQWKNNVDADFVGHPTSSSRPSIQQSHDKESTNPLESDGKEARKHRRSRSGHRQGKHKHRERHCTQPDVPQAPIIQDFLL

SEQ ID NO: 179608 - protein, 43 aa, Oryza sativa
  Clone ID: PAT_MRT4530_77053C.1.pep
NVNLVFSYTHSNVSMVMIHLYLIERVGRPLYSVPAPARVPAFP

SEQ ID NO: 179609 - protein, 365 aa, Oryza sativa
  Clone ID: PAT_MRT4530_77054C.1.pep
MWQRYRFLCCGCGGNMAASAAGDRGCDDDADCGGGSGGGGFGEEEEGGKGGVAGAARRLSWAQVEAMTGGFTSAVVGEGGFSTVYLARVAGALAAVKVHRSSERLHRVFRQELDALLRVRHPHIVRLLAFCEQQEEGVLVLEFAANGNLHERLHGGGKAAGTMPWARRASVALQVARALEYLHDRCEPAVVHGDVKASNVLLDEAMSAKLCDFGSARMGFSAAVRPRSSAHTMLGSPGYVDPHYIRSGMVTKKSDVYSFGVLLLELLTGMEAFCAAEGRLLTAVLAPRLRPASCAACDARMLVDERLGSAYDAGEASAVASLAASCVGENPSLRPSMADVVRALEQGAHGSISAVARRSDGHGKL

SEQ ID NO: 179610 - protein, 131 aa, Oryza sativa
  Clone ID: PAT_MRT4530_77055C.1.pep
MLHRHQPSPMHGRCTGAPRRPASTCCHATPASVVADRVSLRCASLRCRRPCLLAPRRRPPPPTAPQHTVPTNAATGFAPSRLPTVPLAPTSRSEAATSLPPAAVVNALNLLLTLFARILPPAPLPHLLTVP

SEQ ID NO: 179611 - protein, 203 aa, Oryza sativa
  Clone ID: PAT_MRT4530_77056C.1.pep
DAWDALTSPNSTSSPLAPPPAPAPLLPPPAPARRCRLSPPGPGRRVDELPGRRAVSPSSPSVGARCRGAWWPRGRAAAAVSGPSGGAGGGLGNERRSLASTLICVTAICVGDFSKSPRSRAASGDFVAAILVGVFLDLLPRFWWAILGKTLQWAARGHERAEARGNALHNVEKLSIPRLAWACGREESCFPPWERTSLLGRGT

SEQ ID NO: 179612 - protein, 457 aa, Oryza sativa
  Clone ID: PAT_MRT4530_77057C.1.pep
NPPPQTRHQAPPPVAAAAAAAAAGPQQVFGMHNREQRREPSHQHPRGFGRSLEKEQRVVQPSAGGHEALGVAPPRELHTMQTTGGRDMAAGTMYREHQQRQNFRSDSRGKNVSSQSVRFQRRIRPCRYDIDQFTPSFMSIFESLVPSDEEISKQKQLLATLSRLINKEWPNSKLYLYGSCANSFGFSNSDIDLCLSIDEKEMSKVDIILKLAHILHAGNLRNIQALTRARVPIVKLMDPNTGLSCDICVNNLLAVVNTKLLRDYSRIDKRLRPLAFIVKHWAKSRCVNETYQGTLSSYAYVIMCIHYLQSQRILPCLQEMEPTYYVTVDNNICAYFDQVDKLNGFGAQCKDTLSRLLWGFFRYWAYAHNYTKDVISIRTGRTISKNMKDWTRRIGNDRHLICIEDPFETSHDLGRVVDNRSIWALREEFERAAEILHLDPNPSITLFEPYVPSEAET

SEQ ID NO: 179613 - protein, 467 aa, Oryza sativa
  unsure (1)..(467): unsure at all Xaa locations
  Clone ID: PAT_MRT4530_77058C.1.pep
MADTAPSCDTYLLFNGETLLPNGVRAFIYTVVLAYCFIGLSAISGRFFKSMESIMRHSREVVTIDPHTNATIVKHEKVWNYTIADVALLAFGTSFPQISLATIDAIRNLGQLTAGGLGPGTLVGSAAFDLFPIHAVCVVMPRAGSKKKISDLGVWARGDRPEDWVPTEDASVDYDDNYDGIGDILPGQNEDIVDIFSARSYSNEGYHHVSEKDVEESPTGLTLKNKWEDTHWFSIWWQQFVDAATLESSVSRKMDSTCLSVIGISWNLIIAPWKMLFAFIPPYEIAHGWIAFICSLIFISGIAYGVTKITDQISCVTGVSPYVIAFTALAAGTSWPDLVASKIAAERQITADSAIANITCRYISAHLLSNXVNIYVGIGVPWLVDTMYNYFVYKKPLYIDNAAGLSFSLLVFFATSFGCITVLVLRRVILGAELGGPRMWAWATSVYFMILWVVFVVLSSLRISGVI

SEQ ID NO: 179614 - protein, 997 aa, Oryza sativa
  Clone ID: PAT_MRT4530_77059C.1.pep
MGSSWWWHGRAAAAVACWVWLAAAAAVGVEAIGANWGTQASHPLAPDTVVQMLKDNGFDKVKLFDAGEDTMSALRKSGLEVMVGIPNDMLAAMASSMAAANKWVDQNVSNYLNDGVKIRYVAVGNEPFLETYNGSFLQTTFPAIRNIQSALVKAGLGSQVRVTCPLNADVYQSSTSKPSDGDFRTDIHDLMLTIVKFLSDTGGAFTVNIYPFISLYSDSNFPVDYAFFDGAASPIVDGSATYTNMFDANYDTLIWALKKNGFGNLPVIVGEIGWPTDGDMNANIQMAQHFNQGFLTHIATGRGTPMRPGPVDAYLFSLIDEDEKSIQPGNFERHWGIFTYDGLPKYQLNLGQSHGLLKAKNVKYLERKWCVLKPSIGLTDPRLSDSISYACSLADCTSLGYKTSCGGLDTRSNISYAFNSYYQKNDQDDVACGFSNLATITGQDPSTGTCRFGIMIEVDSAFSWKLQHVRSSNLLMLLLDEKSSEKARRSLRPLRTASPIPDNGQAVGASVSGMRSARNLTLRRGLTNPAPIPSQEPLGNQIYVAFFNCKLQATGMSYSFPEKWPYWAGRGSIPTVSRAVGAAVTVNCARRQATHLASLFDSSCSFEAQVLIFHQRLPGKGPALDWLMLLASKVRDRESLKRRGGIHQESAVLLFSGREAKSRLEQQQLGSVTGMGSFGMDWNQKSSVLWDWENMPPIGNSANENPKNVMLAESKLAGVGVDIGHESGHSSGGTFSSSSEIGYGSSKSSISASIDSPSKVGNTIELNFASAEEHDKNMDKGKSKVDDTGTSRSPVVAANRVEPLIGLKLGKRTYFEDVCGGQNVKSSPSGVSVATPSPGLAKKVKVAQQNTQNPHCQVEGCNASGNVLPHGAHHSFDGLMAFKETNAKVLNQGMEASAVASGSARGPDFEHALSLLSIDSVGAANLQPGSQIHPGVTAIAGTSNPVMMPSPAIWQGGLSLDQQAQFQAFDRLGNDDDEDHLQLPKPSYDNSHYDQMN

SEQ ID NO: 179615 - protein, 413 aa, Oryza sativa
  unsure (1)..(413): unsure at all Xaa locations
  Clone ID: PAT_MRT4530_7705C.1.pep
MGAGEVVQGLKPVAAMVVVQVVFAGVNIFYKLAVVCDGMDMRVLVAYRYLFASAVLAPLAYFVERKNRTKMTWRVLMLSFVCGLSGGSLAQNLYISGMKLTSATFATAMTNLIPAVTFVLAVLCRYERLAIRTVAGQAKVAGTLLGVGGAMLLTLYKGAELNPWHTHLDLVAALEARHPAAAAATGNNDRVIMGSMLVVGSCVFYAVWLILQAKLSREYPFHYTSTALMCVMSGAQSAAFALLVDREPARWRLGLDIRLLSVVYSGVLASGVMLVVLSWCVKRRGPLFASVFNPLMLVVVAVLGSLLLDEKXMHVGTLLGAALIVVGLYAVLWGKGRETALEAAKVGDDNDNHHIHVVVVVPPEQAQPQPHQQAEADADATTTACEQPSDSDRANIASSLRHSHRYFHRSCGF

SEQ ID NO: 179616 - protein, 110 aa, Oryza sativa
  Clone ID: PAT_MRT4530_77060C.1.pep
APCPPLTGSGCRRRRCRRRGAAPSSPGRGSCRPDSWTARASRAGRGSSPRRRPAPASPQACFHWRRTSSPSSWKIAASPPPQQRQGTAPHGSPHRHPPPPAAAGRRRRNA

SEQ ID NO: 179617 - protein, 331 aa, Oryza sativa
  Clone ID: PAT_MRT4530_77061C.1.pep
MDRDVTEPAAPLQADSSSSSSTSVPGLTSSKGGAAPTGGAHESAAPKGGRWRLAGGPHQAVAQRGGEGGAGRARLDLKADRPTKARQRRGTATDGGDRRVPVGFRRREAVAEMAHTAAELAAAAAWRGGGPSGDGTRPEMGGGGGASGERPATGRRHGRARRKGEKGEGDAGKLYRGSKGADMAGKPPNLAGDVGEKREKVGGDSNRIPPICGRACGPGDAGERAATWARGAGAEWRRDVEKAAARAVSAAGWRRSRDARRQLLATARRSQSTTAKVTSSRCPPAACHYPESCRLPLPTEVAPSRRPPTPGHCLVGGGAEPAACRALHAAH

SEQ ID NO: 179618 - protein, 649 aa, Oryza sativa
  Clone ID: PAT_MRT4530_77062C.1.pep
MVHPRKSMSTPGRDTMSALRKSGLEVMVGIPNDMLAAMASSMADANKWVDQNVSNYLNDGVKIRYVAVGNEPFLETYNGSFLQTTFPAIRNIQSALVKAGLGSQVRVTCPLNADVYQSSTSKPSDGDFRTDIHDLMLTIVKFLSDTGGAFTVNIYPFISLYSDSNFPVDYAFFDGAASPIVDGARQQASFLFGQAPYGLMGCCASSWDNPVPGGFKFTATKAPWSRPTIAAGVDGTHVSNQQASGNVLPHGAHHSFDGLMAFKETNAKVLNQGMEASAVASGSARGPDFEHALSLLSIDSVGAANLQPGSQIHPGVTAIAGTSNPVMMPSPAIWQGGSATYTNMFDANYDTLIWALKKNGFGNLPVIVGEIGWPTDGDMNANIQMAQHFNQGFLTHIATGRGTPMRPGPVDAYLFSLIDEDEKSIQPGNFERHWGIFTYDGLPKYQLNLGQSHGLLKAKNVKYLERKWCVLKPSIGLTDPRLSDSISYACSLADCTSLGYKTSCGGLDTRSNISYAFNSYYQKNDQDDVACGFSNLATITGQDPSTGTCRFGIMIEVDSAFSWKLQHVRSSNLLMLLLDEKSSEKARRSLRPLRTASPIPDNGQAVGASVSGMRSARNLTLRRGLTNPAPIPSQEPLGNQIYVAFFNCK

SEQ ID NO: 179619 - protein, 296 aa, Oryza sativa
  Clone ID: PAT_MRT4530_77063C.1.pep
MAIAALFTSSHQQGGVIDPGVGQKDTHQHCSIAGRTQEKKNRHRVSACGSAFDPCTRHCRFARTLAYCQSAMPVRRFRDASQMPPVYKPINKQQVRIELSSVVSRYTDELGVNGAGSSKGRQANNGGASELDEMGRRPISLPVLGTPFLGRPAPPFPSPKSSLPPFLFRAPTAPPPPPISGRVPSPLGPPPRQAAAAASSAAVWAISATSSCRRNPTGTPSPSRAGVAAARPPLLSSGRRRRLRLPLRPPCRRASHAAAPAMRHRLSAVAAASRTAGHRRRWPCLAAASPWSAGRP

SEQ ID NO: 179620 - protein, 469 aa, Oryza sativa
  Clone ID: PAT_MRT4530_77064C.1.pep
MGSFGMDWNQKSSVLWDWENMPPIGNSANENPKNVMLAESKLAGVGVDIGHESGHSSGGTFSSSSEIGYGSSKSSISASIDSPSKVGNTIELNFASAEEHDKNMDKGKSKVDDTGTSRSPVVAANRVEPLIGLKLGKRTYFEDVCGGQNVKSSPSGVSVATPSPGLAKKVKVAQQNTQNPHCQVEGCNVDLSSAKPYHRKHRVCEPHSKTLKVIVAGLERRFCQQCSRFHGLAEFDQKKRSCRRRLHDHNARRRKPQPEAISLSSSRLSTLLYGDARQQASFLFGQAPYGQMGSCASSWDNPVPGGFKFTATKAPWSRPTIAAGVDGTHVSNQQASGNVLPHGAHHSFDGLMAFKETNAKVLNQGMEASAVASGSARGPDFEHALSLLSIDSVGAANLQPGSQIHPGVTAIAGTSNPVMMPSPAIWQGGLSLDQQAQFQAFDRLGNDDDEDHLQLPKPSYDNSHYDQMN

SEQ ID NO: 179621 - protein, 206 aa, Oryza sativa
  Clone ID: PAT_MRT4530_77065C.1.pep
MAGRRRRGMDSSPAREGDRVPVGFRRREAVAAWRGGGPSGDGTRPETGGGGGASGERRATGRRHGRARRKGEKEEGDAGKLYRGSKGADMAGKPPDLAGDVGEKREKVGGIQIDSRPFAGARAGREMRGRGRGRGREVRARSGGATWRRRRRGRFRRRLPSWGGRLEEGDDLTGCDTSRPAHDHYSGGSDGDELRRREATPDEEVI

SEQ ID NO: 179622 - protein, 216 aa, Oryza sativa
  Clone ID: PAT_MRT4530_77066C.1.pep
MEIISPSSSSNNNSPVLATFLVVLVVLLASSRPASSQNQQSFTINPGGAAAARPGGGKGGGGGGGPGSFSDFLTQNVQHYVLSEQKYAGKVKALDAELSAAEAGAARYVVSGDGKGKFRTITEAIKAVPEYNKKRVILDIRPGTYKEKLLIPFTKPFITFVGNPRSPPTIMWDDRAATHGKDGQPMGTWLSPTVAFKADSSMPPAIISRTHAPWRA

SEQ ID NO: 179623 - protein, 445 aa, Oryza sativa
  Clone ID: PAT_MRT4530_77067C.1.pep
MAAATRALPTPPPHAQDRYTVETHTTTTARRAVVESSRRPGVMAERACACTNTCGGSGRRPARRAGGGKRRPAPRQVVEALAAVAPRGGPGGGGCPSRGQAAEAWRAAPRRLAAESPVVFLAAGEFTVRFASSTTYPAILFPTTPAYTYAARRHPAHRQSGTEGKEEGDAHRGTSTRGSGRDARTEGRERRRSSGEDGGGRDEAVSRLRRRPAKEEGRPRDGETCGRDRRDGGSAEVLPDAAERTAATARFEVAGDGDKRRPDWVEEMVFRWWIGETEWWPGLATLRRSRWWWRRSAEAARAEEPVADVAQVLAEPEEMAAQVGVGRRNAAGVGDGGGEMAMQRNGRIERRRRRCTRTAREGGRLEVEEDPDRWASPVGGSGERRDVKWTLRGQRAVHGRRLARLHRRRGSGQEWAGVGSAQLRWAAGGGMTPDSGRQRVGIGST

SEQ ID NO: 179624 - protein, 204 aa, Oryza sativa
  Clone ID: PAT_MRT4530_77068C.1.pep
MCWKHMHLWVARTVRHAADGEHVTWHLPASAAEVAAAESSSALLCRPRAVGPTRRWLKGEAREAPAGLGSASRPTGRPRRGGGEARPPTAVTGGVGSGGDGRKAAAHGRSSGVAGARGDRDDQRAGRRRRGMDSSPAREGDGVPVGFRRREAVAEMAHTAAELAAAAAWRGGGPSGDGMRPEMGGGGGARRARRYGGRGRGRGR

SEQ ID NO: 179625 - protein, 43 aa, Oryza sativa
  Clone ID: PAT_MRT4530_77069C.1.pep
MAPWARCTPRKGRGMRQILASVVRVGGQFSCGCVVVLVASDLA

SEQ ID NO: 179626 - protein, 206 aa, Oryza sativa
  unsure (1)..(206): unsure at all Xaa locations
  Clone ID: PAT_MRT4530_7706C.1.pep
MRKCHTSGYVRPNISFRHKIHFSHTNKKVLFANLNTYHLATWANNAKTWNPIRPGSSHENMWLHVTLRSIAYEIKSLIDQDNMPQLNNTQLDSRLTQRPYQVTITHIHYYLTRCGTHMSYTTLSFLSQSISLLPATAEAASAAEKAAAATRRGGGGGSERGEXARRRGERWGKAVEEATAAGYGGGGECSGRGGERRQGAAEEASA

SEQ ID NO: 179627 - protein, 478 aa, Oryza sativa
  unsure (1)..(478): unsure at all Xaa locations
  Clone ID: PAT_MRT4530_77070C.1.pep
SPSPCSASPSPPPSSPLRTCTDSGGRRRRPWRAAAAGGAAPGGGHGGRPKVSXRGSGRALSSAGRPANLDCSDETNLSETAPTEKNFNSAGQPNTSADPTPSRPPSLPVPRKGSSYTSDQAVTHSRLRPGLTSSKGGGAPARGPHRSAAQKGRRWRLAGGPHQAVAQRGGEGGVGRARLGLKADRPTKARRRRGTATDGGDRRCGXGGDGRKAAAHGRSSGVAGARGKVRKGGXGGLTDDTVAGAEDEGGDDDPTRGGADERRRGMNSSPAREGDGVPVGFRXREAAAAWRGGGPSGDGTRPEMGGGGGARRARRDGGRGRGRGRXMGEMRERARVRVFMGEGGAETAGDGPYLAGDVERWRRERGCWGISNPPPLAGARVREMRGXGRRRGREVRARSGGVTWSXRRRRRGRLELRLQRPEVGDDXTGGPHLSAPEREREGGRTSWRGKEERAGPGSGAERGERDGPTAHLEKKEGK

SEQ ID NO: 179628 - protein, 349 aa, Oryza sativa
  Clone ID: PAT_MRT4530_77071C.1.pep
MRFMERWRCVSVLALVLLLSNASHGRDISVQHSQQTLNYSHTLAMTLVEYASAVYMTDLTALYTWTCSRCNDLTQGFEMKSLIVDVENCLQAFVGVDYNLNSIIVAIRGTQENSMQNWIKDLIWKQLDLSYPNMPNAKVHSGFFSSYNNTILRLAITSAVHKARQSYGDINVIVTGHSMGGAMASFCALDLAINLGSNSVQLMTFGQPRVGNAAFASYFAKYVPNTIRVTHGHDIVPHLPPYFSFLPHLTYHHFPREVWVNDSEGDITEQICDDSGEDPNCCRCISTWSLSVQDHFTYLGVDMEADDWSTCRIITAENVRQLQKDLASNIIVSKHSVDVTIVEPSSQTY

SEQ ID NO: 179629 - protein, 504 aa, Oryza sativa
  Clone ID: PAT_MRT4530_77072C.1.pep
MALRRALLRSAEISPDRKAALEYLHYLSRAQPTRSLTGAGLYSAGKSFSTQAATTSSTPQPPPPPPPPEKTHFGDLKDEDRIFTNLYGQHDPFLKGAMKRGDWHRTKDLVLKGADWIVNEMKKSGLRGRGGAGFPSGLKWSFMPKVSDGRPSYLVVNADESEPGTCKDREIMRHDPHKLLEGCLIAGVGMRASAAYIYIRGEYVNERLNLLKAREEAYAAGLLGKNACGSGYDFDVHIHFGAGAYICGEETALLESLEGKQGKPRLKPPFPANAGLYGCPTTVTNVETVAVSPTILRRGPEWFASFGRKNNSGTKLFCVSGHVNKPCTVEEEMSIPLKELIEKHCGGVRGGWDNLLAIIPGGSSVPLLPKHICDDVLMDYDALKAVQSGLGTAAVIVMDKSTDVVDAIARLSYFYKHESCGQCTPCREGTGWLWMIMERLKVGNAKLEEIDMLQEVTKQIEGHTICALGDAAAWPVQGLIRHFRPELERRIRERAERELLAASA

SEQ ID NO: 179630 - protein, 38 aa, Oryza sativa
  Clone ID: PAT_MRT4530_77073C.1.pep
PLAVHINCVLNALPKLRNMHSATFNVSMPQYLTHNFPS

SEQ ID NO: 179631 - protein, 74 aa, Oryza sativa
  Clone ID: PAT_MRT4530_77074C.1.pep
GISHKTPPDHYRIYYACWGSAPYKESYMISVHAIHLESLKRCITDCCCKLSYLASIDDLSDRRSQIMQPILVGY

SEQ ID NO: 179632 - protein, 123 aa, Oryza sativa
  Clone ID: PAT_MRT4530_77075C.1.pep
MMLETAKKFKEIFSETTTNSQEITAEANKQADLLVNQIKHLTTDLPVPSIPAIPHIPSAVTPKPDAAKLEHYGIIEDLREFVKGMTTLPTPSSRVNADNLLHATASRHRLHSVASRAVDTQLS

SEQ ID NO: 179633 - protein, 159 aa, Oryza sativa
  unsure (1)..(159): unsure at all Xaa locations
  Clone ID: PAT_MRT4530_77076C.1.pep
CRPLAPPPSPASLDVAASPASADAATVVRLRXRRRRCHPPTSAGAATVKCISRRRRPHLRPSAPPLSSACVRRRRHPHLRPQASSSPCGRLRRRRAAAIACILCRGSRPPRPQPSSSPRPPQLWPSSTPAVAVAIACILNRGSRPSRPQQSSSLRSPQL

SEQ ID NO: 179634 - protein, 505 aa, Oryza sativa
  unsure (1)..(505): unsure at all Xaa locations
  Clone ID: PAT_MRT4530_77077C.1.pep
GSFRRCWREVRQVTTFAKVWSTGQDGGGATFFRPEQVPAGFSALGHYAQRNDRXLFGHVLVARDVSGGGLLAPPLDYAPVWSSQDDAAHFWLPTPPDGYRAIGVAVTASPDKPPRDEVACVRADFTDACEAEATVWDKDGFSAVALRPAVRGVDARGVHAGTFVLARSDATAGSASALACLKNNGAAYTSCMPDLAQVNALLAAYAPQLFLHPDEPYLPSSVTWFFQNGALLYQKGSQTPTPVAADGSNLPQGGGNDGGYWLDLPVDNFQRERVKKGDLAGAKVYVQAKPMLGATATDLAVWFFYPFNGPARAKVGPLTIPLGKIGEHVGDWEHVTLRVSNFSGELLRMYFSQHSAGAWVDAPQLEYLDGGNRPSAYSSLHGHALYPRAGLVLQGDARLGVGIRNDCDRGSRLDTGGAGRCEVVSAEYLGGGGGGVAEPTWLLFDREWGPREEYDIGREINRVAKLLPRSTRERLRKLVESVFVGEGPTGPRMKGSWRNDEREAK

SEQ ID NO: 179635 - protein, 145 aa, Oryza sativa
  Clone ID: PAT_MRT4530_77078C.1.pep
MGKISAPWGVGEDLASGSVRGGGGSRRGRPRGQRWTAATTADGEDLVSGGGGWGRRRLRPQRMGKLRRWLGKTSPPVQCAEAAAVECAVAAEGDDDARSEPRIERVMRRNLRPAFAPGEWESCGGEGWTVQITSDLRMDGRDVNI

SEQ ID NO: 179636 - protein, 92 aa, Oryza sativa
  Clone ID: PAT_MRT4530_77079C.1.pep
MKAMGAQGHQREQAPTPTLCQLSASVYMEGRSQGAVVTVELLDRGLVAWDRRCEPRPAKSGQEPMAISGSMFFPEQRNRRTWSGISDVGGMG

SEQ ID NO: 179637 - protein, 154 aa, Oryza sativa
  unsure (1)..(154): unsure at all Xaa locations
  Clone ID: PAT_MRT4530_7707C.1.pep
HPQAQGGGGQPRAARGAAGGDRPRAARGLARRGRRRRAAAAAVGPSAGSHGRRRRASSSGGSRRGGVGGWEPRRAPAADIQXKIPDSFRPFIPDSFRPFSNSDGXYPYCIRFRLREKKSEFVSESENFRIVPTETIRIRKMVRTDGNYPNQFHP

SEQ ID NO: 179638 - protein, 44 aa, Oryza sativa
  Clone ID: PAT_MRT4530_77080C.1.pep
FLSRHQSHTHLNWALYDASPEWSVEHVLYQASTSFCFDNSNTSE

SEQ ID NO: 179639 - protein, 112 aa, Oryza sativa
  Clone ID: PAT_MRT4530_77081C.1.pep
MGSLLEIRIGIGLMSEYLVALCRMHGCRVVFCNVSAVLRLLDTINWGYMSRVNRGGPLMVIAQYGYSSTFVYNRKTFSWCGYSSVFITGRMAMTGCRKELGNQGWSLNIPGG

SEQ ID NO: 179640 - protein, 619 aa, Oryza sativa
  Clone ID: PAT_MRT4530_77082C.1.pep
MEVFVAAPPCPSVFEHAAAEVAAVRPVTGSAVEPPASTPDTHHRNRIRIGGWVRRLVASYTPSTVASTPAAVSYRIRRRRARRRSAVEVALDVAPPAVSCRIRPMPPPLAATPARRSHLRKNRIYICGWLRGGCTTLVHRAQEGQVVRRIRRLQRRRVAVVTVGPDRINRLPDELLHHVLSFVTTPEAVRTSALSRRWVGVWKRVPRLHLLEEEATKAEHIPDHYDGILRRYAADVDIADLAITYHWDWPEVDGDRASAWAGFAARRVTGRFDLAVTSQVGRGGDDDERAVLDLPCFERATEISLYSSGLAVRLPAELDAAGDGDFTRLTKLQMSELRFSDAGEGISGVVSRRMRVEYCFDETRSCRPWNGGGAAAVMRLSAPALEELGWEDACPDEVERIRLPTCLRELVVSELPSHIIRSMGQSDFTKILELFSGADVLKLTSPMTATLDSEEQESLIYSVQLPYYSKLDLGVITKGHKSYGSSVVHFLKRNSSIRNLTLTLHPYHPEMNLMATLGLATITPFLPLSHSRGRLSSPTKLECERASVSGGSDCDGDAAYECPDCISSLAAVLLHHILVFLPVVEAIRNCVLSHCWVCVWTGIPQLQLDDDAWRVDLVN

SEQ ID NO: 179641 - protein, 106 aa, Oryza sativa
  Clone ID: PAT_MRT4530_77083C.1.pep
MRAPHGSDMGGGPRWTGSTDRERGGAPRGADVAPTRRPRGSHAGGRTDGPDPLGVDRTAEGVALGRRARAAQAGLTAMAHGGAARRSGGVAATRMATAVAKRLGGG

SEQ ID NO: 179642 - protein, 83 aa, Oryza sativa
  Clone ID: PAT_MRT4530_77084C.1.pep
SSSRRPLGPECFYPWSTSTSCCSAERRPPQHSFITGGLFATASTWSCNCVVLSDRSFATFVVSIATLVHDALPCIHDHSTAPH

SEQ ID NO: 179643 - protein, 525 aa, Oryza sativa
  Clone ID: PAT_MRT4530_77085C.1.pep
MDRYRVAPRPVYLSAAAAAGGDHGDGPRRLPRGVAGGGGAELDIFSAERYFNADDVVKKEEYRDEEQPRQEVAVDAASQSGRTVACSSEASWTSRSGLLSGHAQSAASAGAAAKLQMGGANGGGGAAAAAASAHRGKKPGSGQRWGLFSRDCPCAGRKAVTVDVASEPRSPATPRTHARFENSHVVADSTIFKANAPPPPPPCEEEPVKMKISPGSSTFPPPLANSIFAAAPNRGGGGGGAAPFAAFPAPDIVGRRVVSSGGFTFPVAVGAAKVVSTVGDEPPRESLEVFRPIDEESVLADPPADHLATVGGRGGGGGGLAAGFARAPGVAAVATDEEAMSDASSDLFDLESFAASSSFPTTCRGRSSRRNSREDDDDDEDLPYGAAAAAAAAVEPALSECMYAPSEVSVVWSVATAEGGAFDAASVANFSSAASACCVEEFSFVPPPDSAATAGGGGHEGFTAAMSRSAARKKGGGFLSSCRCEKAVSVGPTPVRMVRPEVNVKTTGGGAARYHPGRVRMPVRT

SEQ ID NO: 179644 - protein, 57 aa, Oryza sativa
  Clone ID: PAT_MRT4530_77086C.1.pep
MGICRVLAPDHFEGFAQTVAVLDLRGEVTEPEVGFTNAENPIKSGSLFSVISTLFLA

SEQ ID NO: 179645 - protein, 99 aa, Oryza sativa
  Clone ID: PAT_MRT4530_77087C.1.pep
SICRHSPSIPASVAVHLRRRLRRTMGSRLPLESHRQVRSLTALADFSRASAPPSTYDSPPAPVSAASLRRSPCSTPMPPSTTTASPRRLVSPQHCRASH

SEQ ID NO: 179646 - protein, 54 aa, Oryza sativa
  Clone ID: PAT_MRT4530_77088C.1.pep
MAIAGEGASVDAGLEGGGSARAPPPMRSAATGGTCAPSPPSQCTVVVAAVGDGG

SEQ ID NO: 179647 - protein, 83 aa, Oryza sativa
  Clone ID: PAT_MRT4530_77089C.1.pep
MEMAGMRCSGTVLGKGERGVGGGSVVEAVLRGSRDWFSLLVDLRRATSNSVVRRISGEAAYSGGEGDGQQDQAEEEAERFCGW

SEQ ID NO: 179648 - protein, 243 aa, Oryza sativa
  Clone ID: PAT_MRT4530_7708C.1.pep
MSKSRWYFTPKHHANPGPLALPTGNSSPPAPSTTAHNRPLGQLRPLAPLAYTVAARTVADPFLSRDYTAVPATRSDGAARVEELRRIGDIASLGARVEELYRPGELAARGSRVEELYRPGEIVARGSRVEELYRPREVAAHSARMEDLYRPGEIPIRGARVEDLYRPGEISARAVRVEDLYRSDQRITHAVDLPLHAPYPTAHYEVPNPAYSDISQRYASTRLNAPGASVSSLYSFPGAPAYR

SEQ ID NO: 179649 - protein, 147 aa, Oryza sativa
  Clone ID: PAT_MRT4530_77090C.1.pep
RRSLRWRDGDPPGAKTSLCSRGARPRRRFLLPTSPQLSQIGAAASHSLAIGKISRTADPSLSLAKNSAAAPHPSHLHDEARTTDHEINNGKDRGQGVVKVIGKYFIRTRYQVTNIYQLKSRPQGVPLRVRKMLKSAQAIDEFNQDGV

SEQ ID NO: 179650 - protein, 195 aa, Oryza sativa
  Clone ID: PAT_MRT4530_77091C.1.pep
MRCDQHDANEKVNNYSKEGRNMTEPSFSSLQMKSNAPPSSEESIKEHHVDVDKAFKLEIHVIANHITSSFSSFDWMKQVVLNGLRKKHHMEKPRTVFREEGEDDVTMPTSDTTITYIMDQQEVIKVKSSKCWNLIRPPAALLTLMGCQSYIRPLFLARLICTGKINNPRRGVSIANAQHNVSYGYSRIVNVSPKS

SEQ ID NO: 179651 - protein, 399 aa, Oryza sativa
  Clone ID: PAT_MRT4530_77092C.1.pep
MALPFLLLLAFALLFPLSAPPRCCSAAPASSPPPSPPPSPAAAAAAPRRTPLVPALFVIGDSTADVGTNNYLGTLARADREPYGRDFDTRRPTGRFSNGRIPVDYIAEKLGLPFVPPYLEQNMRMGVGSVDLSNIDGMIQGVNYASAAAGILSSSGSELGMHVSLSQQVQQVEDTYEQLSLALGEAATTDLFRKSVFFFSIGSNDFIHYYLRNVSGVQMRYLPWEFNQLLVNAMRQEIKNLYNINVRKVVMMGLPPVGCAPHFLWEYGSQDGECIDYINNVVIQFNYALRYMSSEFIRQHPGSMISYCDTFEGSVDILKNRDRYGFLTTTDACCGLGKYGGLFMCVLPQMACSDASSHVWWDEFHPTDAVNRILADNVWSGEHTKMCYPVDLQQMVKLK

SEQ ID NO: 179652 - protein, 67 aa, Oryza sativa
  Clone ID: PAT_MRT4530_77093C.1.pep
MVWETCSSRVEEGNNDVGNLQQPEGEERSEKEENSTGAGSWRGTGENPGMTSAQVWRWPAVDGDASY

SEQ ID NO: 179653 - protein, 304 aa, Oryza sativa
  Clone ID: PAT_MRT4530_77094C.1.pep
MQLSPLVSPAMSHQILHTSNPTLPTPPQPHNHHPPVPPPPKLGRRAALAIAAAPAILSATPAPSRAQEAAAAAAAPCIADLPVTAKAFLDVSIGGEPAGRITIGLFGDAAPAGASRFLSLVTGVGYRRKEFVKIVPGYVQHGGVVSYPAIPAVTERLAAEMGAVRAQCGGERSPHAAAGAVSIVVRDPSLPPPKPKLVARGGKLEVDQEQVGVVPNGTEFVITTGDAPELDASALVVGRVVDGMDVLGKIAAVPTVKDNTASPYFRVAKLIGDKRAVVAERGFNRPYTKILITNCGVIEQQQEQ

SEQ ID NO: 179654 - protein, 67 aa, Oryza sativa
  Clone ID: PAT_MRT4530_77095C.1.pep
ILTSECAQSFGYFFLSSSHVASHYISLLVMKISNMLDSCIATQVNKKMGRHLMNLCDWSKLSIMTVQ

SEQ ID NO: 179655 - protein, 101 aa, Oryza sativa
  unsure (1)..(101): unsure at all Xaa locations
  Clone ID: PAT_MRT4530_77096C.1.pep
ELVVWSNVQRPLVICLFFFLPFFSPSFCFFSRATTERKRSRAPVLRWLNGLDGGGQACSRSLRIREGRWKTXGEKRMAGTATTRAQLRPAMVVPVVAGGSG

SEQ ID NO: 179656 - protein, 1055 aa, Oryza sativa
  unsure (1)..(1055): unsure at all Xaa locations
  Clone ID: PAT_MRT4530_77097C.1.pep
MENLPNGSANIAEKNQDNEMSTDAGEPEEVADIFIYREDVVSLKSKEDTRGLVLEVAGEYDSDGSITDDDTDTEEHEPKSSHGDGDNGADGDXCRNGVYVAXQRCLPANEVRVRMSGTLQRATSPSVANTFSKLVRXYLQGNGVGTLTDDACTTERSKEQPCSVGFKLALAKIMPRLITALKDAGANCDQYEHLGKTETAQEXLNDLYGYHFLVXRKMITSPAVFRINVHYICFLFLFQHLENLVPNKAMNSSVYKTSRWLNGLWKASRLEGTVTKVETVAVIVYWIASAHFATNQESVPPEEQNPKDLTLLSCFSYANWQLTDWCLPNQYTSSCTDDSLIESSEIKDSDDIPESSDVKTELTQKTDMDENPGRMDGDSSADGSNMVYEDNTCLAKQSESGTIASTVPKEGSQDNATYRKKLRKVFVKKDKRTRRRDESFERALLIANTYTKVDVIWQDGTKECGASSTLLIPIHSPNDHEFFPEQYVVDKVGNDVDDSSETKRVGLVRSVNAKDRTASVSWFKPSLHPEEPREIECNEIVSAYELDGHPDYDYCYGDVVVRLPSVSLPVESTNRENTMELDNVNSTEVSATPVADAEEQFPQKESSLEFTSLSWAGNIVGFEDGDIIVIWGDGSVSKVGPHEIYVVGREDDGASLDDGTASDGASWETVDDNQTDLPDDSAQDDSQNVADSNIERENGSFNSQDGSSVATGPLSVAFGFVTRLASELFARGKKHLDGSNSDAMDEVESHQSNEISESGDDIDKAEGENNVATSESTVVTTNDASGGKSVDVDMADKPGDSDGFKHFDVQQCPPDHHYLENMAQGTGGRKWVKKVQQEWNILEKNLPDYIYVRVFEDRMDLIRAVIIGASGTPYQDGLFFFDFHLPPEFPQVPPSAYYHSGGLRVNPNLYVDGKGLVLNEKPYFNEAGYEKQVGTVEGEKNALPYNENTYLLSLKSMLYILRRPPMHFEDFAKSHFSKRGKYILKACEAYLQGNGVGTLTDDACTTERSKEQPCSVGFKLALAKIMPRLITALKDAGANCDQYEHLGKTETAQEH

SEQ ID NO: 179657 - protein, 216 aa, Oryza sativa
  Clone ID: PAT_MRT4530_77098C.1.pep
MLSSTALRPLAQPATATATATAFSASRTAAAAGRRGSAAGVVVRAVRNYDSIPKREPFSSSRSVLDEFLRQEKPLVQRTKDQITDYCTTLEGDECCSCWDAYFELNKLEQELPKEEIARMVKDSEGDPRYLINSIHHRSDLRKKMAEKSHNSLSSNSLGQAAKPRPFPVPDGLPKTQEELAEEQEALMPESSYTRLLRRMGRFPDWYTPRPDHETD

SEQ ID NO: 179658 - protein, 158 aa, Oryza sativa
  unsure (1)..(158): unsure at all Xaa locations
  Clone ID: PAT_MRT4530_77099C.1.pep
PRVRQVPPSAYYHSGGLRVNPNLYVDGKVCLSLLNTWTGRGNEVWDPSSSSILQVLVSLQGLVLNEKPYFNEAGYEKQVGTVEGEKNALPYNENTYLLSLKSMLYILRRPPMHFEDFAKSHFSKRGKYILKACEAYLQGXNGGGTLTDDACTTERSKN

SEQ ID NO: 179659 - protein, 382 aa, Oryza sativa
  Clone ID: PAT_MRT4530_7709C.1.pep
MEHSPSNKMTLLLLLLLLLGCTHHGQANMYSGHPKIDSIFSFGNSYSDTGNFVKLAAPVIPVIAFNNLPYGETFFGHPTGRASDGRLNVDFIAEDFGVPLLPPYLGESKNFSHGANFAVVGATALDLAFFQKNNITSVPPFNTSLSVQVEWFHKLKPTLCSTTQGCRDYFERSLFFMGEFGGNDYVFLLAAGKTVDEAMSYVPKVVGVISAGVEAVIEEGARYVVVPGQLPTGCLPIILTLYASANATDYESGAGCLRRFNELARYHNAALFAAVSLLRGKHPSAAIVFADYYQPVIEFVRMPENFGFSRSSRLRACCGGGGRYNYNATAACGLAGATACPDPAASINWDGVHLTEAAYGRIAAGWLRGPYAQPPILAAVRP

SEQ ID NO: 179660 - protein, 123 aa, Oryza sativa; identical to SEQ ID NO: 179548
  Clone ID: PAT_MRT4530_770C.1.pep

SEQ ID NO: 179661 - protein, 63 aa, Oryza sativa
  Clone ID: PAT_MRT4530_77100C.1.pep
AWFLGWVGLGCDEAHPSHSRCEAQTKHLPSNMSFLTIHPSRLPSASCLRSTNHKPKAEPPQHG

SEQ ID NO: 179662 - protein, 40 aa, Oryza sativa
  Clone ID: PAT_MRT4530_77101C.1.pep
ARAPLVPLRLDIMLGHTGLVRCPLPCVPRCGYRIIPGRVG

SEQ ID NO: 179663 - protein, 744 aa, Oryza sativa
  Clone ID: PAT_MRT4530_77102C.1.pep
MQEALVLAMKVIPSIIFLAVAVQDAASSGYSLSLPGCPDKCGNVSIPYPFGVGPSCAATSISSYFNLTCSNTFNPPRPMVGDSEALVEVTDISLEHGEMRVLSPVYYICFTANTTFTKFTEGYELKHTPFLPSPSRNRFTVIGCNTLGLIGGYKGTVSHYVTGCYSYCESINSTSDGAPCAGMGCCEAAIPTDLTAWGAMFEMNQSKVWSFNPCFYAMVSEVGWYSFQQKDLVGHLGFIDDRAQRGAPVVADWAIRNGSCPEEGKGIPGDYACISANSYCMDANNGPGYLCQCSKGYEGNPYLLNGCQDVDECALRKQDPKYEGYISLQERSSATSTPGGYLCKCKLGKRSDGTNYGCRPLRTTAEKVVIVQRKRHKKDKDEYFKQNGGLKLYDEMRSRKVDTIRILTEKDIKKATDNYSEDRVLGIGGHGMVYRGILDDNKEVAIKKSKVINDEWREEFVNEIIILSQINHRNIVRLIGCCLDVHVPMLVYEFVSNGTLSEFLHGTDRRSSIPLDIRLKIATQSAEALAYLHSSTSRAILHGDFKSANILLDDQHNAKVADFGASALKSMNESEFIMFVQGTLGYLDPESFISHRLTDKSDVYSFGVVLLELMTRKRAIYANSINEKESLSYSFLLMFDQNIHRNMLDREIMDKETMVVLEKLSILAANCLRPRGDDRPTMKEVLECLQMIRRHPMHGASDHKGDSYAHHNYEGSSSPSMSAHFDETIYKSIEASRLVQDLVR

SEQ ID NO: 179664 - protein, 121 aa, Oryza sativa
  Clone ID: PAT_MRT4530_77103C.1.pep
IHICMYVYIHIYIHIYIYIYTYIRTYIHTYIRMYIYICIYIYIYICIYIYIYVYVYIYIYMCIYIYICVYIYIYICIYIYMYVYIYIYVCVYIYLYICIYIYRYIYIDIYIYIRTRICVYV

SEQ ID NO: 179665 - protein, 115 aa, Oryza sativa
  Clone ID: PAT_MRT4530_77104C.1.pep
MGDQGSGVGVLQRQAAGERRNRPATGGKESPPQPPEVRAEGRWADNNERRLEGIFPLLVLLVPLLFRRGPGRNPKRGHVSFSVRASAAAAPAAGLERHWEWGDDKQTGSQKLETQ

SEQ ID NO: 179666 - protein, 68 aa, Oryza sativa
  Clone ID: PAT_MRT4530_77105C.1.pep
YMLAGPFGVCPFECRLIVTLVNKNIQACEHSVRFLQLIARHFKAIISVKLIKKKKKGRQNRGSSCGAC

SEQ ID NO: 179667 - protein, 248 aa, Oryza sativa
  Clone ID: PAT_MRT4530_77106C.1.pep
LGSVPCSVAHTTTSAFARTSSRGRSALSSSLAAVRGLGPMGACSSVPTSRQLGQRCGASSGQRYGSRSMKRTMARVAVPTTSSATSCGCLSVTSCFSGHLSRPTGCSSPTSSSIPLPRLQAGPYFGCWVHHGAAMSVAHALLFASHEDLRVHHLSHSLSSAFFADGAVAAPSDGGPEHQQMGSGTSAAASEEKEASFPSRGQGLTMSLLLLINVISSATRPHLLWLGGRSLAALRSWTLSSSAARRSS

SEQ ID NO: 179668 - protein, 547 aa, Oryza sativa
  Clone ID: PAT_MRT4530_77107C.1.pep
MGNCCPPGSSSEPDPPPASSGSSRPAGSAGAAASPATISPSAAPAPAKPPAPIGPVLGRPMEDVKSIYTVGKELGRGQFGVTSLCTHKATGQRFACKTISKRKLSTKEDVEDVRREVQIMYHLAGQPGVVELKGAYEDKHAVHLVMELCAGGELFDRIIAKGHYTEHAASSLLRTIVEIIHTCHSMGVIHRDLKPENFLLLSKDEHAPLKATDFGLSVFFKEGLHQFLHCCSLLELIIIVVINGVPIAGEVFRDIVGSAYYIAPEVLKRSYGPEADIWSIGVMLYILLCGVPPFWAGKLLLFIAMDLVRRMLHSDPKQRISAYDVLSEYPSLYAEHPKSFNTLNFSDHPWIKEDGEAPDTPLDNAVLGRLKQFRAMNQFKKAALRVIAGCLSEEEIRGLKEMFKSMDSDNSGTITVDELRKGLAKKGTKLTEAEVQQLMEAADADGNGTIDYEEFITATMHMNRMDREEHLYTAFQYFDKDNSGYITIEELEQALREKGLMDGREIKDIISEVDADNDGRINYTEFVAMMRKGDPEANPKKRRDVVL

SEQ ID NO: 179669 - protein, 78 aa, Oryza sativa
  Clone ID: PAT_MRT4530_77108C.1.pep
SESHKNLKHCGLDRPGLLLRRHRSSQLAVQCRSSRSRPPSLLSTPGRPQTQTQSPRRLAQRHTCIPPHCRDGRHRGSR

SEQ ID NO: 179670 - protein, 78 aa, Oryza sativa
  Clone ID: PAT_MRT4530_77109C.1.pep
QFCQQPRLVGQQFHYQAISSVQAIFQQLQFHQVGVVYFYQTQAQAQALLALNLPSICGIYPKYYIAPRSIPPVGGVWD

SEQ ID NO: 179671 - protein, 414 aa, Oryza sativa
  Clone ID: PAT_MRT4530_7710C.1.pep
MEHSKPVAFVLLLLLACLHYAQANPSRRPLVQSIFSFGNSYADTGNFVRLAAPLLPVIPFNNLPYGETFFGHPTGRASNGRIIMDFIAEKFQVPFVPPSLGQGEDFTHGANFAVVGASALDLAFFLHNNITSVPPFKTSLSVQLEWFHKLKPTLCSTAQECRDYFRRSLFFMGEFGGNDYVFLQAAGKTVEQLIPYVPKVVGAISAGIEVSYIFTDICRDTNYTYNPQFTNGIDVNYCVIDAFIQAVIKEGAVQVVVPGELPNGCVPIILTLYASKSRGDYDARGCLKKQNALARYHNSALFEAVSRLRHRYPWVKIVYADYYKPVIDFIKKPSRFGFSASSRLRACCGGGGGGPYNYNATAACGFPGASACPDPAASISWDGIHLTEAAYARIAAGWLRGPYAHPPILAAVRQ

SEQ ID NO: 179672 - protein, 500 aa, Oryza sativa
  Clone ID: PAT_MRT4530_77110C.1.pep
MEQAAKATISLSPPSYAGCCMAACPYRSTRHLRRGGGCSARSISSLRHAPSARVYAAAAAAATPESKSTKENDLVFIAGATGKVGSRAVREFIKLGFRVRAGVRSAQRASSLVQSVEQLKVDDDATSPAERLEIVECDLEKQAQSDIVSAIGNAAIVVCSIGASEKDILDVTGPYRIDYMATNNLVQAATAAKVEHFILVTSLGTNRIGFPAFLLNLFWGVLCWKRRAEEALIGSGLPYTIVRPGGMERPTDAFKETHNLVVAVEDTYVGGLVSNLQVAELIACIASNRRTAYCKVVEAIAETTAPLLPTEDQLANIPSKRLTQQPPPEPEVVQQGETPPKPIQQSQRPLSPYTAFVDLKPPSSPSPCPPSAAAPAPTSTDTAAAGSSSTLNSSATGTPISVDQPKQQQRPLSPYTRYEELKPPSSPSPTPPSAASSASASASPDTPPAAAASSAALDSSANGTPITGDQLNQQQRPLSPYTRYEELKPPSSPTPSTPKL

SEQ ID NO: 179673 - protein, 118 aa, Oryza sativa
  unsure (1)..(118): unsure at all Xaa locations
  Clone ID: PAT_MRT4530_77111C.1.pep
XXXRERKLAXGRGXXRASGRGRGRGDGKXXLEDPCSRGRRWQVTVGRGDDESRKDFQYRRLLLKSRRVGPWDWGAFWRCQRGAGPREGRSTEPVYGSGRLLPFGGVVADQVSKLRSGQ

SEQ ID NO: 179674 - protein, 55 aa, Oryza sativa
  Clone ID: PAT_MRT4530_77112C.1.pep
FIWWKVFNTNVEVWEAKCIKMTHARHDRETAVLLYLYSAVSFSLHTRNFAETISW

SEQ ID NO: 179675 - protein, 37 aa, Oryza sativa
  Clone ID: PAT_MRT4530_77113C.1.pep
YKNTRYTWWTSSNAKAFLMVHLCISTTISLLLSTSPL

SEQ ID NO: 179676 - protein, 103 aa, Oryza sativa
  Clone ID: PAT_MRT4530_77114C.1.pep
TGSSPAGARFMFHSVQTALEQLLWCCSAVFNRRRADQQSSRDDLPAQQAHRGADSRDRSPGWRAQLTGLQARCNTAAHRPVPFAMPSCLVVAWIRLIISLVIN

SEQ ID NO: 179677 - protein, 446 aa, Oryza sativa
  Clone ID: PAT_MRT4530_77115C.1.pep
MGCLRRALRLGLRRGLSSSSAAPAAAEQAELPPPRPSAGRRVVVTGLGAVTPLGRGVGPTWDRLVAGGCAVRALAAEDLRLPGGADAGRTLEQLPSRVAAPVPRGKGDAEFDEEAWTKDNKSISGFIAYALCAADEALRDANWLPSEDEKKERTRLRRLSPYFIPKILINMASGHVSMRYGFQGPNHAAVTACATGAHSIGDATRMIQFGDADVMVAGGTESSIDALSIAGFSRLRALSTKYNSLPQAASRPFDCGRDGFVIGEGCGVMVLEALDHAKERGAKIYAEVRGYGMSGDAHHITQPQNDGRGATLAMKRALDQSGLQADQIDYLNAHATSTPLGDAVEANAIKSVFGDHATSGGLALSSTKGAIGHLLGAAGSVEAIFTVLAIHHGIAPPTLNLEKPDTLFEGAFMPLSSPKKMPIRAAISNSFGFGGTNTSLLFSCPP

SEQ ID NO: 179678 - protein, 82 aa, Oryza sativa
  Clone ID: PAT_MRT4530_77116C.1.pep
AQVQTRLSSAWCSRQWSQEEGRHSSLTGMIITKHAGTQGCDPRRSAGMASAADRTTARCNLQHTARFTFAHAHHVWWWHGLD

SEQ ID NO: 179679 - protein, 159 aa, Oryza sativa
  unsure (1)..(159): unsure at all Xaa locations
  Clone ID: PAT_MRT4530_77117C.1.pep
MASASDKLVLSAIVLAVLAAVVAAASGYGDVGEYCPRXGRRCPRNPVPSCRNYIARWCAAAGGRMDSRKQPPREFLEXCCRELAAVPMQCRCDALSVLVRGVVTEEGDRVSGMISQHAAPGCDAATIAGMASALTDYGRCNLQHTAGSFACLMFGGGMD

SEQ ID NO: 179680 - protein, 71 aa, Oryza sativa
  Clone ID: PAT_MRT4530_77118C.1.pep
MAHTYLYSAGSRCNVGSWLSADDMTRPGIYLTGTNVPSSGASTLAPARDECLEALILTGWGEACVRPPVAT

SEQ ID NO: 179681 - protein, 57 aa, Oryza sativa
  Clone ID: PAT_MRT4530_77119C.1.pep
LYTYINLYSIIIQDYDHSQLHAGGTTNKRRRSSAFLLRTCTGNSLGTSVITVKTPFL

SEQ ID NO: 179682 - protein, 151 aa, Oryza sativa
  Clone ID: PAT_MRT4530_7711C.1.pep
MPSLGELLKIGDKVGEGGRRREKVSGVALKVTGVMVRLPSSFKYTVNATSPYLQVYFHRLFVREKEKMRCPTHNTPSPNELDQEHQNLWNVHGYGNGIATVSDVQRQHDNRKLYHYSTQAELQKTSVSSLYRLSDSLFATDATYPVVFPEA

SEQ ID NO: 179683 - protein, 158 aa, Oryza sativa
  Clone ID: PAT_MRT4530_77120C.1.pep
LEPLAVALPGPGGVPLLAVNRPPGPKKIPPCARCVGPPLSAGWPIRFSPWHRRFSASQFGCERPPIYVPWLPPFAPPALRFLLPAAYVVFHCGRIFFFHWAQLLPCFLQALIGLPLGPAGNPPGAPPGIPRSSPPGVPKRKNKSKKKKKKKKKKKKKK

SEQ ID NO: 179684 - protein, 124 aa, Oryza sativa
  Clone ID: PAT_MRT4530_77121C.1.pep
MHACASCVLDLPRMQPLPLPASHCLPHPPRASHAGAGNPSAMPASTAPSLILFGVTCGLLQSPLQPGLSSDLYLPHINRSVCKPQPCTPSSYSIMKGLSIGFSRPSASDLKRMWVRFKKAPRGG

SEQ ID NO: 179685 - protein, 100 aa, Oryza sativa
  Clone ID: PAT_MRT4530_77122C.1.pep
MARVPARGYIRCQMLRGLSTTRGHVAARCLTARGQSDAPHVTPSPGSWVSRRRQAKKSLGKGKGEPAGEMGVVGVGRDGGAGSVAPWRAEGPETDFTDGP

SEQ ID NO: 179686 - protein, 75 aa, Oryza sativa
  unsure (1)..(75): unsure at all Xaa locations
  Clone ID: PAT_MRT4530_77123C.1.pep
TPSXKXALFAPXPVFFPXQCHXXGXVGLVPXLPXNVAYSRNFDCLVWHGVSPLXDFLECCXXXVIAVMAFSLQET

SEQ ID NO: 179687 - protein, 148 aa, Oryza sativa
  unsure (1)..(148): unsure at all Xaa locations
  Clone ID: PAT_MRT4530_77124C.1.pep
ASPRRPAAPRMWPPPEFPALSTPQMLSQPPTPVKPVGXSCRHGRSRXHKPKQTGTPVXVKAPKEGGTVTLVNQRKVAKDMQYYFKQNHLQESDQXGPFFGFLGKNEIFNGIWICVGFSEGMLTYFSPGPVFVRQVKILXTNFGSVDLS

SEQ ID NO: 179688 - protein, 227 aa, Oryza sativa
  unsure (1)..(227): unsure at all Xaa locations
  Clone ID: PAT_MRT4530_77125C.1.pep
MTAAMAPPQLVSVLVALLCVAAASPAGVGAARFVCNATAPRASTCQALVAYAPPNATTLAAVRALFQLRSHRALLASNGLPLSTPPSAPAPSPLRVRLPCLCSGGAGATFQRPTYRIRAGDTLDAIARGVFAGLVTYQDIAAANNVSDPNKIAVGQELWIPVPCSCDPVAGQPVVHYTYVVRPGASVAAIAQDFATTEATVLALNRMPDAKSLLAGQVLDVPXRACS

SEQ ID NO: 179689 - protein, 185 aa, Oryza sativa
  unsure (1)..(185): unsure at all Xaa locations
  Clone ID: PAT_MRT4530_77126C.1.pep
LALHGASRPNRGDEDSKTAARCSSYLRSSWRATRRRLESRRGTVSSPESSSRRRPLSPPDFPHCELVELSMAKQFLVQSLFMLXPKLTKEHGIKIAWGGRGAGKRAPPVSGSGRAVHGGSGPRTGEERRATRRPXDGPDLPKGRSDGGGSSRPEFNLSLGWHGSEVFGEHFRILADYGYIFPFPQ

SEQ ID NO: 179690 - protein, 197 aa, Oryza sativa
  Clone ID: PAT_MRT4530_77127C.1.pep
MGSRLGRRVIHFANLPLKLMLPPAPLSSVQEFAVKTVPSASKVDIRRCLESMYGFSVAEVRTLNMEGKKLRRGPFLAAKPDYKKAYVTLRAPLPVSPDLFPIGLVLGERERKASAAAARRKAVEGAEVEGEGKGKHWMEDEKVGFSRAGRGKVVYGNPGRLGKKRNGGTKVKDRAGEEVGKFPWSGTRLATEKKPAR

SEQ ID NO: 179691 - protein, 905 aa, Oryza sativa
  Clone ID: PAT_MRT4530_77128C.1.pep
MAAGGGGGGSAAARPALDCVWFPVKFSSRKTSGFNLLIKNAGKITDAACISSERDALLAFKAGFADPAGGALRFWQGQDCCAWSGVSCSKKIGSVVSLDIGHYDLTFRGEINSSLAVLTHLVYLNLSGNDFGGVAIPDFIGSFEKLRYLDLSHAGFGGTVPPRLGNLSMLSHLDLSSPSHTVTVKSFNWVSRLTSLVYLDLSWLYLAASSDWLQATNTLPLLKVLCLNHAFLPATDLNALSHTNFTAIRVLDLKSNNFSSRMPDWISKLSSLAYLDLSSCELSGSLPRNLGNLTSLSFFQLRANNLEGEIPGSMSRLCNLRHIDLSGNHFSGDITRLANTLFPCMNQLKILDLALNNLTGSLSGWVRHIASVTTLDLSENSLSGRVSDDIGKLSNLTYLDLSANSFQGTLSELHFANLSRLDMLILESIYVKIVTEADWVPPFQLRVLVLYGCQVGPHFPAWLKSQAKIEMIELSRAQIKSKLPDWLWNFSSTISALDVSGNMINGKLPKSLKHMKALELLDMSSNQLEGCIPDLPSSVKVLDLSSNHLYGPLPQRLGAKEIYYLSLKDNFLSGSIPTYLCEMVWMEQVLLSLNNFSGVLPNCWRKGSALRVIDFSNNNIHGEISSTMGHLTSLGSLLLHRNKLSGPLPTSLKLCNRLIFLDLSENNLSGTIPTWIGDSLQSLILLSLRSNNFSGKIPELLSQLHALQILDIADNNLSGPVPKSLGNLAAMQLGRHMIQQQFSTISDIHFMVYGAGGAVLYRLYAYLYLNSLLAGKLQYNGTAFYIDLSGNQLAGEIPIEIGFLSGLTGLNLSGNHIRGSIPEELGNLRSLEVLDLSRNDLSGPIPQCFLSLSGLSHLNLSYNDLSGAIPFGNELATFAESTYFGNAHTTVKKLFVPQKEASTKL

SEQ ID NO: 179692 - protein, 58 aa, Oryza sativa
  Clone ID: PAT_MRT4530_77129C.1.pep
MGHQASALPLGPSVPLSPSAALLLCRMRKGRRGSRRREEAHGRTGPRLRKMGGALLMP

SEQ ID NO: 179693 - protein, 182 aa, Oryza sativa
  Clone ID: PAT_MRT4530_7712C.1.pep
MAGNGWTQEVEEEMRDILRVIRAKDENEYVSVGKLVLALNKRLAMAGPALAGAATLAAAFIGSGEVVASRRTSRRRLKEADVEQRENCKVFETKVALQLGRSTLELKKFKAIASPTVKDEDIKEFAGREGGLGGARVGAAAVVVVAVLHDAGEGSALDDVGEVDDEVVLAAAVRHHPPRASS

SEQ ID NO: 179694 - protein, 139 aa, Oryza sativa
  unsure (1)..(139): unsure at all Xaa locations
  Clone ID: PAT_MRT4530_77130C.1.pep
MTVTVARRGQEREGAPAARRGHDEGGTTWWWVXVRSVVVAMWLDGELGQSSTSRRSPSGSRGRMGMEPKLGPSGGAGGWGRGPSGDDGEGGAREASEERIRSLQPASSASSPLTARYCPPACLPRLSPSRPRVAAAVRR

SEQ ID NO: 179695 - protein, 100 aa, Oryza sativa
  Clone ID: PAT_MRT4530_77131C.1.pep
MRRSGKGRGCGGSAPPSPGDGSGSAMRRSQRRHDASWIRCWLAPGVRIHRRLAAGARIRYRPVSGRGGEVVAMRNSSLYQPGDEEGQQRLGDEERRWRRG

SEQ ID NO: 179696 - protein, 119 aa, Oryza sativa
  Clone ID: PAT_MRT4530_77132C.1.pep
CTAPPTASATASSASAPRPWGSTTTPATPYSPSAPLCSGTGTTRAGPPSPLWAPKTGGPTLLPMKYPCFRATTWSPPPSPRWLAPLPPPTLGLGPSPAAPPRFGGLFWGHKGQRGWGRP

SEQ ID NO: 179697 - protein, 82 aa, Oryza sativa
  unsure (1)..(82): unsure at all Xaa locations
  Clone ID: PAT_MRT4530_77133C.1.pep
VLVLLFSSELSFQVPVIQLLLRLVGLVSSNQMLSFWTYVAVATVVSANVLTQSTDPXPQLFLVGHMLRLYLGGACMVKLSGQ

SEQ ID NO: 179698 - protein, 196 aa, Oryza sativa
  unsure (1)..(196): unsure at all Xaa locations
  Clone ID: PAT_MRT4530_77134C.1.pep
FFFFFFGIKTFLLPQLLRMESSSNHFPPPKYQFSRPIIFSNXAACLVPAMGCAKLEPEQLTTKATTQIHYTTQTATTRNDTITRVLFVSSTDITTTQLVSGYLLLSFIISLPSPPSDIDMGCIAPTCAHIGRHWRILWLXGLHGARWPRLFPHSLXAGQFRAVWCXDXSYALAXCQRNHPCIALLRRGTLSFLCHG

SEQ ID NO: 179699 - protein, 56 aa, Oryza sativa
  Clone ID: PAT_MRT4530_77135C.1.pep
MVHYIMQQVQFDAGFVDEPQAQAQAQVALNLPSMCGVYPRYCSTPCKVATGHCGSW

SEQ ID NO: 179700 - protein, 283 aa, Oryza sativa
  Clone ID: PAT_MRT4530_77136C.1.pep
MAALSLARSPPHHHHAAAALALPAPRIPRLAPLLRTPRRPRPPSGFRRLPAAAVAASSPPEAQAVEDGEEEEEEGGEKRRKLYVANIPWSFPAPEIEKLFAQCGAVKDVEVIKGKDGKKKGFAFVTMATAEEAAAAVEKLNSLDVVGRTIRVEFSKSFRKPAPPPPPGTILERHKLYVSNLPWKARAPNMKEFFSKFNPLSAKVVFDSPSGKSAGYGFVSFGTKEEAEAALTELDGKELMGRPVRVRWRQSVDDSDDSVKADGEIEDANVDGEAEGVTDNGTK

SEQ ID NO: 179701 - protein, 139 aa, Oryza sativa
  Clone ID: PAT_MRT4530_77137C.1.pep
MAPLPFSLPYRRRRSISPSPSRIAGMAPRRRVLDGGTAATTTVLSSPLPVGLDGGATVRAILLSFSPLPPSRRRAPEDGGLEGGGASVVGKAASVTVPGGRSHDMSAMDGYGNELGSIGFGVPELAHLCDFFLSFFSFF

SEQ ID NO: 179702 - protein, 66 aa, Oryza sativa
  Clone ID: PAT_MRT4530_77138C.1.pep
MSPSLLRGDHVLAVGCFLSSPTFIADLLFRFHGWPTTQLPIEDFIVIIGCYTTIDWITDIVIFINI

SEQ ID NO: 179703 - protein, 73 aa, Oryza sativa
  Clone ID: PAT_MRT4530_77139C.1.pep
GSQQRTQSLLNLGQIKTAKLCITHKIKDATRKHKAPIHRRGEKAKKKIRANKIPNPRAWPKGLVQLPIKLKLQ

SEQ ID NO: 179704 - protein, 65 aa, Oryza sativa
  Clone ID: PAT_MRT4530_7713C.1.pep
YTASVKKKHYKLTTKVSQKASASGKQLPDQQTKNTRSTPPSLGIAISLSLCSLILSRLLCAALCL

SEQ ID NO: 179705 - protein, 96 aa, Oryza sativa
  Clone ID: PAT_MRT4530_77140C.1.pep
MDGGGGGDGVDWRREVVTREGGEGDEEGLRRREAADIRGGGEADVDGGALAVEKAARKGEGDEDTSTNPNGQNKQAIGMEGNTGGRITENLTDASN

SEQ ID NO: 179706 - protein, 1005 aa, Oryza sativa
  Clone ID: PAT_MRT4530_77141C.1.pep
MAAAAAAAEGRGPRRVRNTCILAHVDHGKTSLADHLIAAYGSERRVSERMAGSARVMDHLEEEQRRAITMKSASIALRRGGEDGGGHRVHLIDSPGHIDFCSEVSAAARLADSALVLVDAAEGVRVQTHAALRQAFVERLRPCLVLNKVDRLVAELRLTPAEAHARLRRIVSEVNSIYSALRSRSYFSTLDAACALSQELPDNGDAADEEEDAFQPQNGNVVFACAREGWGFRLVTLAKLLAPKLRADPAELLKGLWGQKYFDERSRTVVGKEAMAAATANPNPKPMFVKYVLEPLWGQYHKMKRKLRLAEAVFDMVVECTPNPIAAQATRVARLMPAAKTEQLTAAAPCPAAVAAEVEKVRRCVATCNASTSAPVVVFVSKMFAVPYRFLPSRGVNGEPLNHRGSSSSAESGECFLAFARVFSGVLRAGHKVFVLSPMYDPLRGGDDAMQQKHLQEVELQHLYQMMGPDLEIVSAVRAGDVLAIEGLGHHVLKNATLSSTKNCQPFSGMMFQVSPMLKVAIEPSNPSDLGALVKGLKLLNQADPFIEYTVSERGEHVLAAAGEIHLEHCIKNLQERFARVQLEVSKPLVSFKDTIQGEGAGIMESLKASHEFVERTTPNGRFTVRVKVFRLPNAVTKVIEDSKELLAQVIEGDSGNSNGVLDSRFSQDGGDSASTLRQLLINAIDSDLEALSAQLDDEKTESYRKMLIGYLQRIWALGPLQVGPNLLLSPDATSSDGVVTSQDGREGILVRGTCHVSERLGLVNSSDAKTTIGIDGSQSAVDGLDPETVKNSIATGFQLATNAGPLCGEPTWGLIFLVKPYILPDSADASNNQSDHYSTFSGQIITAVREACQAAILESKPRLVEPMYFCELTTPTEQLGSMYAVLGNCRARVLKEEMQEGTSLFTVHAYLSVAESSEFSKKLRNATAGAASALLAFSHWETVPQDPFFVPKTREEIEEFGDGSNIGPNLATKLMNSVRRRKGLHVEEKIVEYGTKQRTLAKKV

SEQ ID NO: 179707 - protein, 62 aa, Oryza sativa
  Clone ID: PAT_MRT4530_77142C.1.pep
YRLPRNTCKLVSFLCRKYTPPLAHPLLPNVFVEGDICLFPFCPVCLHASFNNFTNKCKKFVL

SEQ ID NO: 179708 - protein, 121 aa, Oryza sativa
  Clone ID: PAT_MRT4530_77143C.1.pep
MHQADANDPNLARPYTELWMGTQLSAPSSLLAAANGLLRDWLARNPAVSACWGGDLPFLTMAMLSTSMPFTMVTLSVSVPFPTITLNLTQMPAGGAGVSIGAAGLLHALHRPPVIHPGAAA

SEQ ID NO: 179709 - protein, 56 aa, Oryza sativa
  Clone ID: PAT_MRT4530_77144C.1.pep
PFQLQAVLINCRSKINKSIHHTFTVLFLTAVPKYLLSNLSLFFLKKYIFRLYYKMF

SEQ ID NO: 179710 - protein, 991 aa, Oryza sativa
  Clone ID: PAT_MRT4530_77145C.1.pep
TGNGASRARRSAVPAAGSALRQNRHQPHLLFSTAILAAAQSNKSESDRKALLCFKSGILLDLDGVLSSWMDDSLNFCSWRGVTCSSSYPSRVVHLELSSSHLTGRISGCIGNLTSLSQINLTDNHLSGAIPDELGKLPVLRTLLLAANNLEGDIPDSLGTSLSLSYVNLANNTLTGVIPDSLASNMGTLRFLDLTGNLLSGRIPPSLANISSLSSILLGQNNLSGPIPESLSQIANLNKLDLSGNRLSGFVPVTLYNKSSLEFFGIGNNSLIGKIPPDIGHTLPNLKSLVMSLNRFDGSIPTSLANASNLQMLDLSSNHLSGSVPALGSLRNLNKLLLGSNRLGADIWSLITSLTNCTRLLELSMDGNNLNGSLPKSIGNLSTHLQKLKFGGNQITGIIPDEIGKLINLSLLEINTNKQSGQIPMTIGNLKKLFILNLSMNELSGQIPSTIGNLSQLGQLYLDNNNLSGKIPANIGQCIRLAMLNLSVNNLDGSIPIELVNISSLSLGLDLSNNKLSGLIPQQVGTLHNLGHLNFSNNQLSGQIPSSLIQCAVLLSLNLENNNLSGSIPESLSQLPAIQQIDLSENNLSGVVPTGGIFGKPNSVNLKGNKGLCALTSIFALPICPTSPAKRKKNNTRWLLIVILIPTVTVALFSILCIMFTLRKESTTQQSSNYKETMKRVSYGDILKATNWFSPVNKISSSHTGSVYIGRFEFDTDLVAIKVFHLDEQGAHNSFFRECEVLKCTRHRNLVKAITLCSTVDFDNNEFKALIYEFMANGNLEMFVHPKLYQGSPKRVLTLGQRISIAADIASALDYLHNQLVPPLIHCDLKPSNILLDYDMTSRIGDFGSAKFLSSNFTKPEGFVGFGGTIGYIPPEYGMGCKISTAGDVYSFGVLLLEMFTAKRPTDTQFGSDLSLHKYVDSAFPNTIGEVLDPHMPRDEKVVHDLWMQSFILPMIEIGLLCSKESPNDRPGMREVCAKIASIKQEFDKTM

SEQ ID NO: 179711 - protein, 85 aa, Oryza sativa
  Clone ID: PAT_MRT4530_77146C.1.pep
TMILLPFSIFALYMHKRKTSKHLEIKHYYFSMFCMFCCLVSTRLQNSAIDCINSLFFFHACYFVPVSLFSSFFFGQFLSFTSSSL

SEQ ID NO: 179712 - protein, 233 aa, Oryza sativa
  Clone ID: PAT_MRT4530_77147C.1.pep
MATHTQISKKRKFVADGVFFAELNEMLTRELAEDGYSGVEVRVTPMRTEIIIRATRTQNVLGEKGRRIRELTSVVQKRFNFPENGVELYAEKVNNRGLCAIAQAESLRYKLLGGLAVRRACYGVLRFVMESGAKGCEVIVSGKLRAQRAKSMKFKDGYMISSGYPVNLYIDSAVRHVLLRQGVLGIKVKIMLDWDPKGKQGPMTPLPDLVTIHAPKDEDEFSKPLTAEIPVAA

SEQ ID NO: 179713 - protein, 441 aa, Oryza sativa
  Clone ID: PAT_MRT4530_77148C.1.pep
CAVLLSLNLENNNLSGSIPESLSQLPAIQQIDLSENNLSGVVPTGGIFGKPNSVNLKGNKGLCALTSIFALPICPTSPAKRKKNNTRWLLIVILIPTVTVALFSILCIMFTLRKESTTQQSSNYKETMKRVSYGDILKATNWFSPVNKISSSHTGSVYIGRFEFDTDLVAIKVFHLDEQGAHNSFFRECEVLKCTRHRNLVKAITLCSTVDFDNNEFKALIYEFMANGNLEMFVHPKLYQGSPKRVLTLGQRISIAADIASALDYLHNQLVPPLIHCDLKPSNILLDYDMTSRIGDFGSAKFLSSNFTKPEGFVGFGGTIGYIPPEYGMGCKISTAGDVYSFGVLLLEMFTAKRPTDTQFGSDLSLHKYVDSAFPNTIGEVLDPHMPRDEKVVHDLWMQSFILPMIEIGLLCSKESPNDRPGMREVCAKIASIKQEFDKTM

SEQ ID NO: 179714 - protein, 246 aa, Oryza sativa
  Clone ID: PAT_MRT4530_77149C.1.pep
MPDLKQRRAFRSLSDLFDCAAASIAVLKKVKMSKLHSMDNIRIIVSRALGSQGAEEQRTARARRGKRNLQEKDNEERHLSNENDCKRQQNSAGVAVGTQQTGQYGQMIQRYTLNQLNWQCSLLMESTVQPSRDQGDAPTRGCVAATGCRRAPQRRRRPCEPQLLSVTRPRGGGGVVAGCAASAAAGPGTRVQGDEAGGDSGEAPSRRPAPPSVVLSMPRCPSVGMSGGAADWGWDDRRGGDWLTGG

SEQ ID NO: 179715 - protein, 521 aa, Oryza sativa
  unsure (1)..(521): unsure at all Xaa locations
  Clone ID: PAT_MRT4530_7714C.1.pep
ERAHPHHAAHAGARRRQRRAATSPSPPPGRAGNVPTSARPSPSVTPTWPPTPGPPTPSARPPLPPPTDSAHPEAATPPPPHAPPAPPQPXPPHSRPPPLPTLTVPPHRRHYPNPHLPPPPQPPLPYTPPRRSPPRSRRPPTPPSRPPPPPPAHPPPPPPQPTPRRHHPPTPHPAPAIPTXPQRTTTPPPPPPPPDPTSPTRPPPTPPRAPPTPPPRPGPPPPPLPPPPPPPAPPPPGPPPPPPXPPQPPTPSLPPKEEESRRREPRLLDPXRSPLPVTDPPAXPPTPPRTLPTPSSPSTRXERAPSPPSPPXPPSPRPPRRAPPPGRPGRRRPHRHTSPRQRLPRSPPPPQRRQGRCPLPRREVLRPPPRRXAPTRAPPSPPSLPANSLMSSSLTVGEAIALNFLSSNVLRPSCSATFVSNTLQFSLCSTSASLRRRLDVLLDLPVDAGHVAAQVKHHAHLPAVLDGVHRRCQRATEDCHAGRLRYDLAGADERCGERGSAGQRRACHGEALVEGEDQLAD

SEQ ID NO: 179716 - protein, 67 aa, Oryza sativa
  unsure (1)..(67): unsure at all Xaa locations
  Clone ID: PAT_MRT4530_77150C.1.pep
GGLVDQSIVESFAQGGRAPAPXRVYPPETINAHAGVVLGNNPTSARVAAKKLVVLXMDSSHNQAPPA

SEQ ID NO: 179717 - protein, 179 aa, Oryza sativa
  Clone ID: PAT_MRT4530_77151C.1.pep
MVVGAPALGRCSGAYVPPEMLRLVMARLGGASCGCRRHRTFVVPCNRTTAAGPGPGSQSTVQPSRDQGDAPTRGCVAATGCRRAPQRRRRPCEPQLLSVARPRGGGGVVAGRAASAAAGPGTRVQGDEAGGDSGDAPSRRPAPPSVELSMPRRPSVGMSGGAADWGWDDRRGGDWLTGG

SEQ ID NO: 179718 - protein, 122 aa, Oryza sativa
  unsure (1)..(122): unsure at all Xaa locations
  Clone ID: PAT_MRT4530_77152C.1.pep
MPQPATTPFPPLSPLLLREVCSAAAXQAPPPRAPLRPXPPPRTTTEPPPPPHRCGRATPCPALPQSHPQPHAAATEHRYPVPPPSNPFPRAAPGHELRGEGEGNFGSESGAARAERSMVGVH

SEQ ID NO: 179719 - protein, 101 aa, Oryza sativa
  Clone ID: PAT_MRT4530_77153C.1.pep
MARRHRRAARRPAAKCRAKTLVVVDDDRDLPLRRPNERDQQGGAARLPEQLNTGVTVGTEGSQQVQLRSIGYLPAASTGRYKIVHFPVKGVRRGAGVHVGG

SEQ ID NO: 179720 - protein, 98 aa, Oryza sativa
  Clone ID: PAT_MRT4530_77154C.1.pep
MASPECPTGLICPWASSSTLRHLFHLPVAHRRPWHPPIAAAGTYASGGSKFRARVRPPSVQNLLGTGRALRARRRRLRLGARSDSGSGGDEAVRSHRS

SEQ ID NO: 179721 - protein, 48 aa, Oryza sativa
  Clone ID: PAT_MRT4530_77155C.1.pep
SSEKIVVLVMLSCCIFWLHDCLQIRQFCTVQATNSGYYTCAIMNCKQY

SEQ ID NO: 179722 - protein, 99 aa, Oryza sativa
  Clone ID: PAT_MRT4530_77156C.1.pep
MEAQQQQGRIPARKRKGRDGAAGGSPDAAPGAGSRLLAGYLAHEFLTAGTVLGERLAAGTTPEEGGGGRYEAVAALVHGGGARVPGVVNPAQLAAWVRT

SEQ ID NO: 179723 - protein, 48 aa, Oryza sativa
  Clone ID: PAT_MRT4530_77157C.1.pep
MQGGGALRPRIIRLAYVFLRRVGLFSLLEPACAPALCLPPPSLGGGGA

SEQ ID NO: 179724 - protein, 232 aa, Oryza sativa
  Clone ID: PAT_MRT4530_77158C.1.pep
MEIGQVKQAAGVQPVHRCSPVPKGRRAFAMKRHMYAGLGTHAHACDIVVRNRFGVWSRRNQKYIRKTRYFKFVALGSAMSKVRRKLQEWIKQHGLLTWAQYSARREELEAAEAGLQKLFHRRMPARFRKLKRRVVKEREWERRLLLKKQAHAAQGAPITRALFVYMSSCLVQLFYYLRRLMLGSVTPRNFRIEFQREHHSTGILDGTDEAYSEKPPSDAYLNFGVLGKIEQD

SEQ ID NO: 179725 - protein, 235 aa, Oryza sativa
  Clone ID: PAT_MRT4530_77159C.1.pep
MEAPYGRCRQAPTAAAPAGLDSGGRSTEAAPAAPAKCCWRRHEDEVAALAACQQLPSLKLALARSQELEPQSSSEIPFLTNAEALIVSGIYAAYALRGTRLGDHALLLGHGECFAFSAMEFPTIKGNHVYYLARRGNNEHEDHGLQHWAFVFDLGSGPMIGWAFGGRNLCSLYQWRCIIGSETFSGCGEFVTGGEGSYGSRNRCLPRQRRCGVHQEASTVALELFSGDHRDDQKE

SEQ ID NO: 179726 - protein, 140 aa, Oryza sativa
  unsure (1)..(140): unsure at all Xaa locations
  Clone ID: PAT_MRT4530_7715C.1.pep
GFGPPFFFFFQGFLREGGGKSFNKRPGAGVFFPKFFFFPGGDGRGFEEEPNVGGDRNGKGGRPLFKKTLFFFGGGVNGGPRGGDIFGGPHLGFKKLWXPXKKKKKKKKKKKKKKKKKKKKKKKKKKKKKKKKKKKKKKKK

SEQ ID NO: 179727 - protein, 941 aa, Oryza sativa
  unsure (1)..(941): unsure at all Xaa locations
  Clone ID: PAT_MRT4530_77160C.1.pep
MSSLSRELVFLILQFLDEEKFKETVHKLEQESGFFFNMKYFEEKVHAGEWDEVEKYLSGFTKVDDNRYSMKIFFEIRKQKYLEALDRHDRAKAVDILVKDLKVFSTFNEELYKEITQLLTLENFRENEQLSKYGDTKSARSIMLIELKKLIEANPLFREKLVFPTLKASRLRTLINQSLNWQHQLCKNPRPNPDIKTLFTDHTCTPPNGARASPVSVPLAAVPKAGGTYPPLTAHTPFQPPPAGPSLAGWMANAAAATSSVPSAVVAASSLPVPPNQAVPIMKRPTITDYQSAESEQLMKRLRPSGHGVDEATYPAPIPQPLWSVEDLPRTVACTLSQGSSVTSMDFHPTRHTLLLVGSTNGEITLWEVGMRERLFSKPFKIWDIQACSPQFQVSFVVSGVAFAKHLIHLHAYQQPNETRQVLEIDAHSGAVNDIAFSRPNKQLCVVTCGDDRLIKVWDMHGQKLFSFEAXELYEHLETDLSQRLDRNMNASSMKVSGARVGAGISPNIGRMDHIDRNSPAKPSPIMNGGDPASRSIDIKPRISEERPDKAKPWELMEVLNAQQCRVATMPETPDQASKVVRLLYTNSGVGLLALGSNAIQRLWKWARNDQNPSGKATANVVPQHWQPNSGLVMQNDTADTNPEDAVPCIALSKNDSYVMSACGGKVSLFNMMTFXVMTTFMPPPPASTFLAFHPQDNNIIAIGMEDSTIHIYNVRVDEVKTRLKGHQRRITGLAFLQCQKLQTKPARLLTQILXWLASTWFQCHSKAVEMGSEXQNPSGKATANXCHNIGNQTVVLSCKDVWPKMERIFQWIPQDALSAPISHASYSRNSQLVFAAFTDGNIGIFDVENLRLRCRIAPPAYLSSAAINSNPSVYPLVVAAHPQESNQFAVGLSDGSVKVIEPLESEGKWGTTPPTENGVPNGRTSTSSATSNPAADQIQR

SEQ ID NO: 179728 - protein, 285 aa, Oryza sativa
  unsure (1)..(285): unsure at all Xaa locations
  Clone ID: PAT_MRT4530_77161C.1.pep
SSVPSAVVAASSLPVPPNQAVPIMKRPTITDYQSAESEQLMKRLRPSGHGVDEATYPAPIPQPLWSVEDLPRTVACTLSQGSSVTSMDFHPTRHTLLLVGSTNGEITLWEVGMRERLFSKPFKIWDIQACSPQFQSVAKESSISINRVTWSPDGDLIGVAFAKHLIHLHAYQQPNETRQVLEIDAHSGAVNDIAFSRPNKQLCVVTCGDDRLIKVWDMHGQKLFSFEGHEAXPVYSICPHPKRVIQFIFSTSLDGKIKAWLYDLMGSRXDYDASGXWCTTMLYSA

SEQ ID NO: 179729 - protein, 109 aa, Oryza sativa
  Clone ID: PAT_MRT4530_77162C.1.pep
SHHLFPLFSSLCFSSLSQFSPHAARRCGGAATREKGRHSGGGPGAGGRCAAGGGAARERRGSHWAAGEARFCRRQSHQELREKKGERPIEGVREGKFENLACTEQPPRP

SEQ ID NO: 179730 - protein, 116 aa, Oryza sativa
  unsure (1)..(116): unsure at all Xaa locations
  Clone ID: PAT_MRT4530_77163C.1.pep
MAKRPKARRPGPWHDIVGPCRPGPTTGSCLGPSTGPMGHPCLRAGTARPDSWWAVPGQEVQPMGRHGXDRHVPVRWLLGRVQXAWGGPCRASPLAIYSKNVDLESALVWSPIVSSG

SEQ ID NO: 179731 - protein, 38 aa, Oryza sativa
  Clone ID: PAT_MRT4530_77164C.1.pep
IKEQVLRSEPNVEYALRSNAIRMYCILSVNIEYLECPR

SEQ ID NO: 179732 - protein, 179 aa, Oryza sativa
  unsure (1)..(179): unsure at all Xaa locations
  Clone ID: PAT_MRT4530_77165C.1.pep
XSXXHLVTFWWXYTPQKYSPGTSWPRSPLFLLISLHQHSHQHSISHTHTCHNTAHKSSITVLTAFPHHTITTQVHQPWSFPAPXGPSSALCMHQSSLVVIXVYPRWVLAAQHPGALGLLWFPHAQHSPSPTIMPIQQPRHPCPIANHGKLRPSFSKAKESPRSTQEPSSCGLELGTQTV

SEQ ID NO: 179733 - protein, 65 aa, Oryza sativa
  Clone ID: PAT_MRT4530_77166C.1.pep
GWERSFTYLDCHNQLITSIRASMNSIVRCILWPSRRKFTIISCLNLRMRHTYSHLAHHLQPQYLE

SEQ ID NO: 179734 - protein, 244 aa, Oryza sativa
  unsure (1)..(244): unsure at all Xaa locations
  Clone ID: PAT_MRT4530_77167C.1.pep
GQRPKDAMPLAYAISKKEEXTLREGIENGSWIDDLDLSGTIPPTVGLLSQLVSLWEATQDILLNQSEPDQITWKLSNHGEYPASSAYKAQCLGTTGTNFNALIWRARAPPKCKFYAWLVIQNRVWTSDRLAARGWPNSGTWPLCRVTSESASHLLVHCRYTRRIWSLTAAWVAYQQLDPCHWAPCQSVQNWWEMLANTKEVPKKGLRTLILLIVWEIWKERNRRVFEHKETAAPYGKNKRGGKN

SEQ ID NO: 179735 - protein, 160 aa, Oryza sativa
  Clone ID: PAT_MRT4530_77168C.1.pep
RDSIKNKEHAEVEYAIVPIPVDDDDDIGKEVVTRLTTNMATNKIFYTDSNGRDFLERVRNHRDDWDLNLTQPVAGNYYPVNQGIYVADGKYELSVLVDHAVGASSIQDGQIEVMLHRRLSADDGRGVGEPLNEVVCVDQKCDGLVARATYYINVNKKGHG

SEQ ID NO: 179736 - protein, 109 aa, Oryza sativa
  Clone ID: PAT_MRT4530_77169C.1.pep
MAHGCIQLAARGRRSTPLLSLHPRLPVCPAAATSCASLRPPRESAAGCRAPGLSSSAASACAPGAVRFPATENGGDNMVEEEPVKEGRGHISSQSMVLGEFDGVQSNEG

SEQ ID NO: 179737 - protein, 146 aa, Oryza sativa
  Clone ID: PAT_MRT4530_7716C.1.pep
MTKVFLPLFQPLNFLLCDKHNTHSTCPSEHSETKARTELTHGDVAVVMAALGLSFNAEGNEVEDEALVLLEEKQASWEELEEAFSVFDGDGDGFISPLELQNVMRRLGLQHDAGHEECERMLKVFDRDGDGMINFDEFKVMMQGVV

SEQ ID NO: 179738 - protein, 295 aa, Oryza sativa
  Clone ID: PAT_MRT4530_77170C.1.pep
MEDLPDDLLLEVLRRLPPISLAASRVVCSAWRAAVDANRLLRADLLPLSVAGIVVNPLSLGSRFLCRPNAAATIADDLDDIRNTSRGIFNRFDFRVSDHCNGLFLVDDDVQHVVNPDTRQWAPLPGYPPPHPCYPHKLFSPTICLVFDPAVSPHFEVLVIPRLRSELRRPREWPPSPFVLRAFSSRTGGDQWEDRISLSNGTYRVIQSEPSMSLRYREKHPDLYLGKSEKGRDSYDDDDDHHESNRHAKHVTFLGFHPFDEEVVFLGETFRRGFAYNLNNSEIQDLGLYDIFLKQ

SEQ ID NO: 179739 - protein, 114 aa, Oryza sativa
  Clone ID: PAT_MRT4530_77171C.1.pep
MAAALRAGLRRCRPAASPPEFGGREAATTARLPIAAECREVRPAGGEERGHSNTTFVSNSSQDKIFAILLASIHSPTLFPTTHKMFAPFSQEYELKLGFKPATSLQPKSAYLVT

SEQ ID NO: 179740 - protein, 47 aa, Oryza sativa
  Clone ID: PAT_MRT4530_77172C.1.pep
MAGHVYGQINRSTRSDGRMPNYQGDTTTSARIVYGDNTPDVSEAPAP

SEQ ID NO: 179741 - protein, 70 aa, Oryza sativa
  Clone ID: PAT_MRT4530_77173C.1.pep
PLNNYQSHFCSALFFLGPFSFNCPPGGEFPKSPCPRLWLCFPPPPFFCSVLTAPVPKRCPISRLVGPPNF

SEQ ID NO: 179742 - protein, 559 aa, Oryza sativa
  Clone ID: PAT_MRT4530_77174C.1.pep
MVSLKLRAILFPFQMEPRREMLLQELGEMWDQIGEAEEDRREMLHALEEDCLNVYRVKVAQVKQYRAQLQREIADSVAEVAAICATIGEPSTTVHIACSSLQSTGNLKEELGSITPELEEMRRRREERRRKFSEVTELINRIEQEMKPSKQLHLTMDNSDLTIRRLEELRAYLQDLQLEKDSRVRKMTELMGSLHSSSLVLGMDFRETNLHHDDEGDISDDAIARLVSEIGRLREIKRNRMQKLQDLLATMLDLWNLMDTPSEEQKRFQSVACNIAASEDEITERDALSMEFINNVEAEVVRLERLKECRMKDLVLKKYDELNEIRRRAHVPVENEDDAMMMFDAIDSDAKRSLILERLEVQISEAKDEEFSRKDVLEKMEKWQAALEEESWLEEYNRNENRYNVGKGTHLVLKRAEKARALVSKMPAMAEALITKVIAWEKERGAKFEYDGDGLLDMLEEYNNTRKEKEQERKRQRDQRRMLGQGTGESPVVRPPPKNIKNVTRTLSMGGTSTGGKKASASVSSRPSTPSFLKSPMSARRSDEGQMLLSRAVEEDDLL

SEQ ID NO: 179743 - protein, 112 aa, Oryza sativa
  Clone ID: PAT_MRT4530_77175C.1.pep
IKVGPGAQRHKRVPRGPSSELFEYFVLGWAQSSKRYSRLDLEDGCQGGRCGGAVAARLAGRLRLRADEASSRLRDSLCVTCHMLYLMESGCVGGVMANHSKSASLPMAFFFY

SEQ ID NO: 179744 - protein, 58 aa, Oryza sativa
  Clone ID: PAT_MRT4530_77176C.1.pep
GTRRRRHARRWNARRWYARRHGRPTRRWWHDGLDDGRQEEVLDQPDLIFVTRAMSVVR

SEQ ID NO: 179745 - protein, 159 aa, Oryza sativa
  Clone ID: PAT_MRT4530_77177C.1.pep
MGLASERERETPAPPVFEQVNQGRRRRGRGASTSQQTTTRTRNNEWQIGNGWWPPGARSQKRRLPQTGGVAVVFADVVSPRDLDPPFPIPWATHVQTARTRPRSQPRVSFPSNQDTFSEISAAAAATTIFLRRKLVLELIQTMHHRTQTHPLLHFQHSR

SEQ ID NO: 179746 - protein, 160 aa, Oryza sativa
  unsure (1)..(160): unsure at all Xaa locations
  Clone ID: PAT_MRT4530_77178C.1.pep
MTAAVAPLSLPSGAGVACESARGREGSGVAATATGRGVGARAAVATSSCAAALARPPPSSAGYAAKTPRSGPTAWALEAAMKQQDIVTNGGGDGARAWCRRRLLLWKSSPWPEFGXGCVAACIDRQQGDREQRRLAAGSSSWTAKQGTRAAEQCTAAQPN

SEQ ID NO: 179747 - protein, 92 aa, Oryza sativa
  unsure (1)..(92): unsure at all Xaa locations
  Clone ID: PAT_MRT4530_77179C.1.pep
NQGRRRRGRGASTSQQTTTRTRNNEWQIGNGWWVGRWHCDCIPSSPRLQXFWPLQPPGARSQKRRLPQTGGVAVVFADVVSPRDLDPPFPIP

SEQ ID NO: 179748 - protein, 69 aa, Oryza sativa
  Clone ID: PAT_MRT4530_7717C.1.pep
LTVEGRQPPPPGWPRRATVIPAFQPLVVEEAGRPTTDAGFLQAHHCKLKVLPYHMSENIPILKMNAEQV

SEQ ID NO: 179749 - protein, 62 aa, Oryza sativa
  Clone ID: PAT_MRT4530_77180C.1.pep
LIETAGLSNRQSTAGLTDLTGQSDRRLVAGRHCTAGLTGGSQRSDRLCMAGLTGQTLWSDRH

SEQ ID NO: 179750 - protein, 409 aa, Oryza sativa
  Clone ID: PAT_MRT4530_77181C.1.pep
MSDFSSQTHPGERRETAPPPPPPPPCWTPAGHRAPLEASAMASPEPCAAAAAPGSGFGAVDGVLPPELLLEVLLRLPAKPICRLRAVCRSWLSFTTDRLFLAAYAAVHPHPLLAVLVDSFPSRCCVDLVDLSGNVVEEILGVGGECRVLTASYDRVLVAGEHHRVSVLDPATGSVSALPFGIAEDMVRRNGMRPAWFAFGQTNSTGEYKLLRILEDLEDGYEADPVCEVFAIGDMNGRWRKMESPPGYLDPSCTNGVVFEGAAYFFLDHWQMDPSYYFATGCIPSFDLATEQWSTALQGPVNRILEEANGTLNYADLTDRLMLAQLEGTLCTAHFNDQISAVDLWFLVDFENGMWSKEYRINVEFAFDGFGDGVQPLLVTDEGNVKWKKCQKKRSKTDVRTGVIAYWRI

SEQ ID NO: 179751 - protein, 108 aa, Oryza sativa
  Clone ID: PAT_MRT4530_77182C.1.pep
MAAAMVAAVHGVGRQDRSSPGGGGAPQVDTGKYVRYTPEQVEALERVYGECPKPSSLRRQQLIRECPILSNIEPKQIKVWFQNRRCREKQRKEASRLQTVNRKLTAMN

SEQ ID NO: 179752 - protein, 86 aa, Oryza sativa
  Clone ID: PAT_MRT4530_77183C.1.pep
FLRLKKRALYVGSYVDQGLQPLQTILPSNNRSTEETEYPVDAPLLVRAAAIQLHNLDPKMACEIVIRDHHDVRYLRCMSIRLLNFT

SEQ ID NO: 179753 - protein, 117 aa, Oryza sativa
  unsure (1)..(117): unsure at all Xaa locations
  Clone ID: PAT_MRT4530_77184C.1.pep
MYRYSCVTRLPERCVGLMFDYSVALCHLGGYRVLFNNVDVVSRLLNIIIWAYYXRDSRGGWLMVAAQYGYSSTLLYIPKKLSWGRYSSVFSPGWTAMTGCRKKLDNPWWSLETPEGH

SEQ ID NO: 179754 - protein, 112 aa, Oryza sativa
  Clone ID: PAT_MRT4530_77186C.1.pep
TPTETASTAGARRATATIDSLQHLYLTTRTPPKLQPNDPAIGCERKSRGEALGRRFDRAQDQEEGSISAHYRTERSPRRPPKTSDDNKEQSQCPGTSDIPRSTEAHRPMIPS

SEQ ID NO: 179755 - protein, 361 aa, Oryza sativa
  unsure (1)..(361): unsure at all Xaa locations
  Clone ID: PAT_MRT4530_77187C.1.pep
MGDRRMAPVASRIYRRHRHMGIAVDEFIAAADTLGGGGRLPQCAASTTQCRTKGGGRCRWATVTMKAPRITRLCVGCLRGLLLVVSVRGFVGAYEGGGDGAERGEGSRAWLAVSPARPQAWINRENVACPAHGVFVAMEAKAWGPGRGGRLRGGAHFGHVFLSRRWDPRRVKDERGRIENGHPRAPRRRYRQPEEEGXLHRPSLPDPCPPSLAELVGPRAARGHRRGGDPAVRWRWRRMDGDPTGRGGGEASFAVPRHPDPRQPEEEEEGRRSSSPANGRHHXAPDLLLASSPYGPPGVGVAARAVCAAVAVRSAAAVVRRAARRRSXGGLAXRCPGGGRGGAAAGEGGIRLAGGDREARV

SEQ ID NO: 179756 - protein, 76 aa, Oryza sativa
  unsure (1)..(76): unsure at all Xaa locations
  Clone ID: PAT_MRT4530_77188C.1.pep
GSRWHLCNDRSSCPRCSCSLCSGGSAPLLRGLPLVGREHRVRPXSERCLQLMVSVAVPWRRMQTTRRPSLLPLLLL

SEQ ID NO: 179757 - protein, 155 aa, Oryza sativa
  Clone ID: PAT_MRT4530_77189C.1.pep
MTSGRRHYLRNKIRLERKEPMTTVTWTSSTPPCRQQSGGPSNSCSSRFFGAVIYPSSSKAKSPFQLMPFGLRKPGGAGAWKRRGEGKKRAALFIGRRGEGSAGSASAAEERCCPRKERHVTVLVVGIASDGAAPGGVSAANLAGVRLPESGVEVP

SEQ ID NO: 179758 - protein, 119 aa, Oryza sativa
  unsure (1)..(119): unsure at all Xaa locations
  Clone ID: PAT_MRT4530_7718C.1.pep
GRGGSDVAGSGPIXPADMGWWRWRERXDSKIESQPSRARARAGKRGSGRGRRGRTRGHGRRGAGKAGAGGCEAAAVDGGWPEVGDRPKGHFYPPVAAFVHGSRPHRPAGSTTVPIFPCR

SEQ ID NO: 179759 - protein, 183 aa, Oryza sativa
  unsure (1)..(183): unsure at all Xaa locations
  Clone ID: PAT_MRT4530_77190C.1.pep
MAKRRSNGETAAASSDDCSAGVCGGGGGGEVEPRRRQKRPRRSAPRDCPSQRSSAFRGVTRCAPVDGRFEAHLWDKNTWNESQSKKGRQGAYDGEEAAARAYDLAALKYWGHDTVLNFPLSTYDEELKEMEGQSREEYIGSLRXKSSGFSRGVSKYRGVARHHHNGKWEARIGRVFGNKYLYL

SEQ ID NO: 179760 - protein, 110 aa, Oryza sativa
  unsure (1)..(110): unsure at all Xaa locations
  Clone ID: PAT_MRT4530_77191C.1.pep
MGPPAAEWERKDGRKGDRTTWRPGEGMSKGRRWMGREGWAGXGRGGGGGEGRGSDEEGEEVEGMDRDEEGSRGGGRERGFDLDPSSDDTHRRQRATSAGAPASGRRGRAR

SEQ ID NO: 179761 - protein, 242 aa, Oryza sativa
  Clone ID: PAT_MRT4530_77192C.1.pep
MACTSYYLPDRHEVETEKGDHGCQQNKAKDEHRHGSDASIVPSSWPPCHYRQLCLQDLEEKVQRMEGSGGLRRLNPLVPGVGVWMVQVPLIYLLSLLQLVLYLCSFGQALPPIGSALTVNGNFDLEQPLSVPGSEVGGHIFEINGYRFQKGIGVGKFVRSNIFTVGGFDWAASILMEFGGDKIEMIRHLLVAADRYAMDRLKLICQHILGKSLHVDNVATTLALANVHVTTTHLIFPRQTPQ

SEQ ID NO: 179762 - protein, 134 aa, Oryza sativa
  Clone ID: PAT_MRT4530_77193C.1.pep
MGLKSNCCFSVIMYSSPVNALIILENNAQDIVVVLATVDVKQLSGLKFLEAARMKHQDLQVIMMSAETTRLYTMMRCVKLAARFLVKKPPNEDIVHDLWQHIALKVLMMEKIRALLQGCTIYVNGSVCVLLSAK

SEQ ID NO: 179763 - protein, 84 aa, Oryza sativa
  Clone ID: PAT_MRT4530_77194C.1.pep
SSSPNTEIDLRWMGWDVGVGSQGLQLEAQESLVGSFTLTPSSPTTSSVLRRRCLLRHRMDHLVGAIKKDARDVNPPLPRPAAVS

SEQ ID NO: 179764 - protein, 96 aa, Oryza sativa
  Clone ID: PAT_MRT4530_77195C.1.pep
MKHADPKLDTHTSPPSRACDAGRKVERCVVEVVASSLRGFAPELFGHAGQSSPTTPPPIRRQPKLADRVDRSSPVGHAAPRGERGEVVVATRIRRP

SEQ ID NO: 179765 - protein, 208 aa, Oryza sativa
  unsure (1)..(208): unsure at all Xaa locations
  Clone ID: PAT_MRT4530_77196C.1.pep
SKIGHTYFTSIEGVRRREKGGTLRCRGRRLGDGRENERSSGKKAAQRERRGAYRRPRSTTVGIHRVGAEATPPRPSLVAXSLSAPTRARWLRLPPPDPCSPELFGHAGQSSPTTPPPNPXQPKLADRVDRSSPVGHAAPRGERGEVVVATRIRRPRKRRREKKGRRMQEEKRVEASGSFSRSLATQVGPSPDRWPQSRNRGTRLVVGR

SEQ ID NO: 179766 - protein, 101 aa, Oryza sativa
  Clone ID: PAT_MRT4530_77197C.1.pep
LKSRPPFFFFFFSFFIYFPFIIWGSFSFGFFSPHPQNTFTLPYMSGKHPHNLFVQIPKTPFPPKDFHLSYRLIPPPFKKQNPHFNQRKILKGAYFFQTPGP

SEQ ID NO: 179767 - protein, 205 aa, Oryza sativa
  unsure (1)..(205): unsure at all Xaa locations
  Clone ID: PAT_MRT4530_77198C.1.pep
PAAPIRAALLLLSSLNPRHHSCFSSSASHRIRPLGGRGRQIQPPRAAAAPLLPCVTPDPATTCSSSSSSGLLPAAAPRQQLLLWSSSSSSAKDQISWHALDTLEASLGLALELRRSPRPPCFHMNSMPRIEGLMVWRVPTLELSRSIEEVKASTRWTCVMDKLYCFVGLIYPIIIRSFLLSIGGXFGIMLHIHISLHVQVHNXIH

SEQ ID NO: 179768 - protein, 92 aa, Oryza sativa
  Clone ID: PAT_MRT4530_77199C.1.pep
DYGITIVICGTDVLMFETDEEDLQDDSRKATAQERSSPSKAWNCQDYMTRSGPHDMVLSLEERMNAQATRYAHRTNNQMAMEAMVLKLPYMG

SEQ ID NO: 179769 - protein, 1589 aa, Oryza sativa
  unsure (1)..(1589): unsure at all Xaa locations
  Clone ID: PAT_MRT4530_7719C.1.pep
MTPNAPHSLCSYAVSSGSSNLSLAASALSPMSTHAETNPQMTASPPRSRTPPTWSDPRTSVPQYPLHPVYGYPPSTVACPVGGLGAQGSTTISSSFVDNSVNTNLNQGVPASTMLVRTQVGEIVFPVYTTVPILAGPSMTGSENAVATTQDNSMSKDPPAEAENGTSTTFEPEKDPSAAKPCLSDKNHEPTRMTSEVTRSWCPIHKTKKHTLQACWVFLNVHAEIRAYKERGIQRTSPTRDVYCPIHKTKNHDLSSCKVFLSAMKTSPPKVQQSRIPLRDEDKEQGATLISDRFVXVIDIDPHEPSVLHLLEDYGSSSTSTPREIDIHEGRMIADNPXTPSAGCRAFSRSLRDVRWPKRFRPGAIEKYDGSTDPEEFLQVYSTVLYTAGAGDNALANYLPTALKGSAHSWLMHLPPYSISSWADLWQQFVANFQGIYKRHAIEDDLHALTQNPGESLRDYVRRFNECRNTIPKITNASLIRAFKSGNDKPKTGGEKKPAKDAPDSSKKKNHKSGKRKAQAEVLATEYADRPKRPDPQGSDTKKTWCPIHKSDRHSLEDCLVFKKSLAKHMALEKGKRVRVVEKDAEAATQESDSAYPDCDFHVSHIFGCSTAYSSKREYKKVEREVCSTWQGAAPKMKWSEQKIEFSEEDHPKTAVIPGTLDTMVIPRSELTPTDQPFHGITPQSSSKPLGKITLLVTFGQSNNFRTEQITFDVAEFDTTYNAIIGRTALGKFMAASHYAYQVLKMPGPKGTITIQGNAKLAVQCDKRSLDMVEHTPSPPATAEPPKKPSDMPGVPREVIEHKLMVRPDAKPPVKQKLWRFAPDRKQAIREELDKLLKAGFIREVLYPEWLAKPVMVRKANGKWRMCVDFTDLNKACPKDHFPLPRIDQLVDSTAGCESLSFLDAYSGYHQISMAKEDKEKTAFITPFGVFCYVKMPFGLITAGNTFQRTVQGALSDQLGNNVEAYVDDIVVKTKTSDSLIDDLRETFEDLRRYRLMLNPEKCTFGVPSGKLLGFLVSGRGIEANPKTIKAIENMKSPTRLKEVQKLTGCMAALSRSDNQIDNETWTMAFDGALNSQGAGAGFILTSPSGDQFKHAIHLNFRATNNTAEYEGLLAGIRAAAALGVRRLVVKGDSELVANQVHKDYKCSSPELSKYLAEVRKLEKRFDGIEVRHLYRNDNIEPDDIARRSEELPEDNAEAEKITRKAKIYCMIGNDLYKKASNGVLLKCVSSDDGRHLLLDIHEGICGSHAAGRTLVGKAFRQGFFWPTTLKDACDMVQRCEAYQFHSKHTKLPAQALQTIPLTWPFSCWGLDILGPFPRGQGGYRFLFMAIDKITKWIEATPTGEIKADNAIKFIKGIFCRFGLPHRIITDNSSQFISADFQDYCIRLGVKICFASVSYPQSNGQVERTNGIVLQGIKTRVYDRLMSHDKKWVEELPSVLWAVRTTLTTSNKETPFFLMYGSEAMLPTELRHQSTRVQKYSDEDQEEQRNDNVNLLEEHRERVAVRAVSYQQALRRYHEKRIRARTLLIGDYVLRRVQSQAGRNKLSPKWEGPYTITQVLQPGAFKIADGDGRELANSWNIDQLRKFNV

SEQ ID NO: 179770 - protein, 166 aa, Oryza sativa
  unsure (1)..(166): unsure at all Xaa locations
  Clone ID: PAT_MRT4530_771C.1.pep
ILTRFAIAPPSTSRTSTTTTSIVGGVPRWLDALPNLTVLRLSHNSLSGHIPPSLANLTKIVQLEFDQNLLESSIPDGLSRLLALRMLALSXNSLIGEIPPSFFNMTSLRGLALANNVFHSELPADRRGRARTSTFLPSSPGSIPNPSNNQKNPPNLDISSDSHTDL

SEQ ID NO: 179771 - protein, 281 aa, Oryza sativa
  Clone ID: PAT_MRT4530_77200C.1.pep
MAFLLPKLTTPSCKSPPSPLKSQLGLPGGGKLQPAQAVAPSHLNLLLLLGASQQEAAAVPTPKSRSKNGGGRSGGGGGEDPRRSDYYLNLGTAVRTLRDDLPAVFVREPNYDIYREDITFVDPLNTFHGIDNYKTIFWALRFHGRLLFREIGLDISRIWQLTENSIVVRWELWGTPRVPWESYGCFSGTSRYKVDRNGKIYEHKVDNLALDFPRPAAKVGSIADIVVASCPPSPNLTFWDMVGSTGDGCSWANLYQAVVETVEREGNDPAGIAIEGLLTCS

SEQ ID NO: 179772 - protein, 57 aa, Oryza sativa
  Clone ID: PAT_MRT4530_77201C.1.pep
MAFGCTKDIDRRGAPPFASCQVGKVRRSSGQVGSEQVAARGRRISRYTDIPCSRGSL

SEQ ID NO: 179773 - protein, 65 aa, Oryza sativa
  Clone ID: PAT_MRT4530_77202C.1.pep
LPLTLTLSACVSSASSCTVETMQAGSCSILSRIHTWVGYLASLESGPKVWVSCFACLLAGEMGDD

SEQ ID NO: 179774 - protein, 215 aa, Oryza sativa
  Clone ID: PAT_MRT4530_77203C.1.pep
MASPFPRLASPSHHESSSFMSTLVARSLRLHVHQLELEKTNLLLRGTLYPLQECKIVNNLCATYSTSMDMRARDLTRKRREEDDDDMMLFIFPALHLLSSSGARNKEEKEPKKQKKSVGVEGLMERYLDMRTKQAEDEAAQLAREREAHLAKEKENNDFSIKKCISILNSMVVVTKQEKANAYTVFKNAENREIFVSTCQEDAESALIWLRSEMA

SEQ ID NO: 179775 - protein, 83 aa, Oryza sativa
  Clone ID: PAT_MRT4530_77204C.1.pep
KREVASEGGGRPGESSESSLPSPSSSSSEPLLPEYHEPSLPRSCDNDNCLWPDDDPRAPPPFPDAMSPASPAATMTAFGPTTT

SEQ ID NO: 179776 - protein, 95 aa, Oryza sativa
  Clone ID: PAT_MRT4530_77205C.1.pep
RTRGYFSTFSFFLGGVVPYSLSFHNISYSSISHIHIDVNESTHIYLFRFINININVKNAKMTYIVKRRKLHENSASNIDGAPVTIHFRVIFSVRN

SEQ ID NO: 179777 - protein, 89 aa, Oryza sativa
  Clone ID: PAT_MRT4530_77206C.1.pep
WTFSFHPLFVLLFSALTTRHPSCWLVLLYSALTPGLLIFPAVIYQSVCASFGLFLHILLSIVCAKASMLFKHARANCKPAFAHHELYIC

SEQ ID NO: 179778 - protein, 695 aa, Oryza sativa
  Clone ID: PAT_MRT4530_77207C.1.pep
MAAATAAMAAATPPRGRQQRRGEEGEGEDAVVELTPRRTRLPRACNSRPKVPPPPPPPPRQERARPPAGAAAGEEEETTPKCRVVTPLVAEPEAPAELPRWRLRGMWELASVINFLHVFRPLLNITVEFTAEELEEAILSPNNTLDDVHMPLLKSIPPVTRMAMGRGTWITVLCRKLKYWWNWVAEGDLPIVASHGAEIEMYKALEPATRLVILKAICDIRVEQEDIRNFIDSSLKRGYELPVFRKERIGGDSYGISYWSISNQLMCYRYDEDPVLGHRLYREIRQVEYEKDPTKKAKGKGISNAPVVSYQWETVACNFIEFELAAEKLFSSRNRTEVSLGKKLKNNYLPEMEKIHKKKERLLKKQQREALLLDNRLTVNGFTSVRSRRERKRVTYTFDDYERSINEAIKPTKKSENSSEFITTSNRRVHPKRETATNGRLAGPSPLCNGFYGEYPLRSHGYQGSEWEKKPETLDRRQRKRSRRYTQDFVEAISDVDPNFDSDDDIIGEAVYDEEYLRSRKQYKARLLELDKEFQLEQVADDGNDEVEYPSSTSEDEKEPQRYKRLATCNPRGTNLRTIDGFQTCITRSKRSTRPHMKYHQYDLSGTDTELGKPGKIKVPDPDAGSDALNDMELSTTSQDQEEEGAEVNKERPPLLSPSRNNGSDGRRFLDLNEVAPVGGFDETQSRNGERRPPG

SEQ ID NO: 179779 - protein, 219 aa, Oryza sativa
  Clone ID: PAT_MRT4530_77208C.1.pep
MACISKCTAPSVPFWCGLSRPSTASSLVPTGHPLRKRRRRCRRRFRRAAIAPTPPTSRHRAAVDSRLQIDAIDAPSRLHIDATGDSRLSTLTLTPIVTESRLHIDVADAPTSTLTPPKPPHNADRCHALLIPGPSRRHRDCSPTRPLLYRDAAADSLVPSALLCASTLALSTAMRTRLKFLWDGATSNFMETSSIAAPWRHHSLPLDHRRPASIGGTDT

SEQ ID NO: 179780 - protein, 381 aa, Oryza sativa
  Clone ID: PAT_MRT4530_77209C.1.pep
MGCFGCFSPEVDDDLKPSKPNYHSSDESSGADARRKVAPLATDGGNGYAHSFTFKDLSVATGYFNEANFIGEGGFGKVYKGKINGQMVAVKQLTRDGVQGRNEFLVEVLMLTVLNHPHLVSLVGFCAQGDERLLVYEYMPFGSLESHLFDVPLGKQPLDWNTRMRIAVGVAEGLSYLHNVADPPIIYRDMKAANILLDEDYRPKLSDFGLAKVGPVGDRTHVSTRVMGTYGYCAPDYVVSGKLTMKSDIYSFGVLLLELITGRRIYDASRPKPEQSLLTWSRPFLHDKRKFYRLADPALHGCYPTSALNQLVVISIMCLQDQPHVRPIISDVVIGLNHVASQPYVPERSSVSLSSPARCGSPQYAGTPSRRRGGRRVAQYA

SEQ ID NO: 179781 - protein, 393 aa, Oryza sativa
  unsure (1)..(393): unsure at all Xaa locations
  Clone ID: PAT_MRT4530_7720C.1.pep
RGWLRFCDGFSKIFTPASQLASLLPSLRWRIHHATRRGNDNDERARRRQTGTTETNGEGTASAAILGRRRDAAGTRLDDAEPRTKTRTGRKRREDDDGDDRGRRGGDEDSRQRLHGDEDDVEHAAAMTMTEAAPRDDEPXARGNGEDDDGHRRCSVGGEARPRTTSQLRCRRXWGYGDVGRRSGAATGAAGGDVDEEEGEAXARATVFRRCSGEEEVMPGMRAASWSRGRWWRRRPALRGRGRGGRRRNRGGNTTXAGEDASPVLYPRNGGLTEGEGAAARPREKTARPGGARARRGRRLEVAGAKEGGGRRRERSSGGLLAKRRAGRRGGGGGDARGGSGXLKRENARRGLHFIGWGREPGTGEGGTATGMAAGGNGGRPRKTRAFPAIGGA

SEQ ID NO: 179782 - protein, 686 aa, Oryza sativa
  Clone ID: PAT_MRT4530_77210C.1.pep
MRHLAVVLLLLLLLAALAASQEFTYSGFRNGGGGGGAGNSPNLTLNGVTELRPDGILRLTNETSRLIGHAFYPSPLRLLAGGAAVSFSTEFAFAVVPEYPKLGGHGLAFVVAPDPRLPGALPSQYLGLLSAADVGNATNHVLAVEFDTVQDFEFGDINDNHVGVDLNSLVSNASASAAPVNLKSGDTIVAWVDYDGGAKLLNVSIAAASASKPASPLISFHVDLSPIFLDQMFVGFSASTGLLASSHYLMGWSFKLGGGAAPPLDVPSLPSLPRPAAGGKNRTSAILAAAFSAFVALVALAGAAAYAAHRYKNRDVVEPWELDYGPHRYSYAELRRATRGFRDRELLGAGGFGKVYRGVLPGKPPRTVVAVKRVSHESRQGLREFVAEIASIGRLRHRNLVQLQGWCRRRGDLLLVYDYMPNGSLDKHLFGDGLAAARLTWGARVKVLRDVAAALLYLHEGWERVVLHRDVKASNVLLDGDMSGRLGDFGLAKLHEHGANPSTTRVVGTLGYLAPELTRTGKATAAADVFAFGALALEVVAGRRPIEPRAPPEELVLAEWAWERYAAGEVGAVVDARLRGEFDAGEAEAAVKVALWCSHPAPAVRPTMREVARYLDAGGAAEVPEPPPPPPPPPVSSGEVGYYDFVHSYPTSSYERAAAAADGVTQTSVATFPYSPLSMRSSHVSV

SEQ ID NO: 179783 - protein, 657 aa, Oryza sativa
  Clone ID: PAT_MRT4530_77211C.1.pep
MNRFADLTNGEFRATYLGTTPAGRGRRVGEAYRHDGVEALPDSVDWRDKGAVVAPVKNQGQCGSCWAFSAVAAVEGINKIVTGELVSLSEQELVECARNGQNSGCNGGIMDDAFAFIARNGGLDTEEDYPYTAMDGKCNLAKRSRKVVSIDGFEDVPENDELSLQKAVAHQPVSVAIDAGGREFQLYDSGVFTGRCGTNLDHGVVAVGYGTDAATGAAYWTVRNSWGPDWGENGYIRMERNVTARTGKCGIAMMASYPIKKGPNPKPSPPSPAPSPPQQCDRYSKCPAGTTCCCNYGIRNHCIVWGCCPVEGATCCKDHSTCCPKEYPVCNAKARTCSKSVYRMAAAARPVDVVRHFPCSSSVAASSSLLLSRSKSRLASPAAAAASSMRRRLVLGVGAAAAPAVAALAASATPAALRDCAATLLITAGAYSLVRAFDGLTARRLIEQNLSRKIVHVLSGVLFMSSWPLFSNSTEARFFAAIVPLLNCIRLLTYGLRLSTDEALVKSVTREGKPEELLRGPLYYVIVLLVSVLVFWRQSPIGIVSLSMMSGGDGFADIVGRRYGSAKLPFNENKSWIGSISMFISGFLLSALMLFYFSCLGYFTVCWDLALGKLALVALAATVVECIPVNDVVDDNISVPLATMLAAYLLFGYSSCC

SEQ ID NO: 179784 - protein, 803 aa, Oryza sativa
  Clone ID: PAT_MRT4530_77212C.1.pep
MAGGGGKSVAAALAMACFLLILAAFAPPAAAAPPDIMSIIRYNAEHGVRGLERTEAEARAAYDLWLARHRRGGGGGSRNGFIGEHERRFRVFWDNLKFVDAHNARADERGGFRLGMNRFADLTNGEFRATYLGTTPAGRGRRVGEAYRHDGVEALPDSVDWRDKGAVVAPVKNQGQCGSCWAFSAVAAVEGINKIVTGELVSLSEQELVECARNGQNSGCNGGIMDDAFAFIARNGGLDTEEDYPYTAMDGKCNLAKRSRKVVSIDGFEDVPENDELSLQKAVAHQPVSVAIDAGGREFQLYDSGVFTGRCGTNLDHGVVAVGYGTDAATGAAYWTVRNSWGPDWGENGYIRMERNVTARTGKCGIAMMASYPIKKGPNPKPSPPSPAPSPPQQCDRYSKCPAGTTCCCNYGIRNHCIVWGCCPVEGATCCKDHSTCCPKEYPVCNAKARTCSKSKNSPYNVEALIRTPAAMARSVPEQPDSISFSVYRMAAAARPVDVVRHFPCSSSVAASSSLLLSRSKSRLASPAAAAASSMRRRLVLGVGAAAAPAVAALAASATPAALRDCAATLLITAGAYSLVRAFDGLTARRLIEQNLSRKIVHVLSGVLFMSSWPLFSNSTEARFFAAIVPLLNCIRLLTYGLRLSTDEALVKSVTREGKPEELLRGPLYYVIVLLVSVLVFWRQSPIGIVSLSMMSGGDGFADIVGRRYGSAKLPFNENKSWIGSISMFISGFLLSALMLFYFSCLGYFTVCWDLALGKLALVALAATVVECIPVNDVVDDNISVPLATMLAAYLLFGYSSCC

SEQ ID NO: 179785 - protein, 120 aa, Oryza sativa
  unsure (1)..(120): unsure at all Xaa locations
  Clone ID: PAT_MRT4530_77213C.1.pep
MAPPYETSAAGSESPVPVVTVDVAAASDLITSAGHRYVDVRTEEEMNKGHLHNSLNVPFMFVTPQGKEXKNPLFVEQFSSLVSKEEHVVVGFKNVKNMGGGYAAWLDNGFPINTPPHTMY

SEQ ID NO: 179786 - protein, 119 aa, Oryza sativa
  unsure (1)..(119): unsure at all Xaa locations
  Clone ID: PAT_MRT4530_77214C.1.pep
SHHRPRPLPRHSHRHHRPRHRGRGHRRQLHRRPPAIGAAGATTPSIRLDLGEGEGGEGRGGEKPPDPAASSSSAPPLPAXPSPPRRPLPLPPARSRRGRGKGGEGMGGAARSGSVVVSS

SEQ ID NO: 179787 - protein, 137 aa, Oryza sativa
  Clone ID: PAT_MRT4530_77215C.1.pep
MAPPYETSAAGSESPVPVVTVDVAAASDLITSAGHRYVDVRTEEEMNKGHLHNSLNVPFMFVTPQGREKNPLFVEQFSSLVSKEEHVVVGCQSGKRSELACVDLLEAGFKNVKNMGGGYAAWLDNGFPINTPPHTMY

SEQ ID NO: 179788 - protein, 53 aa, Oryza sativa
  Clone ID: PAT_MRT4530_77216C.1.pep
FIFLKNCKFNYFSLVFINFLNECKNPYLLAISFTNNNGTQKRENPRPRAAFTI

SEQ ID NO: 179789 - protein, 95 aa, Oryza sativa
  Clone ID: PAT_MRT4530_77217C.1.pep
MGGRLRGWLRAAGGRRAGEEPMPTVLDEVAAVELEDAGHGGLPLPGALPGLLVIRVKLLHREHMFRRGGARLGRGRRTPRARARASRRPCGAEEP

SEQ ID NO: 179790 - protein, 52 aa, Oryza sativa
  Clone ID: PAT_MRT4530_77218C.1.pep
MLYIHSNMAIYDPDVLKATRLLRGRTLEATERPSLTCVAENGTSIPANASYD

SEQ ID NO: 179791 - protein, 73 aa, Oryza sativa
  Clone ID: PAT_MRT4530_77219C.1.pep
GAVRAVLTVAPGGLGEMRATERRGTGAIGGTGLPDHEAAGRGPKSAGADLGGGESHPQRWPCRGSPPEAERGG

SEQ ID NO: 179792 - protein, 741 aa, Oryza sativa
  Clone ID: PAT_MRT4530_7721C.1.pep
MAEQGKAHDLSPSVSGDDGEPNPRRRARTPPPPPRQSPKQGEALERVDKSVASPVAGDAGERRDGERRLLVYGDGSTPQGALQAAGALLRHPPVVHDPESPAQRWLEDVANLVMTAQQRLGAGGRSATTKTSGAATTGSVSSRRRARRAAAAARHSAATPSSAPSTREDQHGEPDARLNIERRRNSRRTPRAMEGASSSRVSPRHGREDQPSVPPAGGVGCRAFVASLRNVRWPPRFRPTITEKYDGSVNPTEFLQVYTTGIEAAGGDDRVMANFFPMALKGQARGWLMNLPPASVHSWEDLCQQFTMNFQGTYPRPGEEADLHAVQRGDDESLRSYIQRFCQVRNTIPCIPAHALIYAFRGGVRHNRMLEKIASKEPQTTAELFQLADRVARKEEAWTWNPSGSGVAASAAPGSAAQTGRRDRRRKKSLYKKGARRPRKKKEKAIQDWRGPGGSLRRARVTSLVVAVVRTTVAALLVGVEGEREPRGHTLEAVDDVVGGVPDLRACAVLGSGRELFQRYPRGEVRVREAPKPNGGPRPPTAGVGPPPACPTVSGAPDPQDSLGATAGRPRLSPSYPEDIGAEAEGAPRCLSDEERPGDTAPSEEDRPRRKVQRPVYFVSEALRDAKTRYPRAQKMLYAILMAPRKAPLPYLQARQIGSPRFVRLSGDVAVLKRPPIIDRQITITGVHGLRPLGFCPTMETGPTCHQALGVASHLTASLGKGNCSGITPGATVGDMGPGVS

SEQ ID NO: 179793 - protein, 344 aa, Oryza sativa
  Clone ID: PAT_MRT4530_77220C.1.pep
MEAGAGSSSAKLVAACVIGGIVLGASVVALHLAGPVAIPALPPVDALRRRFRRGRRRPVRVYMDGCFDMMHYGHCNALRQARALGDELIVGVVSDHEITANKGPPVTPLHERLIMVRAVKWVHDVIPDAPYAITEDFMNKLFNEYNIDYIIHGDDPCLLPDGTDAYALAKKGPGPDSRIVYIDGAFDLFHAGHVEILRLARELGDFLLVGIHTDQTISSPRGPHRPIMNLHERSLSVLACRYVDEVIIGAPWDVSKDMITTFNISLVVHGTIAENMDFMKDDLNPYAVPRAMGIYRRLESPLDITTSTIIRRIVANHEAYQKRNEKKEASEKKYYDSKSFVNGE

SEQ ID NO: 179794 - protein, 106 aa, Oryza sativa
  Clone ID: PAT_MRT4530_77221C.1.pep
MGSLNGQGKYQESWTVTRNPSRFTQKLSKRASRASRRRRGDQVGQLRSTQTTSKRKAASRKGQREQRVNARLQEERRKADLVWYKADERLYCSLTAPPPSSCEEDG

SEQ ID NO: 179795 - protein, 57 aa, Oryza sativa
  Clone ID: PAT_MRT4530_77222C.1.pep
MPLVFVSYDAIVVDCYGFRRKAVELPLFDRRAVELPLFDRISVELAQFDRVAFSIYL

SEQ ID NO: 179796 - protein, 114 aa, Oryza sativa
  unsure (1)..(114): unsure at all Xaa locations
  Clone ID: PAT_MRT4530_77223C.1.pep
LGSSSRSYFGPHGCNLQRRAPAWPLVTSSRRGMAIDSGGXASGDELRRGTAHGQRRTWPPXETSPGWHVVAKDVVAGDELXHGAWTTKVAAAGDDLRREAWTTEDAAACDDLQH

SEQ ID NO: 179797 - protein, 522 aa, Oryza sativa
  Clone ID: PAT_MRT4530_77224C.1.pep
MARMSLRPRGRRPREACGDDRLSALPDDLLLLVLRRLDTRAALATGMLSRRWTNLPHELDALDFRVSDILPPRYHRCILRHRGVMNWIAYRHAIPNSLMPAIRRHERRAARALVRSVESFIDADDGRPSRRKVSRLRLEFFGTHNTAGINRLISKAIDDWGVEELEAVGKPMYWRQPPTHEFPSHGLCKDPRASRLRTLTLGGCVLPPLHEYGGVTKLVLHGMAASTPAEAYEGVFTSCPQLQVLHLESCFLDRRKSLVVDAPISEIRELVVDACDIISVKLRSLPRLQNLASMGTQVLFDRRTSSSSFPCLRQWHLACLYGLARKFSRWLEPDLTLDRFFHYTLDITDLIVRFTGPERWIVPSSCSPSPPLLRSLRRLLVADVPSSWDASWPRILLDAAPSLKTLHIHIAPRDAKKPTGGEFSWHHPTVPLHNYRLEEFAMAGFGGTVSQVYFVKLVVGACTALRHVSIFKGGDLKYKGNWDWEMPRLQENSWNDKEKETMEKQIMDAVSCSTDHLQIVLG

SEQ ID NO: 179798 - protein, 50 aa, Oryza sativa
  unsure (1)..(50): unsure at all Xaa locations
  Clone ID: PAT_MRT4530_77225C.1.pep
PHDTHLMNELKEMFNIKDLTQRWKVAFTDHEGDTXMQVLDAPRLGLCQMG

SEQ ID NO: 179799 - protein, 36 aa, Oryza sativa
  Clone ID: PAT_MRT4530_77226C.1.pep
SSSPVTTTPPATSRNRPPKRAAPLSLLNRLLRQYFL

SEQ ID NO: 179800 - protein, 95 aa, Oryza sativa
  unsure (1)..(95): unsure at all Xaa locations
  Clone ID: PAT_MRT4530_77227C.1.pep
VETLPDLKPLSSPKLSGKRHRRTFTSSQSCWVPCTRXVLEHPSTVLCRRREASAWRRRXWHGFAPPSGAPPXSRQSRSRSAVVAARAHQLAGPPS

SEQ ID NO: 179801 - protein, 100 aa, Oryza sativa
  Clone ID: PAT_MRT4530_77228C.1.pep
MWFHMSASSSLSPLSLSLTLKEKDERRRAVDVAPGRGRYRRHGRGGVGAVADGGGGGDVRRRRSGSATWTTEEEVEEMALMGAAAAAAAGETLMRRPTNW

SEQ ID NO: 179802 - protein, 277 aa, Oryza sativa
  unsure (1)..(277): unsure at all Xaa locations
  Clone ID: PAT_MRT4530_77229C.1.pep
MARPTPPAPLVALPRPLPHNARCTTAPPHGCHGTDMVPPSTTLPHTQAAALTRCRNSDLKPQSSPELSRKRHRRTFTSSQSCRVPVXRSRLLGARRRLHAHLAGPPTSWHGFASPSRRSRSRSAVVAARAHQLAXTTVIPLARRRREMGSXERDLGARVLPLSPXRCFIRRGDDWSRPLDRTAXIRPASGRRRHXLCYAQWAAEVHRTXPRICRSRXLLSLWAVELTQLAKDGQAQVWAGLGRLGPKVFKVSHHQTVFFPLQHTGTIASKNKNKIQN

SEQ ID NO: 179803 - protein, 62 aa, Oryza sativa
  unsure (1)..(62): unsure at all Xaa locations
  Clone ID: PAT_MRT4530_7722C.1.pep
LGRWLNLGTXCDAIWAKNSDSSSGLCESSSVHYLSPFPFQFSKLIGYXRTWDGVHHHISKLI

SEQ ID NO: 179804 - protein, 254 aa, Oryza sativa
  unsure (1)..(254): unsure at all Xaa locations
  Clone ID: PAT_MRT4530_77230C.1.pep
KGSGYLPDLKPLSSXPELSGKRHRRTFTSSQSCRVPCARAVLEHPSTVLCRRREASAWRRPXPPTRSRSLSARPHLHAHLVGPPTSWHGFAPPSDAPPSRRSRSRSAVVAARAHQLAXTIVVPLARRRREMGSRERDLGARVLPLSPXWHFIRRRDDWSRPLDWTAQIRLASGRRRHXITLRQWAAEVHRTAPAYVGCTQLLSLRTVELTQLAEDGPAQVWAGLGRPRPKVFKVSHYQTVFFPLQRAGAIASLN

SEQ ID NO: 179805 - protein, 255 aa, Oryza sativa
  unsure (1)..(255): unsure at all Xaa locations
  Clone ID: PAT_MRT4530_77231C.1.pep
KGSGYLPDLKPLSSPKLSGKRHRRTFTSSQSCWVPCTRXVLEHPSTVLCRRREASAWRRXPPTRSRPLGARHRLHAHLAGPPTSWHGFAPPSGAPPXSRQSRSRSAVVAARAHQLAXTTVIPLARRRREMGSRERDLGARVLPLSPXRRFIRREDDWSHPLDRTTQIRPASGRHRRXLRCAQWAAEVHRTVPVYVGRAQLLSLRAVELTQLAEDAPAQVWAGLGRPRPKVFKVSHYQTVFFPLQRTGTIASITND

SEQ ID NO: 179806 - protein, 34 aa, Oryza sativa
  Clone ID: PAT_MRT4530_77232C.1.pep
MHPHKKSSTNPFSPPLFPFIKILTLKFFPLKHQV

SEQ ID NO: 179807 - protein, 292 aa, Oryza sativa
  unsure (1)..(292): unsure at all Xaa locations
  Clone ID: PAT_MRT4530_77233C.1.pep
PSVLFEKISISSLSLLLKNFVSNVDRPSYLKKSLSLPKGSGYLPDLKPLSSPELFRKRHHRTFTSSQSCRVPCTRTVLEHPSTILCRRREASAWRRSXPPTRSKPLGARRRLHAHLAGPPTSWHGFAPPSGAXPSQRSRSRSAVVTARAHQLAXTAVVPLARRRREMGSGERDLGARVLPLSPXRRFIRRGDDWSRPLDRTAQIRPATGRRCRXLRCAQWAAEVHRTXPRICGPHXLLSLRAVELTQLAKDGPAQVWTGLGRPRPKVFKVSHYQTVFFPLQRTGTIASYEKN

SEQ ID NO: 179808 - protein, 191 aa, Oryza sativa
  Clone ID: PAT_MRT4530_77234C.1.pep
MFSINMLEGITCKFENLREASLNIDFGQLSSVLSIDSLLKFAPHIEHLEIQTLDTELDKEKIDEDSLNSEISSDLFASLKHVSLTGAKHRENQMCFMKFLLSKAGSLQTFAVTFMFDDDGKSEWFENKCKELIECQKASPQLLLTAKVTQDGSCQGAILDQLTGHLKVQILMYESKGFVQMICARLAPMYI

SEQ ID NO: 179809 - protein, 82 aa, Oryza sativa
  Clone ID: PAT_MRT4530_77235C.1.pep
ASTVEDKKKVIAEVEATVSSLVGAAKANADVYAKAMARIVEKGTEYVATEVARLEKILAGGSVSGDRADSMKIRMNVLKTFN

SEQ ID NO: 179810 - protein, 79 aa, Oryza sativa
  Clone ID: PAT_MRT4530_77236C.1.pep
TVAADGFADWLAKQLGNDLAARKGRSLQLWDYMLVKYISMEFAIHGIGYLLYLCISKDYCVEALRQYYQMNTSSPVLVC

SEQ ID NO: 179811 - protein, 619 aa, Oryza sativa
  unsure (1)..(619): unsure at all Xaa locations
  Clone ID: PAT_MRT4530_77237C.1.pep
TGALRGLSPRAAAAGGVGVAVGLGGGGAQSLYVGDLEASVTDSQLYELFSQAGQXARALELLNFAPLNGKPIRVMYSNRDPSSRRSGSANIFIKNLDKAIDHKTLHDTFSAFGNILSCKVATDEMGQSKGFGFVQYDKGEAAQSAIKSLNGMLINDKPVYVGPFLRKQERENSVDKTKFNNVFVKNLSESTTKEDLVKIFGAYGNITSAVIMVGMDGKSRCFGFINFKSPDDAARAVEELNGKKINDKEWYVGRAQKKSEREIELKRRFEQSMKDAADKYQGLNLYMKNLDDSIGDDQLCELFSNYGKITSCKIMRDANGVSKGSGFVAFSTLPFIQLTEMNGKMISGKPLYVAFAQRKEDRKAMLQAQFSQVRPVPMTPSMAPRLPMYPPMAPLGQQLFYGQAPPAIMPPQPGFGFQQQLVPGMRPGGAHMPNYFVPVVQQGQQGPRPGIRRSGAGSAQGQQSAQPFQQQMLPRGRVYRYPPAHNMPDVPPMPGVAGGMIQSYDMGGFPVRDAGLSPAPIGTLTSALANANPEQQRTILGESLYPLVELLEQNHAAKVTGMLLEMDQTEVLHLLESPEALKSKVAEAMDVLRNVAQQHNANTPTSQLAALSLGDAIIS

SEQ ID NO: 179812 - protein, 659 aa, Oryza sativa
  Clone ID: PAT_MRT4530_77238C.1.pep
MAAQMAAVAVNGGSPGAVTAAAAAGGVGVAVGLGGGGAQSLYVGDLEASVTDSQLYELFSQAGQVMSVRVCRDISSRRSLGYAYVNFNNPVDAARALELLNFAPLNGKPIRVMYSNRDPSSRRSGSANIFIKNLDKAIDHKTLHDTFSAFGNILSCKVATDEMGQSKGFGFVQYDKGEAAQSAIKSLNGMLINDKPVYVGPFLRKQERENSVDKTKFNNVFVKNLSESTTKEDLVKIFGAYGNITSAVIMVGMDGKSRCFGFINFKSPDDAARAVEELNGKKINDKEWYVGRAQKKSEREIELKRRFEQSMKDAADKYQGLNLYMKNLDDSIGDDQLCELFSNYGKITSCKIMRDANGVSKGSGFVAFSTREEASQALTEMNGKMISGKPLYVAFAQRKEDRKAMLQAQFSQVRPVPMTPSMAPRLPMYPPMAPLGQQLFYGQAPPAIMPPQPGFGFQQQLVPGMRPGGAHMPNYFVPVVQQGQQGPRPGIRRSGAGSAQGQQSAQPFQQQMLPRGRVYRYPPAHNMPDVPPMPGVAGGMIQSYDMGGFPVRDAGLSPAPIGTLTSALANANPEQQRTILGESLYPLVELLEQNHAAKVTGMLLEMDQTEVLHLLESPEALKSKVAEAMDVLRNVAQQHNANTPTSQLAALSLGDAIIS

SEQ ID NO: 179813 - protein, 120 aa, Oryza sativa
  Clone ID: PAT_MRT4530_77239C.1.pep
MRGERGWLGSSTWTCGKVLGALPRPPPPRRARPRPAARRRRRLPRRPAMPLRGPPLAPASPSPAPPPAAPPPRPPSAPSAPPPRLASRRPRLVVLDDRVFLSEIYDVILLPVGMIYGILI

SEQ ID NO: 179814 - protein, 803 aa, Oryza sativa
  Clone ID: PAT_MRT4530_7723C.1.pep
LKGATVFSKIDLRSGYHQLRIKEEDITKTAFTTRYGLFECTVMSFGLTNDPAFFMNLINKVFMEYLDKFVVVFIDDILIYSRTKEEHEEHLRLALEKLREHPLYAKFSKCEFRTSEVKFLGHVISAGGVAVDPSNVEYVTNWKQPKTVSEIRSFLGLAGYYRRFIESFSKISKPMTRLLQKDVKYKWSEECEQSFQELKGRLISAPILILPDPKKGFQVYCDASKLGLGCVLMQDGKVVAYASRQLRPHEKNYPTHDLELVTVVHALKIWRHYLFGTRTEVYTDHKSLKYIFTQPDLNMRQRRWLELIKDYDMGLHYHPGKANVVADALSKKGYCSATEGRQLPWELCKEFERLNLGIVSRGFVAALGAKPTLVDQVREVQINDPDIREIKKNMRRGKAIGYLEDEQGTVWLGERICVPDNNELKDAILKEAHDTLYSIHHGSTKMYQDLKEKFWWASMKREIAEYVAVCDVCQRVKAEHQKPAGLLQPLKIPEWKWEEIGMDFIIGLPRTSSGHDSTWVIVDRLTKVAHFIPVRTTYSGSHLAELYMARIVCLHGLPKKIVSDRGSQFTSKFWKKLQEEMGSKLNFSTAYHLQTDGQTERVNQILDDMLRACALDFGGSWDKNLPYAEFSYNNRERQVFGTDILREIEEKVKIIQERLRIAQSRHKSYADSHRRDLSFEEGDHVYLRVTPLRGVHRFHTKGKLAPRFVGPYKIVSRRGEVAYQLELPQSLAGVHNVFHVSQLKKCLRVPTEEANPEQIEIQEDLTYVEKPIRILETDEGRTRNRVIRFCKVQWSNQSEEEAT

SEQ ID NO: 179815 - protein, 65 aa, Oryza sativa
  Clone ID: PAT_MRT4530_77240C.1.pep
WWESWFSFFVQTSPQLVVAFDDPFQLVLATLVFVLFLTLGHSNCSIGSEFFPLFLLNWISYLCIA

SEQ ID NO: 179816 - protein, 459 aa, Oryza sativa
  Clone ID: PAT_MRT4530_77241C.1.pep
MDQQLHLQGTSTATTVPLQGDPASDHHPHLSIDIPPAAASMSPAPTQAAADITPTPTTSILSTKASTPAGSCSSRSTSVAPKPQRSSSFMLRQTVKSLLPVGSFKSSVKFFNARISRTSSLPVTDVSQEQADKTSTTHAVDKAGHMYRSQSLPMNMKKLNNGKSFKRMNSLGGVYRVVPSTPSVPVTSSNVIPDIVPSEPGDEDGEDIAEEEAVCRICMVELSEGSDTLKLECSCKGELALAHKHCAMKWFTMKGTRTCEVCKEDVQNLPVTLVRVQSMQQPELQTNPANASRYDRLRMWQGAPILVIVSILAYFCFLEQLLVARDGIAALAISLPFSCILGLFSSLTTTSMVARRYVWIYATIQFLFVVFFTHLFYRYLHLQAVISIILATFAGFGVGMTGNSIIVEIIRWRAARAAAAPPAQTRHRRRRHGRRQQQPPPAQPAASSAAVADVENPPV

SEQ ID NO: 179817 - protein, 85 aa, Oryza sativa
  Clone ID: PAT_MRT4530_77242C.1.pep
RGGAGGAPPKEEKPPKPMEQLSKLGPVPPGAYPMPKKPKAKKDPENARSPRVKKKIPPPIPPGRVGLPPPGLPKKKEAKKHGPPP

SEQ ID NO: 179818 - protein, 39 aa, Oryza sativa
  Clone ID: PAT_MRT4530_77243C.1.pep
WACGEVGRCVIRLINRLAHVTSATEAVLPSRSVACDQRP

SEQ ID NO: 179819 - protein, 94 aa, Oryza sativa
  Clone ID: PAT_MRT4530_77244C.1.pep
MTVVTVGMVGNTIQPSLGLHLNRPAKTWIQRRRGRFGRTWGRPNPAQFRLVASSVASLRRLVNFGLIHRVNSTFLAHSFISLTLDIVRLIYRLC

SEQ ID NO: 179820 - protein, 65 aa, Oryza sativa
  Clone ID: PAT_MRT4530_77245C.1.pep
WLLGLPFALLPVLVSIVGAIIWIIGVPILCICPFCLWVTLVLEAAVELIKGPLHVMTWFPSQKPC

SEQ ID NO: 179821 - protein, 321 aa, Oryza sativa
  Clone ID: PAT_MRT4530_77246C.1.pep
MASPSAPPSLLFRLRPTPRGGGGMWPLRVVSKRRRLRQLLSPRTGRRRVGEAAVEQLVLRLPETGRRRGDGGFACSCSFDDSNESPQLPPDNKEILDDWSVLRRWDVPWEWPTISLTMVACAYSSVTAAVLGVIFGITNTYRPFSNDIFRYDLKEPFKLENGWLLWAGIGFFAAIISIALAGAAMSFLGGETPERETDSLVLLLPLIGSSNISTACLLGITGVLAPILEETVFRGFLMVSLTMWFSTPISVLITASVFAFAHLTPGEFPQLFVLGIVLGFSYAQTRNLLTPIIIHAMWNSGVILLLTVLQGYNIKELLLAS

SEQ ID NO: 179822 - protein, 201 aa, Oryza sativa
  unsure (1)..(201): unsure at all Xaa locations
  Clone ID: PAT_MRT4530_77247C.1.pep
LKTQYVLINKKSIYKYSCQLSSGTEDRLVRHSTGDQLYSASSAYRAFFLGXHSFTCADLLWQAKGPVKCNLFLWLVFQQRCXTTDLLKKRGIDSHSVCPFCAQELETMNHILLYCVFARXSSIXIMSPSYWLGLAPSRGYSLQDXWLSGRTCLREHLRRGFDSLVLLVSXQLWKEQNSRIFSSSLLPVSVVLEFIVQEGHL

SEQ ID NO: 179823 - protein, 172 aa, Oryza sativa
  Clone ID: PAT_MRT4530_77248C.1.pep
VLICLGTSQMWGGLPQPVPLTTRKVRVERRACVAKAAAVGRARYPNVTHLCAYYHETDEKLLPYYRLRRQALASASPVSSPTLTRRRSRRSSAEWRARCVARARLYRWLGAGVHRIGVAVVTQKGNVFALGIMLLEAVTVARVDEERGSAESWRCRHNTSSRRSGCRRRSST

SEQ ID NO: 179824 - protein, 454 aa, Oryza sativa
  Clone ID: PAT_MRT4530_77249C.1.pep
LTPEGFIVSSTTLLKMPALRMKRNFDDDVFRDEFDSKPTKSMKISHFQVSELEQSAVLNLPYKDPHDELDLTTQLAGQDIMIMEAASLDDALGGASLLKDLISEVAVSPNMENDMLVNYEDIRSQLNVVNYFDKDEDANSASYNSCTVNCHEESWGSNEGCSLLDIYNPDDAFSFLLDTPSEFLGSFTALYDEVVPIDSLVNISGRCGVFPLTESTTEASIGNEPCRSEGDMLFSNSEVLEWLNPHLAEEDLPNLVDFTELNSHAVSKEQGARKVTLVLDLDETLVHSTTEQCDDYDFTFPVFFDMKEHMVYVRKRPHLHMFLQKMAEMFEVVIFTASQSVYADQLLDILDPEKKLFSRRYFRESCVFTNTSYTKDLTVVGVDLAKVVIIDNTPQVFQLQVNNGIPIESWFSDDSDEALPQLIPFLETLASADDVRPIIAKKFGDKKDIAEIFQ

SEQ ID NO: 179825 - protein, 607 aa, Oryza sativa
  Clone ID: PAT_MRT4530_7724C.1.pep
MAGDKTAAPPPPDAAAFSPDGELFAAVSDRRVQVWRTGGGEIIEGWTDPISAPDDSYSCIACCSVQKKHKKDGNLILVAVGTTNGQVLVLDSTGVIWKNAPHTCKVVSLHFARHGRVLYTAGMDGIICELNSRTGESKDTIKATKKPINSFTLSHDEKFMGVSSKITRLFSVSEKKEILRIPSDVGPVQLMSVSDDGRFLVSHVDNNKEVQVWSCDQNSCTIVSTASLTMQNQPKIVECTRSTSYGDGGIVLAVSKKGVAHVWHLQTLSQNEVLPTKISVKNSLDKKGRIPIISAKLCDTNEDNTVKVHVVFGSPNFLQFKVVELDDTCKDINLVAEYDELAKQDMVSPQERNLEQEAKANSKDAEPVQGKAKKRTSSVLDSTNDTTKEVNPEYNLDEPTMEEKLASLNLLNKSEITEEQPPSLAPPSADSVHVLLKQALRADDHTELLKCLYNRDEKVIVKSVSLLTPADVVKLLKFFVLLIQSRGAKLVCMLPWLQALLCRHMSSIVSQESSLLLLNSLYQLIDARTSTFKSALQLSTTLDYLFSGVSDGETDEEDAVPPIIYEDKDTDDEESEVDAMETDEESQELGDVTDASEHSDGSDIMTD

SEQ ID NO: 179826 - protein, 89 aa, Oryza sativa
  Clone ID: PAT_MRT4530_77250C.1.pep
MPTLPFMPTTPSPFCVRPATPPRCPRPLCCLFRPGCLMCRCSLLGRSPFCLFSVALFGLWRWVPRCAASSSAWSTFLGLFVLCLEAAVS

SEQ ID NO: 179827 - protein, 164 aa, Oryza sativa
  Clone ID: PAT_MRT4530_77251C.1.pep
MDSPATPVGLSPPLLSLVLRNEPCYTKGKRELLCQRLGFAVNRVHGGGSRKLTTEIFPFKTNGRDRPVHGRTTGDDDDDVSGDVTTGGGSGVHARQRERRAPTGSGRHGELTGDQSGGGRSTDGDSDEEEAAATFSLTTTAVLRRSTAAMEGRTRTATRRRPRR

SEQ ID NO: 179828 - protein, 543 aa, Oryza sativa
  Clone ID: PAT_MRT4530_77252C.1.pep
MGWTTVAQLEVQTVSHQLRLGKRVQKLANLAFHRTNQGCADANTTRPDHLLLELPLLPLFPNFPNLASLLPRIPQPRIPIPPADRAATSPKIPRRIGLADGLIGDFDSAMEAQWLAEYPHQGADKRPRKRPRLAWDVAPPLFQPPKAIPMLYCGQELINGNFATAFLPPPPIYYTGPPRNLSPPWRPDDKDGHYVFAVGENLTPRYRILSKMGEGTFGQVLECWDLEHQETVAIKIVRSLQKYREAAMIEIDVLQRLGKHDFTGSRCVQIRNWFDYRNHICIVFERLGPSLYDFLRKNSYRAFPIDLVREFARQILESVAFMHDLRLIHTDLKPENILLVSSESIRVPDYKVTIRPPKDGSFFKNLPKSSAIKLIDFGSTTFEHQDHNYVVSTRHYRAPEVILGLGWNYSCDLWSVGCILVELCSGEALFQTHENLEHLAMMERVLGPLPKHMIVRADRRAEKYFRRGLRLDWPEGAASRESLKAVWKLPRLQNLVMQHVDHSAGDLIDLLQGLLRYDPDARLKAREALQHPFFTRCHRRCGY

SEQ ID NO: 179829 - protein, 139 aa, Oryza sativa
  Clone ID: PAT_MRT4530_77253C.1.pep
LLRQRLGFAVNRVHGGGSRKRTTEIFPSKTNGRDRPVHGRPTGDDDDDVSGDVTTGGGSGVHARRRTTARQRERRAPTGSGRHGKLTGDQSGGGRSTDGDSDEEEAAAPFGLMMTAVLRRSTAVMEGRTRMATRRRPRR

SEQ ID NO: 179830 - protein, 142 aa, Oryza sativa
  unsure (1)..(142): unsure at all Xaa locations
  Clone ID: PAT_MRT4530_77254C.1.pep
RLFPPGAPPPGKNETPGPQNGGGAGPPAGQFPKGAKEKPPGGGGKPKGPXPQPKEPVGGGPQPEKGXSPPGLRGGGPPRNKGVGPQKTPPWGPRPPGGPPAKGPEPPEWPGPPGLAGTRGEMLFVSPRPKICWRMKKGPFGL

SEQ ID NO: 179831 - protein, 224 aa, Oryza sativa
  Clone ID: PAT_MRT4530_77255C.1.pep
MWDSVVKVLAMVHADERNPSRAGGLVHKMESFSFVLNMKLMLKVFRITNELSLLLQRKDQNIVQAMQLLVDVKARLVALRNQALDSIITEMDHRFNEVSSELLVCFSCLDPRESFSKFDVDKIARLTEMYDQDFSLLDRSNIKDQLETFILHVRRVDDFTTCHDLGSLAMKMVETQKHIVFPLVYRLIELALLLPVATASVERAFSAMNIIKTDLRNRIFVFNL

SEQ ID NO: 179832 - protein, 54 aa, Oryza sativa
  Clone ID: PAT_MRT4530_77256C.1.pep
MSLVHDHLTSGALSGSRQQPFVFQYSEIYINIASSYGQDEWCPEREDQSVAAEV

SEQ ID NO: 179833 - protein, 88 aa, Oryza sativa
  unsure (1)..(88): unsure at all Xaa locations
  Clone ID: PAT_MRT4530_77257C.1.pep
KLLWIKQITFLEICWTLSINLEAVAXLPHLVMIQRTTNADNLTGQHVSLLGAYHDIYIPNWIHAHFTEGHHKHMDPLYCCYEPNSSLC

SEQ ID NO: 179834 - protein, 294 aa, Oryza sativa
  unsure (1)..(294): unsure at all Xaa locations
  Clone ID: PAT_MRT4530_77258C.1.pep
MAERGSRAVAGCGRSGRRASPAAERRLRAEQPRAVAAVVVXWARLHGAAVRRHRPGVAVAVHRWLEXVSTLGVPSASWTVVGAGAVTLVVFADVXGGARMRGVQRKASAAEERRRASAAVGKAAEGELXEAEDSGWDEELPRARPPPPPCPRGWPTMLGEAPPAGEGEEAEEAIVSWLSAASPSLLNSLATALARRRSTAALALRYSVRGLLALHCSAHRRARAFRCSVAALALRCAACIRARHSACCLRSAAALRCLRSATGRPRRIASPTATTTVESRRRRRPRRAAAPPAA

SEQ ID NO: 179835 - protein, 268 aa, Oryza sativa
  unsure (1)..(268): unsure at all Xaa locations
  Clone ID: PAT_MRT4530_77259C.1.pep
MTTAVTAGRFGAARRHGRQARAGAAEGDGGGDQAARQGSGAGRRRRDAGEDHAGARANDARGAAAKGRKGGLGSAPRQNGRYNEQRRLRRRWSITSFSLSTLTNSLIVGVPMARAMYGEWAQQLVVXHRLVHAAAVRARGQEGRHRNXGAATSTVIVVTAASGAGKPSLWGAGEIGGAAPSSPAGGHRGEGRQTAAIGDKGDDRSFTSSSTRDGGSDDDLLEAAIAGAALVAAELVLPASGAAGPLAMMANDAQELCDNDDGGNNGLR

SEQ ID NO: 179836 - protein, 194 aa, Oryza sativa
  unsure (1)..(194): unsure at all Xaa locations
  Clone ID: PAT_MRT4530_7725C.1.pep
QPHPRARVADSRAPRGSRSVRPKAATAARPAGGGAPAPLWSPAAAIGTAERRPREGREXGGNEAAVHGSPXVDSDDXKGGRSGGRRRRGSGRRGRRRSGGRRAKRRGGQGRRGCGEAEGGGAEVGGGPGRRRRRTGARRRRRRERATARARFQSGGRAARGGNERMRCGEGLYRVGRGRGWPEGKETGAALSGS

SEQ ID NO: 179837 - protein, 42 aa, Oryza sativa
  Clone ID: PAT_MRT4530_77260C.1.pep
RVDLCCQCTHLVSQPLTFVYILPHWERLLRIENHTISITSCA

SEQ ID NO: 179838 - protein, 199 aa, Oryza sativa
  Clone ID: PAT_MRT4530_77261C.1.pep
NREPTETRSHAAAVTPTRPDEVILKDDASKTVAPSLPNSSARSEETLKTAASIDEPTQVPVAAADASHEPRKTPLAPAGEASSPSSPDTIDELRKPLLITEKIQEEDSESKVESPSPLYTSLRGIVPAGEQSGDESKRKGGRRARMMDFGKKMGDKLEEKRRHIEEKGRNIVEKMRENARTNSFDRSMTSSSHSNSQSQ

SEQ ID NO: 179839 - protein, 75 aa, Oryza sativa
  Clone ID: PAT_MRT4530_77262C.1.pep
SGGYNPTPPPIRASVSPPLFFDRRIMTQADQAVISLRPGGGAFAPAQHGNKDYWKGLHALASIYEGPDHDAMSAP

SEQ ID NO: 179840 - protein, 215 aa, Oryza sativa
  unsure (1)..(215): unsure at all Xaa locations
  Clone ID: PAT_MRT4530_77263C.1.pep
PRVRNWHAKLSEEFNNYISSLNSEYPGFLKPTVFSSEDHEVMDRAIKTDGSSKVRLFLKKLAKKASTKVPLEGKTSSGSSTQGERKILDKLRSYQGTPFIEGLMGSQDDKSNSSSSQDTVKPSPTSPALGQIGQPSAFPDVNADDRIADEGTLCWNLLSSRLFFDAKMSDEIHKAIKARIQRTLSSMRTPPYVGDITLADFSLGKLXPYVHAMRV

SEQ ID NO: 179841 - protein, 150 aa, Oryza sativa
  unsure (1)..(150): unsure at all Xaa locations
  Clone ID: PAT_MRT4530_77264C.1.pep
SLSFSPSHSRSLLLPLRPPLPPXLPSPLHRRLGVGSSHHIDGGGWIRRCDDGGGRIRSHIDGGGRSRHRHDGGGRIRRHDDEGGRIHRRDDGGGRIPGYATRWCIWQPPTVAPTIGVAATVGVATAPAVDASSWCHRPSPRHRAASTSLH

SEQ ID NO: 179842 - protein, 60 aa, Oryza sativa
  Clone ID: PAT_MRT4530_77265C.1.pep
NPINHIISIIEVFMCAQLGDIRLLYLTYSACAPIVAVFCRCFCKPIVLSVSESIQPVSMY

SEQ ID NO: 179843 - protein, 39 aa, Oryza sativa
  Clone ID: PAT_MRT4530_77266C.1.pep
ISCLLRCRESVTHADACCCWRERPEELMAAPVVCRLLAT

SEQ ID NO: 179844 - protein, 72 aa, Oryza sativa
  Clone ID: PAT_MRT4530_77267C.1.pep
SRLIVFFPFREKIVLLPLLMPPFFQTTLLPRGDYCPGRGLGEQIMSPWGAAPPARFNFLFLFFGQFVYLMWK

SEQ ID NO: 179845 - protein, 473 aa, Oryza sativa
  unsure (1)..(473): unsure at all Xaa locations
  Clone ID: PAT_MRT4530_77268C.1.pep
MAARAAAAAFLLLLIVGAATAAPDMSIISYNAEHGARGLEEGPTEAEARAAYDLWLAENGGGSPNALGGEHERRFLVFWDNLKFVDAHNARADERGGFRLGMNRFADLTNEEFRATFLGAKVAERSRAAGERYRHDGVEELPESVDWREKGAVAPVKNQGQCGSCWAFSAVSTVESINQLVTGEMITLSEQELVECSTNGQNSGCNGGLMDDAFDFIIKNGGIDTEDDYPYKAVDGKCDINRENAKVVSIDGFEDVPQNDEKSLQKAVAHQPVSVAIEAGGREFQLYHSGVFSGRCGTSLDHGVVAVGYGTDNGKDYWIVRNSWGPKWGESGYVRMERNINVTTGKCGIAMMASYPTKSGANPPKPSPTPPTPPTPPPPSAPDHVCDDNFSCPAGSTCCCAFGFRNLCLVWGCCPVEGATCCKDHASCCPPDYPVCNTRAGTCSASKNSPLSVKALKRTLAKLNTXHELIDNM

SEQ ID NO: 179846 - protein, 299 aa, Oryza sativa
  Clone ID: PAT_MRT4530_77269C.1.pep
MARRLLARHFLPHLRLGLPARCLGDPSSSPSALAIARCRNVAGPSTPPIWALGGTRFFADDRSRYDLFGKRRPGDEEFRKAWQENVDEEDCLWTGSEDEDEEENDTKMEREIKKVKKQAKENANLIDADDSDELRSICSESDEDDMALWSGSEDDDDDDIPTDAHPNERSDSYIDKVFEFDEAPKYRTISELLKAEKEPPELSPGKQARKLAVENALKKLKKGPDGRYINVFDVVTDIDILIGAFENIVSGPEYAELREGAKFLGSCKHEFTVLRTCGSKDMPPWCSCAGLAVSKLTLS

SEQ ID NO: 179847 - protein, 1258 aa, Oryza sativa
  unsure (1)..(1258): unsure at all Xaa locations
  Clone ID: PAT_MRT4530_7726C.1.pep
SNEKFSKKSYQDRDRKQERSGYKPRRLHVERSNLSTDSDLHVSHIFXVPQRRYPIMVEPTIRNIKVAQVLIDGGSSINLLFASTLDAMGIPQSELTPTDQPFHGITPQSSSRPFGKITLPVTFGQANNFRTEQITFDVAEFDTAYNAIIGRTALAKFMAASHYAYQVIKMPGPKGTITIQGNAKLAVQCDKRSLDMVEQTPSPPATTEPPKKVSKTNKTPKPDGAIKIVPLSSANPDKTELALITFLRDNADVFTWQPSDMPRVPREVIEHKLMVRPDAKPVKQRLRRFALDRKXAIREELDKLLKAGFIREVLHPEWLVNPVMVRKANGKWRMCVDFTDLNKACPEDHFPLPRIDQLVDSIAGCELLSFLDAYSGYHQISLAKEDEEKIAFITPFGVFCYVKMPFGLITAGNTFQRMVQGALSDQLGNNVEAYVDDIIIKTKTGDSLIDDLREMFDNLRRYRLMLNPEKCTFGVPSGKLLGFLVFGRGIEANPEKIKAIENMKSPTRLKEVQKLTGWMAALSRFVARMGERGQPFFALLKKQEKFVWTQEAEEAFVALKRYLXNPPVLVAPQPNEELFLYIAATPYSVSTVIVVERDKLQRPVYYVSEALHDAKTRYPQIQKLLYAVIMTSRKLRHYFQAHRVTVVSSFPLGEVVRNKDVVGRIAKWVVELSQFDVNFALRTAIKSQVLADFVADWTMPDNKSDNQVDNETWTMAFDGALNSQGVGAGFILTSPSGDQFKHTIHLNFRATNXAAAALGVKRLIVKGDSELVANQVHKDYKCSNSELSKYLAEVRKLEKRFDGIEVRHVYRKDNIEPDDLARRASRREPLEPGTFLDILTKPSVKEVSGEVSPVTPDISSEATKAEQAVADIETTDDWRIPLIKFINSEELPEDDTETKKITRKAKIYCMVGNDLYKKAPNGVLLKCVSSDDGRHLLLDIYEGICGSHAAGRILVGKAFRQGFFWPTALKDACDMXTHKDTRASAPDYPSYLAVLVLGARYTRAIPTRTGRLXFLFVAIDKFTKWIEAVPMGEIKADNAIKFIKGIFCRYGLLHRIITDNGSQFISADFXDYCIGLGVKICFASVSHPQSNVQVERANGIVLQGIKTRLWAVRTTPTTSNKETPFFLVYGSEAMLPSELRHQSTRVQKHSDEDQEEQRNVDVNLLEEHRERVAVRAASYQQALRRYHEKRIRAXILSIGDYVLRRVQSQAGRNKLSPKWEGPYTITQVLRSCAFKIADDDGRELANSWNIDQLRKFYV

SEQ ID NO: 179848 - protein, 66 aa, Oryza sativa
  Clone ID: PAT_MRT4530_77270C.1.pep
MAQHSRRTPCMRWEGGSEGRRGGGEGKGEADATVGGGAAAWSVNKIRCLLWNHTNYPRSLVLPEWY

SEQ ID NO: 179849 - protein, 89 aa, Oryza sativa
  unsure (1)..(89): unsure at all Xaa locations
  Clone ID: PAT_MRT4530_77271C.1.pep
MSSVRLIMKNIVRPTHNRGHGYSNIFTLMRDVPLFPQDTAPXMSPCTSIPPRDLGXNFDNTCNTAQLTTVHHSWIMICPSKPEAMDLPA

SEQ ID NO: 179850 - protein, 470 aa, Oryza sativa
  Clone ID: PAT_MRT4530_77272C.1.pep
MEPPAPATDVPPSSLTLSAADLATVVAQLGALSTAPGRLPPPPLAVLLAPPPVIDADALVALHQQAISVLNITALIPVTLDLTAGNYTRWRGMFLVVLGKTISADLFHEVLSPTSSTRIVWRNLEHQFLGNSELRAINLTTEFYTFLQGDMSGTDYCRRLRAMVDSLADLGEPITNKTLVLNFLRGLNEKYHNLQTILPMQRPFPTFLEARSQLLIAEINKGQGHSTGAATAFVAAATSGTRGTCNGGNTSGTSSGNNGNGGNNGGSIGTSNATTPPAGSVQRPTTQWPTAFNPWAGTIQLTGQACWARHPVCLSPTGKSTPKVPQLVIELQNRPPTAKPGFLWSQLQFGAEAAGTTVFTMRNNCTYTVWATTLSRNTAVAIGAGGFELSPGANVSFLAPDGWSGRLWARTDCATSGTASLACATGDFGGAVSCSLGGAPPVTLAEFTLGGGDGKDFYDVSYFEIQILTI

SEQ ID NO: 179851 - protein, 129 aa, Oryza sativa
  Clone ID: PAT_MRT4530_77273C.1.pep
MTATFARFTEHMGGLHRFNGDWWHCNGQMVVRGATRMFLPMFMRLPPCRSCQSTKITLGAILSGSDGKLWMWESPSAANLPQIMCGSACPERNGGAILRFLSRYHEGVNNGTLLHIHHELVDIGDGPSS

SEQ ID NO: 179852 - protein, 388 aa, Oryza sativa
  Clone ID: PAT_MRT4530_77274C.1.pep
MLMILPCRLLLRLVLATLLILAASTDQHVATLPPITLPGCIDKCGNISIPFPFGTKQSSCFLPGFEVTCNDTFSPPRLFLGNSNPGDRQNYQEFEERYYLTTEEGMPTHLMTDDFLFMELMSINLTEGVARAYGPVSSDCSLNDTYHLVKRQMTGLAGPFLISTRNALTAVGWNMEANLARSVRGSGFLKTCGVRLGQPEFATNGSCLGGGCCQGEITQGIGSIAKDWYNFTSPDLYSDNFSKKYPKGVPLVIDFAIRDGFCPAAGQAPPANYACVSSNSSCVNVTNGDGYICNCSKGYDGNPYIPNGCHDIDECALRDSHPELRVLYPCSRNGICMNRPGGYDCPCKRGMSGDGKAGTCSEKFPLQAKIVVGDVRVKDKWDEVENTE

SEQ ID NO: 179853 - protein, 168 aa, Oryza sativa
  unsure (1)..(168): unsure at all Xaa locations
  Clone ID: PAT_MRT4530_77275C.1.pep
MNNVSFVLPARALLQSHFTGLSSGVYAPDFPVAPLSPFNYTGTPPNNTNVKTGTKLLVLRYNTSVELVMQDTSILGIESHPLHLHGFNFFVIGQGFGNYDAVNDPAKFNLVDPVERNTVGVPAAXGVWFMHCHLEAHTTWGLRMAWLVLDGSHPNQKLLPPPSDLPKC

SEQ ID NO: 179854 - protein, 579 aa, Oryza sativa
  Clone ID: PAT_MRT4530_77276C.1.pep
MTMAISSALPSPLLLAASLLLLIVQAQGRVRPRVRNVQMANATRLCNTKSMVTVNGQCPGPELVAREGDRVVIRVTNNVAHNISLHWHGVRQVRTGWADGPAYITQCPIQTGQSYVYNFTVAGQRGTLWWHAHISWLRATVYGALVILPKLGVPYPFPAPHKEVPVIFGEWWNADTEEVVNQAVQTGGGPNVSDAFTINGLPGPLYNCSAQDTFKLKVKPGKTYMLRLINAALNEELFFAVANHTLTVVEVDAVYVKPFTVDTLVISPGQTTNVLLTAKPYYPGANFYMSAAPYSTARPGTFGNTTVAGILEYENPAMSPSAASFVKGLPLFKPTLPQLNDTDFVTNFTDKLRSLATPEYPAAVPQSVDKRFFFTVGLGTLPCPANMTCQGPNNTQMAASMNNVSFVLPARALLQSHFTGLSSGVYAPDFPVAPLSPFNYTGTPPNNTNVKTGTKLLVLRYNTSVELVMQDTSILGIESHPLHLHGFNFFVIGQGFGNYDAVNDPAKFNLVDPVERNTVGVPAGGWVAIRFLADNPGVWFMHCHLEAHTTWGLRMAWLVLDGSHPNQKLLPPPSDLPKC

SEQ ID NO: 179855 - protein, 67 aa, Oryza sativa
  Clone ID: PAT_MRT4530_77277C.1.pep
SAAGGGHGAAAAGDEKAAGAVATTRSRPIARRRIEAGAARGAVLGHRQTPRWHASAPHPRRGAVPVL

SEQ ID NO: 179856 - protein, 141 aa, Oryza sativa
  Clone ID: PAT_MRT4530_77278C.1.pep
MAALHPLAILVFVSLLAAGATANYGYTTPSPSPPPPPQQYTPPAHSDKLLAVADDNGYFRAELDETKVSDFYMGDPRKACYVRLHASPDFECNNPTNINYSSIEGAPLRDEGKRWSDHDYYNVMYATGPLAFRPVMCPPKH

SEQ ID NO: 179857 - protein, 67 aa, Oryza sativa
  Clone ID: PAT_MRT4530_77279C.1.pep
YSERAKLTTRTPHTHSQTRKCSTIKRLTAVAPPGHLTLPHTNTHHEKPGSPLQRHTSIAALGDSHEP

SEQ ID NO: 179858 - protein, 182 aa, Oryza sativa
  Clone ID: PAT_MRT4530_7727C.1.pep
MNRVPTSWGFIYPRVNKRGERSARTGSTGVGPTRQPLGPRWTGSTRLTPAGAVGPTRQPHLRARAADSRAPHGSRGARPKAATPAQPTGGDAPAPRWSPPATTGAAERRPREGREGGNESAVHSSPRVDGDDGNGDRSGGRRRRGSGRRGRRRSGGRRAKRRGGRGRRGRGGAEGDGAEAGE

SEQ ID NO: 179859 - protein, 44 aa, Oryza sativa
  Clone ID: PAT_MRT4530_77280C.1.pep
RQKHDDELCFRKKFFWQYNVNSKLVTILRLYKYIILSYYTLTIL

SEQ ID NO: 179860 - protein, 80 aa, Oryza sativa
  Clone ID: PAT_MRT4530_77281C.1.pep
YTISKSYKFAIIAPQHRFSHHHSSHVPFASSHIIGLHHSQHFITTPHTSHGAPHTHSAVHMGAHFPLYCCLPRRHHMWCH

SEQ ID NO: 179861 - protein, 105 aa, Oryza sativa
  unsure (1)..(105): unsure at all Xaa locations
  Clone ID: PAT_MRT4530_77282C.1.pep
TPSTTPKSVSWGGLSTSIQTILSXNSGRVTHKXLVLKARELLSXRGYTHQPGFYFSDKHTSVAFISSEPDTSSVMRALAHMDESFLVPLMLYNVMEYPVDLVFRM

SEQ ID NO: 179862 - protein, 95 aa, Oryza sativa
  unsure (1)..(95): unsure at all Xaa locations
  Clone ID: PAT_MRT4530_77283C.1.pep
MFIQEESFFATHXEMIDADDDDDDXADVRPRRSTCSVVHSXVAIQAELTVRTTSSSVLLQACCVPAAVMDVEEEKRLIDREEDRGVVYLMGEANV

SEQ ID NO: 179863 - protein, 56 aa, Oryza sativa
  Clone ID: PAT_MRT4530_77284C.1.pep
DFEWIEIMQCVWLGGTLSWTVVHGRQVDARKHVVYKIQLMVQLVSQLLLCFEVLYV

SEQ ID NO: 179864 - protein, 74 aa, Oryza sativa
  Clone ID: PAT_MRT4530_77285C.1.pep
MMSIASASSTPYTTTLATVAEEGIYFSHSVALRTDAPIAATANAKLLFAGCRSSPRSSLLASVAAANEGHFRRV

SEQ ID NO: 179865 - protein, 61 aa, Oryza sativa
  Clone ID: PAT_MRT4530_77286C.1.pep
WSGGPSPDGDKLKQSPRQWYKRFDSFMLSHGFKRSEFDSYVYIKFVNGSPIYLLLYVDDIL

SEQ ID NO: 179866 - protein, 91 aa, Oryza sativa
  Clone ID: PAT_MRT4530_77287C.1.pep
MSAVVPVAVASSSSAAAEQPAAKAATAPNRCAACRKKVGLTGFKCRCGGNFCGGHRHADAHGCGFDYKSAGKEQIAKQNPLVVADKLATRI

SEQ ID NO: 179867 - protein, 96 aa, Oryza sativa
  unsure (1)..(96): unsure at all Xaa locations
  Clone ID: PAT_MRT4530_77288C.1.pep
MAEEKHHHHLXHHKKDDEPVTAVDSYREGSLHXETATTEVVNGGHDEYXERYKKEEKLYKHKQHPVGYXLHEHHEKMKDHKSAEEFTGEKKHHLFG

SEQ ID NO: 179868 - protein, 83 aa, Oryza sativa
  Clone ID: PAT_MRT4530_77289C.1.pep
MTMITPSSNTTHYRESWYACRYRPRGPGSSPAPLKYLGCSGNHTRNSLSYSSPLQLKIFGASILFETLRPVLISSYLLVRHSH

SEQ ID NO: 179869 - protein, 350 aa, Oryza sativa
  Clone ID: PAT_MRT4530_7728C.1.pep
MEQGGEAGTGGGLGNLRALLAILQWWGFNVTVIIINKWIFQKLDFKFPLTVSCVHFICSSIGAYIAIHVLKAKPLIQVEPEDRWRRIFPMSFVFCINIVLGNVSLRYIPVSFMQTIKSFTPATTVILQWLVWSKHFEWRIWASLVPIVGGILLTSITELSFNMFGFCAAMVGCLATSTKTILAESLLHGYKFDSINTVYYMAPFATMILALPAVLLEGGGVVTWFYTHDSIASALVIIIGSGVLAFCLNFSIFYVIHSTTAVTFNVAGNLKVAVAVLVSWLIFRNPISPMNAIGCAITLVGCTFYGYVRHLIPQQQAVAPGTGSPTTSQTNSPRSRMEMLPLVGDKQEKV

SEQ ID NO: 179870 - protein, 136 aa, Oryza sativa
  Clone ID: PAT_MRT4530_77290C.1.pep
MDGGDLRSSIKKWNVIYPVYLNSKKTVAEGRRIASGKACPDPTCVEIADCCSHLKIPHAIELDKAYPRDFFQVGRVRVQLKKDDGSPVNPAIKTKKQLMIQIAELVPKHHGRTKKQEPAASSTAGTSKGKGGKKKK

SEQ ID NO: 179871 - protein, 43 aa, Oryza sativa
  Clone ID: PAT_MRT4530_77291C.1.pep
SRSITFLAVPILFFSPCINCIMHVLVGIIQSILGLNLKRHRLL

SEQ ID NO: 179872 - protein, 494 aa, Oryza sativa
  Clone ID: PAT_MRT4530_77292C.1.pep
MELTTLLLLALISFFFLVELIARYASPSGRESALRLPPGPSQLPLIGSLHHLLLSRYGDLPHRAMRELSLTYGPLMLLRLGAVPTLVVSSAEAAAEVMRAHDAAFAGRHLSATIDILSCGGKDIIFGPYTERWRELRKVCALELFNHRRVLSFRPVREDEVGRLLRSVSAASAEGGAACFNLSERICRMTNDSVVRAAFGARCDHRDEFLHELDKAVRLTGGINLADLYPSSRLVRRLSAATRDMARCQRNIYRIAESIIRDRDGAPPPERDEEDLLSVLLRLQRSGGLKFALTTEIISTVIFDIFSAGSETSSTTLDWTMSELMKNPRILRKAQSEVRETFKGQDKLTEDDVAKLSYLQLVIKETLRLHPPAPLLIPRECRETCQVMGYDVPKGTKVFVNVWKIGREGEYWGDGEIFRPERFENSTVDFRGADFEFIPFGAGRRMCPGIALGLANMELALASLLYHFDWELPDGIKSEELDMTEVFGITIAIL

SEQ ID NO: 179873 - protein, 113 aa, Oryza sativa
  unsure (1)..(113): unsure at all Xaa locations
  Clone ID: PAT_MRT4530_77293C.1.pep
XXXTXSXXSAXSYXPHLRIRXXHASPSPDPPPASSSSSTMTPXRAPLWPSTATPHRRRATPPPLPRDAGRCPPNGEREREGEGAAERPREIGAPRVMRRSEAYTLLGTRIEES

SEQ ID NO: 179874 - protein, 168 aa, Oryza sativa
  Clone ID: PAT_MRT4530_77294C.1.pep
SAGHGDGNDIDRQALLSFRSLVSDPARALSSCQLDGLIPPCIANLSSIERLDLSNNSFHGRIPAELSRLSSLVGVSLAANNLVGSIPGRRPSDVDAARGLLRRAGHRRRRRRRRTSGEVEPQATAAAAAAETPTFGAAAQRGDGRRRRRPAASCRVHGLRHPRRRLPH

SEQ ID NO: 179875 - protein, 31 aa, Oryza sativa
  Clone ID: PAT_MRT4530_77295C.1.pep
RTRGVLTTTANWFILLQYYFDIYGYVVNNNL

SEQ ID NO: 179876 - protein, 47 aa, Oryza sativa
  Clone ID: PAT_MRT4530_77296C.1.pep
MVEEIGRVLELFEIGVEVVIALKYTKVLHVREIIWGSSRVDLQACKL

SEQ ID NO: 179877 - protein, 364 aa, Oryza sativa
  Clone ID: PAT_MRT4530_77297C.1.pep
RPRCSGGRLAAGGGRLFIVDWLPRPPAPTPAGWLPRPLANAASAAAQETKSAANCSPPSALPSPRRLFFSPTGAPRKQENPRRLRRSPEAMEKFHDGHHVWLRSRVHGTYLRAGEDGSGVSLHEGRASVHAAWAVHILHLDGGDILMLHSAANGRYLAAPRTGWSWNSVDLRDLNQLPSFTVGWFAVTAGSGDYVMLRHSSSGLFLRADGGNLLCNSVGVVVDMFDFRRREIRQWVVEAIPPRDSMPILPNPSPTAFSWCRIWYVRASPQGNFRREDWRSLLFHGRSVFHLRNRLASQLRIRESSDAILCVRAGSTGRVTPLVTDLPRNTLVIDIVVITAGTNGEISFYSDRLHIYMFMVLLKS

SEQ ID NO: 179878 - protein, 190 aa, Oryza sativa
  unsure (1)..(190): unsure at all Xaa locations
  Clone ID: PAT_MRT4530_77298C.1.pep
ARGSHSRVAEGLAFFRTMTFTSGLAADYVMLVTVLTGCASAGLLPVSCRAIHXYIVRRXGITFTMHLGTALMGCYAKAGRLDYASRVFCRVPLRNVMHWTAMICGSAAHLGSEKAIQLFEEMCRSGVQPNEMTFTAVLSACGQAGLVDQGRRFFKLMVDTYGFEPTIHHYGCIVDLYAKAGKLEDAYEVI

SEQ ID NO: 179879 - protein, 64 aa, Oryza sativa
  Clone ID: PAT_MRT4530_77299C.1.pep
EQETILFHLFTNFCREKRSKTFGFTTYGTAFIHSFWNERSVLFLFIFNLYNKFTISSFKIITPF

SEQ ID NO: 179880 - protein, 261 aa, Oryza sativa
  unsure (1)..(261): unsure at all Xaa locations
  Clone ID: PAT_MRT4530_7729C.1.pep
TMRRSTAHPRSTATTKXAGAEEGGGAARVDGDGGAPAVDERNGGVDEVGEDAAKPKEAAPRWEVVRGDDGGGPELGGDGGERERRRELDSGQEKGRXEAETNGGGAGRVXIEVEGGEGGRRGRKPARRSRAPSMVPARFAXGQIRPFERERGRGKWGERERESRGIIPPXLIAHGEDGGGGIRGGGGARARARQRERPEEGDDGWAPPVSEGGGRARPSAARARGXGRMGRGEXEGGGGRWAEPAREGEGGKGDFLEFFFI

SEQ ID NO: 179881 - protein, 81 aa, Oryza sativa
  Clone ID: PAT_MRT4530_772C.1.pep
MLPLPLIANGKGFIRALENDGALAVYAPLEGGYEGRYQRRLQANGYASISLSARGLGDVEAYLMQVHGVRPAHLGKKNIAQ

SEQ ID NO: 179882 - protein, 125 aa, Oryza sativa
  Clone ID: PAT_MRT4530_77300C.1.pep
KKTKGTLGEKGGKGSGKGNISFYGDTNFYSKKTPKGTFYGAPQKKGAWRELWGGPSKLLKTGGTKNLKGPRGDWGGFLCLGAEFQKKGGGRIVGSRGTEREGTRGEERGLGGPLIWEGSKIFKGG

SEQ ID NO: 179883 - protein, 225 aa, Oryza sativa
  unsure (1)..(225): unsure at all Xaa locations
  Clone ID: PAT_MRT4530_77301C.1.pep
MAAPSPPCLLRVLLPVASSSSRGLRRRRRPTTSLLRCSSPSADTASSSGEGGREYEPSFADDFLHAFFRAKMVEEVGWDSEKPGYTGLIEVANRPMVRVLRSLIPPLLLVLLKALVVPIANGQLASMMVVHXTLRDGNCQVFVEKCKYLEESKXLTFFKDHIGVDLYMEPNFEDYSCQFNFGVPPPPLDTDKALKEPCLDICTNAGRWRVLGTGSSTDSLQCPQV

SEQ ID NO: 179884 - protein, 161 aa, Oryza sativa
  Clone ID: PAT_MRT4530_77302C.1.pep
KVINKFYPLLFLFQQQVVRPCRWFVRPQPCFVAPPFWQPGFFFFFTHPFFPPQCFPPLRVVGHHFPFPAFCSVQGFFHQLHLRRGGVVFFGPTPGPGPALPAFSLPPLCGFFPYPFLAPGGLPPVGGGWGLFFLVLWFQFLKLSLASSWGAVLTFFFFNFN

SEQ ID NO: 179885 - protein, 45 aa, Oryza sativa
  Clone ID: PAT_MRT4530_77303C.1.pep
YCETRTKYAGSFLFRPRMGERCFGRRGGSLLFRWNTVEHLPYLWR

SEQ ID NO: 179886 - protein, 37 aa, Oryza sativa
  Clone ID: PAT_MRT4530_77304C.1.pep
GRNCHHKIHTEKERHNPTLPWHPAYQQRKLTQIHVKG

SEQ ID NO: 179887 - protein, 253 aa, Oryza sativa
  unsure (1)..(253): unsure at all Xaa locations
  Clone ID: PAT_MRT4530_77305C.1.pep
GSDSGRVVHGGPSPRTGDGAAHHVALTWRRRGGHAGGRTDGPDLPPGRSGGGXARGRRPRAWLKPVRRPWRAAARRAHSGDARRRPAGGGXTTAIAAAKWLGGGAAAKRXGEREKGEQGPHRRRSATASDGGRRRRRDELRNHLANKMRGIRGREENGRGRGRRPWRCXTGARRRIPTEEGWTGRPARRRTRRRRRHGXSGDRSGGGSGGLEGDGAWAIEGTGKLACLQVDSRGSPDAVFSPYASVRYLGCRN

SEQ ID NO: 179888 - protein, 1388 aa, Oryza sativa
  Clone ID: PAT_MRT4530_77306C.1.pep
MATTTPAARKIAGTEVPIPGSDRVRWIELTVPSTPSPSPEGDSDPFVLVPPRAASGFHVVSSGDSQCYLAWRFHEEQQNVLEVIDLCAFKEFPSSGLRLVFQEELCPFSFLCARFLNELRDDAGIGRLWSLVSRTKAVGPVQDIVTATVNERELLFVLHLDGSLRIWDIFNHTKLLSYNVRSNDIEGQPSRIWVGDADDDQELIFLAVLRQGTVTGACDCVSVYGFSFGAGERFLFSPEPSFFSIPLVEGKLIDLKISMDKLWILKEVGSMLYEIVQYDCDTEIMHSYVLQEVSVSDQLFQSSENTLDDLVWTADSIFSSKKIRSPIDLYDFWFNLNYKGSSQTASSTAYHWKKFSARYLHNWCWNNRPYGLLLDTNREVFGLIRKGSFSLFRCLEGMEQFIYGSSDDLRNLDILGVNPSDNISQSEILIEVLRCMDHISHLLGRSAAAIYHESLISSVISPDEIVSQILKILGTGFSPQSPSALITLFGTDAYAERRQTAHKSQRKFSVEMLLSFRKLQSKSTSWSAVFDVIENFMKYLNTNVTIQEYELKRVCNVNTALLVQATSQVARTMFESTFDLYLFLNYLVSIGGQGSSQTASSTAMLLLKLAPVSLSQNDIARIKLKLFPVIQDILGQWIVLHFVGISPTTPPTIEDFSYQLSSLQLGKADDLSLHRKFGCSYFTLACLLDFPKSADGDVLSPWFPNPTELVNLVRRFSGSIMSENIAGNADCFLSSTINLAAVLVRHGQYEAAQSLLGILDTHMNYVKASQADQDTDLARSSCLHLNGFCLLVLARDEANIVLKESKVHEAIRCFFRAASGQEAPKALQKFSVETGFQISGECRSFTAWRLRYYEWAMQIFEQHSMSEGACEFALGALEQIDSIVDLDNGSEAEDIPETTTMIKGRLWANVFKYKLDLKNFQEAYCAIISNPDNDSKYVCLRRFIIVLCELGETKVICNGEIPFTGLVEKVEQELFWKAERSDLLSRPNLYKVLYSFEAYRNNWRKAAAHMYRYFVRLSREGNAGGTRQLSHTLQERLHALSAAINALQLVDPSFAWLDSVCEADDQISPSKKPCNLLMKNSAFGTDSELSRLKFCVDIEILEKEYTLTEALYMLSTVNSRFNFSDNQSIEALTDILINENMYDMVFTIVLKFRKESGMKRELERVFAAIAQQCCPNRVGNSGKNLLLPSSDDDACDGNGNSIAMAHQSQGSCHWETLEIYLEKYKDLHPRLPVIVAETLLYTDPEIELPLWLVQMFKTTKAGNRMISWGMSGTEADPATLFRLYINYGRHTEAANLLVEYLESFTSSRPVDVLHRKKMSAAWFPYTAIERLWCQLEEMQNAGHSVDQCDRLKKLLHGSLISHLQQVVVDSDDVLSSLGGGKGMGSQSN

SEQ ID NO: 179889 - protein, 67 aa, Oryza sativa
  Clone ID: PAT_MRT4530_77307C.1.pep
KQAVRLSWGRSPASKQSRGDSGHRRNGMYYGTPFYGGYGYASPLPHPNMYAAAYGAYPYYGNQQLVS

SEQ ID NO: 179890 - protein, 338 aa, Oryza sativa
  unsure (1)..(338): unsure at all Xaa locations
  Clone ID: PAT_MRT4530_77308C.1.pep
VVLPQPFNTPSAEYVKHLSNQVAIPSLSYENYYFLGPVDNPDSTEFIIGXTNRIPFRLTTPDLGHXKNTFKSWRFIEKVPPEKVGPHGSNVYQQXKRVHWDEIGIGQEFALTIVNSAKDEPLRATAFYLGSNTINAFLFNQGPMTPTLIDITMISGLDVTSSANPMSMNTKNXFDFKTKSIGGWFGYVAAYMGQGSVTPREHVSXLLMGLEKVLLCGSSCGPTTNWEILAEALESKKEFPLGKNLIGYLYQKLNNALAKTGGGSKIGAGGPRELLQTWVKLKGNKGENXPFVKETEFPKXEPTVKEDGEELTYWGSTLYGEDAFTPTGAGAKILGRTV

SEQ ID NO: 179891 - protein, 516 aa, Oryza sativa
  Clone ID: PAT_MRT4530_77309C.1.pep
MKRKAHVSEEQVRRMILECSSGPNLHVKLELVDTLERLCIDYHYEKEIENVLRRVHEEEDDTDNHYDLHTTALRFYLLRKHGYYASPDVFQRFRDEEGNFTRDDNNNGTRSMLSLYNAAHLRIHGEEILDDAIVFTRNYLQSVVKHLQSPMADEVCSALRTPLFRRPRRVEARHYISVYDKLPTRNETILEFAKLDFGILQSLYCEELNILTMWWKELQLQDHLSFARDRMVEMHFWMLGVLFEPQYSYGRTMLTKLFIFVSIFDDIYDNYSTLEESKLFTEAIERWDEEAAEELPGYMKFFYKKVLTTMKSIETDLKLQGNKHVDYVKNLLIDATRCFYNEVKWRSEGALNMKRKAHVSEEQVRPSICCMHVPVYSFVAMGNDVTTDDAINGGMAYPKIITSSCIVGRLLNDIASHEREQGSSSSSSSTVEACMREHGGITKEEAYAKLRELVEESWMDIAGECLRPAAAQPPPLLEAVVNATRVLDFVYKDDQDAYTHPSSLKDTIHSIYILSV

SEQ ID NO: 179892 - protein, 239 aa, Oryza sativa
  unsure (1)..(239): unsure at all Xaa locations
  Clone ID: PAT_MRT4530_7730C.1.pep
MTSPTAAAARRSGRLGRRTLAGERRRXDANGGHQHVEDDAANTPVTKTAAKEQRTTTATRRKRRKPSGXQRRRSSGDLRRQRRGGRGRRRLGDHDGGLPERRRRLERRRRTAGATAATAKLGHTALERFRRREAKARVAADRGDTGGPFKGARRRRRRPTATGEGRKARGLXKGADPNRTRFHELPKRFSRCFQRRKGRGDPEECFPSINSAGEGKERPDLEGXRRRHETRVXGGDGRR

SEQ ID NO: 179893 - protein, 655 aa, Oryza sativa
  Clone ID: PAT_MRT4530_77310C.1.pep
METAHLAYVLLFLVTAVLLFHLRRGGRSAPAKLTTAHRPHPNPVLGNTVEFIRNRRRFFDWYTDLLRASPSGAIEAWGPFGAGHAVTTACPAAVEHLLRGNFGNYVRGASFRAAMSELIGDGLFAADGRLWSVQRKVASYAFSSRALRRFSDDVLAVHLRGGLLPFLDAAAASGEAVDLQDALRRFAFDSICHVAFGVESSTLLETAREDSGRHEALFAAFDAAVEISFRRALAPFTLVRKLTGLVNVGSSRRLREAIGVIDDYAMSVVESKEAACRDRDSEDVDPDLLSRFMAAMDEEDGGELGAMFPTPEGKRRLLRDVVVSFVLAGKDTTSSALTWLFWLLAANPRCERRVRDEVSRSPDGDGGGDAKGMHTHYLHAAITEAMRLYPPVPFNGRVAVGDDVLPGGAAVRAGWFANYSAYAMGRMERLWGEGCLEFSPERWLRDGGEFVAVDAARYPVFHAGPRACLGKEMAYVQMKTVAAAVLRRFSVEVAAPAPAMESPPAYEMTATMKMKGGLTGDNQIGSQINHTGEERASERPSLLLAASLPGSTNLPLRREYVAPPTRSRAATPSLRREVADPSLRWADVEREREEPDPKPLRHQPAGYGDERDSGDTPTRRKGATAHRWGRDSAGRGRGMGSCDAGGERGEGTVSP

SEQ ID NO: 179894 - protein, 92 aa, Oryza sativa
  Clone ID: PAT_MRT4530_77311C.1.pep
MAGMAPTGSQLDAQHYDRTMQELLHQGDNAECFTTYDEVLESGDDMSLRETLLRSVYTYGSENASSIDHKGIVHYSTGLDEMQYAQSGTGKT

SEQ ID NO: 179895 - protein, 33 aa, Oryza sativa
  Clone ID: PAT_MRT4530_77312C.1.pep
KVHLVGLHNTQMLVQPVDYQMILNCISQLPVVY

SEQ ID NO: 179896 - protein, 59 aa, Oryza sativa
  Clone ID: PAT_MRT4530_77313C.1.pep
YMCRPSLTSRCNGVDSQGLVEDIRVTRNREIKVKGEVDLEVVVNEGEIILEMFGINLMM

SEQ ID NO: 179897 - protein, 168 aa, Oryza sativa
  Clone ID: PAT_MRT4530_77314C.1.pep
RSARPSPITSSSQPIRLLPWRYAAGFHPSAHQLTTTATRARTLPSSEPVNREETAHAGTSRALGRVRAAPALARPPKTPPLGQAGGGGSRSMRHAEAEILLFALRARADQQNANDKTPAPCRAPQRDRIHGPPGGWMDRRVPSKSLDTSNRRMIGTRMSRVQGETCES

SEQ ID NO: 179898 - protein, 161 aa, Oryza sativa
  unsure (1)..(161): unsure at all Xaa locations
  Clone ID: PAT_MRT4530_77315C.1.pep
XCXSTXLQWXVXWVXXPPSEFFFFFYEDTNYXXIYVTPXYXLSXMMXXELXYXFVXXIXSXXXTXPRXXWXXXWXXQGYLGYETXXAEXXXDPSNXKXEPXSXXXXHXPXAGFXSXXAWTXLXHXXTLLTRWLRGPXQSVXTXPXSHDXTQLIXXXASXVA

SEQ ID NO: 179899 - protein, 237 aa, Oryza sativa
  Clone ID: PAT_MRT4530_77316C.1.pep
HTWWRRVRPPITNGGLLIGYRASSSPYSDSFALGSSDVWLVSVKCSLLGAGIERGGLLSLLQPPYHRLCRCRNRGEEGCSSRRSACVRKRGEEKDEVVDNMAPDGGRRQLGVVVSSSAVRAVCGGRRWRPAGVAARGAWRGDGTFSCRSRPNSPSHSRSSPCGSTKHTERAVRVPMNHHERDRPRAAAAAATRRRPTGDVLLLPLSSVRSVERRNSHAPHAVVGVAVKRPVACVGVD

SEQ ID NO: 179900 - protein, 57 aa, Oryza sativa
  Clone ID: PAT_MRT4530_77317C.1.pep
YMLTLDSSHHTAVSSYTHVACVDHGLSSNLDSPVIHIGYIDSIVVNYTLTHTSLLVC

SEQ ID NO: 179901 - protein, 79 aa, Oryza sativa
  Clone ID: PAT_MRT4530_77318C.1.pep
GGRRYLQDLLLLHWEDQSYHHQQNHHQNYYGHRQMSQDQYHHQQNHHQNYHGRQGMNGNQYHDRQNHNQNPQRFRPWKP

SEQ ID NO: 179902 - protein, 718 aa, Oryza sativa
  Clone ID: PAT_MRT4530_77319C.1.pep
MAAPAADDDDHRAALPREEDDGEEEEGSEEEVESDDEEEEEGEGYDWSEEDDPEAASLAGICDPDAGSYDDPTFDPAADGDLEVDAVLRSRMARMSLSSARKDRKGSRMPKMGKEEMDLLAMVDKLMHGQFFLRLPLCDCDISNNVMQTDGQLEKLKVYECKAYLRMHKLRLSGNKEVLLTRIRGQIEYELYPLCNLSFFFICYLSTLLIFCNANELLLFDHFLVLQNQGENYGRGDSCKGDVVVFEQNIYKRKKGAPRGVKGHLCGQRTNAGRIIKESYGTKKQQHTFTPWLDEEERNRALQEKHARGYVARKTREVRIKDKENERMRRLNRNKENKSKGQDNMNKKSSQAVFPQHTVTTNTVQKRAEKIIPSLQHGESGNSSQQHLSSKQTPTEQLLHYLPQFPHPQQHNEVLLQKGTSRTSTTQLINHQAPSLQHAVKVETTQQQQQQQPPKSIKPAPIQQSSAYPQQYPKHQHHNQALPRVPPSQEQRAAVSQTSAARQDFTNHQAPPSRQHGGSENMRRQEISSRPTPTPTPQQAVSYTQQQPPNHQYRNEAFWQQGGTSTSRTGFMDRQSNNWGSTDHDKPAFQPFTQKAKTYQHGSNGSGHHQARVDRETHQPLRSRNQDYHWEDQSYHHQQNHHQNYYGHRQMSQDQYHHQQNHHQNYHGRQGMNGNQYHDRQNHNQNPQRFRPWKPCFIYQQQGWCPYGENCKFMHDLR

SEQ ID NO: 179903 - protein, 70 aa, Oryza sativa
  Clone ID: PAT_MRT4530_7731C.1.pep
AFASYDLAHASARRRRHRSPCLRPRLTCPRPSEICLTSTHYIILVRTCRARLTEVVDRQSNRVYTFGPGR

SEQ ID NO: 179904 - protein, 73 aa, Oryza sativa
  unsure (1)..(73): unsure at all Xaa locations
  Clone ID: PAT_MRT4530_77320C.1.pep
MKIIFVFARLAIVACNASARFDALSQSYRQYQLQSHLLLQQQVILDPCSEFVRQQHSXQPIPSWQPADFIDNT

SEQ ID NO: 179905 - protein, 100 aa, Oryza sativa
  Clone ID: PAT_MRT4530_77321C.1.pep
SPVYSGGRLLACTFFRGAHDGETGESARRINHRENTLSRTALEKEGIPLRKNATTTISPAKKKLEKQQRRKLINMQTWEEGFGHGGIHVFRVPAAARDPL

SEQ ID NO: 179906 - protein, 37 aa, Oryza sativa
  Clone ID: PAT_MRT4530_77322C.1.pep
STMRQEQSSLRWLVEHGSVRCSQVPGRYIIAIRANAW

SEQ ID NO: 179907 - protein, 56 aa, Oryza sativa
  Clone ID: PAT_MRT4530_77323C.1.pep
AGTPAGAGPQYSGRPTRSINSPIQIAFMLENERKLIILDTSLNITCKNIIKAPHIE

SEQ ID NO: 179908 - protein, 95 aa, Oryza sativa
  Clone ID: PAT_MRT4530_77324C.1.pep
MCTCGGELFFFSAARRWRHRVEMKRRLYLWPSLSQSRNGCGRLFLGRVGSVCGVRLIFAHPYHRGLTSPRLRTEPSLPRATVAIEGSVAVDRRHR

SEQ ID NO: 179909 - protein, 289 aa, Oryza sativa
  Clone ID: PAT_MRT4530_77325C.1.pep
MRLTRLGMMKKNGKRTTMDHGTAKKTRSVKVAKKTEAGLCTDQQQDVEEETTKMTYSIDSDSLDARTGTPRAAPAASSWMDRACPSCNEPIGDIRCRPLEKVLAAMSAPCKFRASGCMETVGFTERLSHEASCTHAPCGCPFDGCTYLGLLLYNHILDEHATDAVVAMGSLRGTTVTVHKSKPFNVLLHRGGTRGGNRVFLLLNGGDVLSGRSLSLVSVGPPPTANCELLYKIELAADGPGPCTGVLKLSASGTVPCVRRLEGFNAKAFLFVPDSYWGSSDTVSVTVLI

SEQ ID NO: 179910 - protein, 386 aa, Oryza sativa
  unsure (1)..(386): unsure at all Xaa locations
  Clone ID: PAT_MRT4530_77326C.1.pep
FCPLASVPPSESETDSDYIPGDDCPXDDDEETVEIEKHFKEVKKKVKTAQLDILDDVFFVVERSNPSDRPAADEGDETPYVDSQYDDSIEEIGSDGEVRIRRDKHPRYKKREGVLVFELGMKFNGKKQFKKAMTRYVLAEKKVVNFMKDDRIIKLSXTGRIAEKYXEFIAAIPSWNLSHMKATVQEEMFAEASISKLKRAKSIVMKKQMDATKGQYQKLFNYQLELLRSNPGSTVVLNKIVGRVLAQEVLSHQQLRISHHPFRIRTWFCLTQLKAMLKVEEEVSWVFLQTPMDSXNKVRVNAKAKVSAQHGGSARIDLQAIVPYSQSSTSASVRVTSGSASICVSAEEPAYAKSRRKTSGALLLLPWECPRTGPGGPTKGRVDGPL

SEQ ID NO: 179911 - protein, 37 aa, Oryza sativa
  Clone ID: PAT_MRT4530_77327C.1.pep
MASSYSIHFTMTAGEGHNGREHLADWMDRWDSHTVIS

SEQ ID NO: 179912 - protein, 66 aa, Oryza sativa
  Clone ID: PAT_MRT4530_77328C.1.pep
LIFPLHLLFTNHFYNQPLHIFITSLSTSSLTSTFITPILLLFFYSFPYYLFLYILFYLFSSLLHIS

SEQ ID NO: 179913 - protein, 1254 aa, Oryza sativa
  Clone ID: PAT_MRT4530_77329C.1.pep
MPSWRAWRSAAATQMVWWSAEVPARALVGGGDTDGGVDGVFQGAAALLAFTRTGGAPVGGQRRPRPPLPPELACSTAHPRRPLPGKKREKGEGRREEGKLIVCWVRGGYSINTIKRLPKSVHSSLRSSIVLFDLSRVVEELVYNSIDANASKIDISVNARACYVKVEDDGCGITRDELVLVGEKYATSKFHNVMVDGEPSSRSFGLNGEALASLSDISVVEVRTKARGRPNSYCKIIKGSKCSHLGIDEQREVVGTTVIVRELFYNQPVRRKQMQSSYKRELHLVKKSVLRVALIHPQVSLRLFDIESEDELLYTIPSSSPLPLVSNILGKNVSSCLHEIATSDKHFALSGHISRPTDVFCNKDWQTVMYFFERTITDYWKKHAPQLPEVKAIGNDTCVPLERDVKSSQELLRRHGVQKKEDVAELYQTALQKNTVRDMNFDTAAPAEPKDNYLSLDMEPSTWRACYDQISDASHTDDVARNGRKFGHKQICSLQSYSYQWLEDGSSLLEDSDLSSANPTICKMQKTEDIFHGHAYSGKFGLLQDAEIEIGPEIKLQEYCFESPNKPNRMTCDFVQKQTNIEAHISGRDGFYVDFDKLNEDCLLNEISKTITDVSCPQMPHFNDGLCPEDVGSSKSSCSVRKKSSKRQNSANAIAQMKFHDMQAVCESDYMDRSFIKDTCGLHFFHPFSLADTPRSHSRARIDLELHGRSNESINSWNCENIGTDFGFTSDRFNIDSSMIFEGSKHLNNFGNGTQSPSYFNHEYCSVGQFASKQDRIPLKSKHDARMSYDISPEKSSTGCHLNVSFSQVAKSSKLTEDQYGCSQRPRLSRGRYRSRSAPPFYRGKRKFPRLNEPLTKLTTEGGKYTTVNDSGDITPVQEYTSHMNATQPIPETFSNDFSDLNFSLKGNVKMCEEKCSDELEDSTASDEITKWRDDSDHHAVEHFVPRVSELQHGPFEHDDDVLSISYGPLHLSCSVLVPECIDKNCFEEARVLLQLDKKFIPVISGEVLLLVDQEEFIFYVHILYEVVSVYMVTKHAADERIRLEELRRKVLSDDGRGITYLDSEEDLVLPETGFQLFQKYMQQIQSWGWIINSTNSCESFKKYMNVLRRQSRRLTLAAVPCILGVTLTGKDLMDFIQQLDDTDGSSAIPPAVIRILNFKACRGAIMFGDPLLPSECSLIIEELKATSLCFQCAHGRPTTVPIVNVASLRGELARLGAVNGRQEETWHGLSHHGPSLERARTRLRELRKLRGGL

SEQ ID NO: 179914 - protein, 101 aa, Oryza sativa
  Clone ID: PAT_MRT4530_7732C.1.pep
LQSPEAGPKGESFFFVTRGPTTPGRPFKARAPPGGKSGVSKGAKKRSVIKFPTPFKESWFICRVQPLFAGPVPGVFSEKNKKLWPRSFSSSPRSGAQKFCP

SEQ ID NO: 179915 - protein, 60 aa, Oryza sativa
  Clone ID: PAT_MRT4530_77330C.1.pep
FIKGRPVLFILPRFSPVKGADPVAFFFGGQIVERGPPDGFFTRGGFFRALVKGHLQGPRF

SEQ ID NO: 179916 - protein, 146 aa, Oryza sativa
  Clone ID: PAT_MRT4530_77331C.1.pep
MPSGPASKKENVITKSVEKVKETTTTVVQGTQLLAIDTGAAMGLLRRALIGDELTHKEKQALQRTLTDLASVVPIGILMLLPVTAVGHAAILAFIQRYVPSMIPSTYAPERLDLLRQLEKVKEMGVAEGSSEEMVEAFSSRGDQVK

SEQ ID NO: 179917 - protein, 376 aa, Oryza sativa
  Clone ID: PAT_MRT4530_77332C.1.pep
MADEDIQPIVCDNGTGMVKAGFAGDDAPRAVFPSIVGRPRHTGVMVGMGQKDAYVGDEAQAKRGILTLKYPIEHGIVNNWDDMEKIWHHTFYNELRVAPEDHPVLLTEAPLNPKANREKMTQIMFETFNCPAMYVAIQAVLSLYASGRTTGIVLDSGDGVSHTVPIYEGYTLPHAILRLDLAGRDLTDHLMKILTERGYSLTTSAEREIVRDIKEKLAYVALDYEQELETSRSSSSVEKSYEMPDGQVITIGSERFRCPEVLFQPSLVGMESPGIHEATYNSIMKCDVDIRKDLYGNVVLSGGSTMFPGIADRMSKEITSLAPSSMKVKVIAPPERKYSVWIGGSILASLSTFQQMWISKGEYDESGPGIVHMKCF

SEQ ID NO: 179918 - protein, 783 aa, Oryza sativa
  Clone ID: PAT_MRT4530_77333C.1.pep
MRLGKQRVFIFTASTEISGVSTREHGEGYGFLYCKSHVTAEQHLQPTQDFWIAASPSKVVQADAAALGTIAADMAPVVDGFSADDDELDLDSPTEGFSSIPEAIEDIRQGKYVIVVDDEDRENEGDLIMAASKVTPEAMAFIVRHGTGIVCVSMKEDDLERLELPLMVTTKENEEKLRTAFTVSVDAKEGTTTGVSAKDRANTVLALASPNSKPEDFNRPGHIFPLKYREGGVLKRAGHTEASVDLAMLAGLPPAAVLCEIVDDDDGSMALLPKLQDFARRENLKIISIADLIRYRRKRDRLVERVCVTPLQLQWGSFQSYCYRSLIDGMEHIAMVKGDVGDGQDILVRVHSECLTGDIFGSARCDCGNQLALAMTMIEKTGRGVVVYLRGHEGRGIGLGHKLRAYNLQDDGRDTVEANEDLGLPVDSREYGIGAQILRDLGVRTMRLMTNNPAKYTGLKGYGLSVLGRVPLLTPITNENRRYMETKRLKMGHVYGTRPSGNTSTLADGGIKKEQDQIDSASEQDTSKIYTLEKVYGFRLVCRSVVDLRSQKFHTRVYKRKSYFRSSASECEKIIHSARWLEFRRQRVAFQRTRRTIHLIPLASQDDSSGLSVNGSPQVDSASEMDFPEAKEHLVAKTELASFDKSLESVEEALVKLEDLLQELHLSSSNSGKEDLRAACSDLEMIRRLKKEAEFLEASFRAKTEFLEADASSRPLSPAVEEGRGKTASNANESSTPQKPANRVENKRRPIWDLFGRPSGRRAQLVQQTSDQNVSVYAMNASK

SEQ ID NO: 179919 - protein, 53 aa, Oryza sativa
  Clone ID: PAT_MRT4530_77334C.1.pep
MGRWAIRAAPASGKTSDVRVKNRDLTLCFPFVGMVLELEQSPSTLTTTSKKIK

SEQ ID NO: 179920 - protein, 56 aa, Oryza sativa
  Clone ID: PAT_MRT4530_77335C.1.pep
PKPVWVKNENGWANFDHTLVQIVLNLCGRSPRGPSHLLAINISIRSYPILLEVAGI

SEQ ID NO: 179921 - protein, 537 aa, Oryza sativa
  Clone ID: PAT_MRT4530_77336C.1.pep
MMASTTSATAAGGAFAAAKTRAGSSAAGGGACARVAAGGRRRSGVVVRCDAGVEAQAQAQAVAKAASVAALEQFKISADRYMKERSSIAVIGLSVHTAPVEMREKLAVAEELWPRAISELTSLNHIEEAAVLSTCNRMEIYVVALSWNRGIREVVDWMSKKSGIPASELREHLFMLRDSDATRHLFEVSAGLDSLVLGEGQILAQVKQVVRSGQNSGGLGKNIDRMFKDAITAGKRVRCETNISSGAVSVSSAAVELALMKLPKSECLSARMLLIGAGKMGKLVVKHLIAKGCKKVVVVNRSVERVDAIREEMKDIEIVYRPLTEMYEAAAEADVVFTSTASETPLFTKEHAEALPAISDAMGGVRLFVDISVPRNVSACVSEVGHARVYNVDDLKEVVEANKEDRLRKAMEAQTIITQELKRFEAWRDSLETVPTIKKLRSYADRIRASELEKCLQKIGEDSLTKKMRRSIEELSTGIVNKLLHGPLQHLRCDGSDSRTLDETLENMHALNRMFSLDTEKAIIEQKIKAKVEKSQN

SEQ ID NO: 179922 - protein, 133 aa, Oryza sativa
  Clone ID: PAT_MRT4530_77337C.1.pep
RRYGFLLLEDVASQDPLSVSVAILHQVNILPEMYQVGYTKLFFRTGQIGKLEDTRNRTLHGILRVQSCFRGHQARRHARERIRGVLALQSFIRGEIARKMYSSLARKHRAAIILQRNLKCWLARRYFVNIPKA

SEQ ID NO: 179923 - protein, 90 aa, Oryza sativa
  Clone ID: PAT_MRT4530_77338C.1.pep
KKVMSFQARDSSNSKAGNDSTSKLSFKWDAGSCSSASSSAMYSPLSAVSAPAKAPSSQQQLRPWSTVPDDGEQRMAQWITTDSDFVVLEL

SEQ ID NO: 179924 - protein, 170 aa, Oryza sativa
  unsure (1)..(170): unsure at all Xaa locations
  Clone ID: PAT_MRT4530_77339C.1.pep
SNLGGGPSSAGLHWARFWTLARAFGVQTXPAGRTTASLNSNFRKVATKGPMAAKLAGLALATXVLLVWAPTPKGFPRRLTFNKIQSKTSLEGKGPGPGNHCPTVEGGVNSFALKAGKSNMKKFCLKPTSLTVKAEGVAKTAPPEFQRTKLMTRLTYTLNKIKGPFKVSSN

SEQ ID NO: 179925 - protein, 381 aa, Oryza sativa
  unsure (1)..(381): unsure at all Xaa locations
  Clone ID: PAT_MRT4530_7733C.1.pep
WEFFHLNLIKNRIFCFTPGRGPRTGITGVGAHAAPSRFHXPGCTRLAPAGAVGPTRQPHPRAGKADGRAPHGSPGARPKAASPARPTGGGAPAPRWSPAATSGATERHPREGREGGSEMAVLGSPRVDGDDGNGDRSGERRRRGSGRRGRRCSGGRRAKRRSGQGRRERGEAEGGDAEAGGGPGRGRRRTXLGVVRGEIRTTARARFRRGEKAARVGNGGGRHGECLNRGGSERGRPERKETGAAIXGSINDAGEDFGXGFQTNPREREREKWGERGRESRGVISPSLLRAGAAGCGGIRGGGGARARARRRARREVADDGWAPPVSEGGGRARPSAARARGGGXWAAGERREREGVGPSRPKRGRGGKXLLGIFLFIKPF

SEQ ID NO: 179926 - protein, 867 aa, Oryza sativa
  Clone ID: PAT_MRT4530_77340C.1.pep
METGEGDEDWEIASGVSSIAINKHSIIKRASNEHWFYNIPTSKKGGAVAKAPLNTSPTYIKGLLLKKNRVQYNMWELQYNLVKKKVHQFERKEDFLKEILDKVSSQSIPVMVGGDFNLIRHAEEKSNGHVNRRWMEKFNKFIADAELRELHRVGCKFTWTNKQVNPICEVLDRVLVSPNWDSLFPYAVVKTLTRVGSDHNPIMVLLERQGHIQTQRVFRFDRAWLTQDGFKEWVIKHGPERRKDKILDHWKCQGTVLRRKMRGWSMNNISNLRRTKEKLLSQIQKIDTEADMRQLNSDEWAQRYQLEDELSKIYLEEEIYWQGRSGEKWLLEGDANTAFFHGIANGRKRKSTILSLEDEGRQIEDPAELKQHIYQYYKNLFGAEVPPKIFLSNDMWTNEGRLTKEESEHITRPFTMVEIEQALKEMKTNTAPGPDGLPVSFYKEFWPQLKNQLKEMTDLLFEGKLDLWRLNYGVITLIPKIKDANNIKAFRPICLLNVCFKFLTKILTKRLTEVAAKVIGQSQTAFIPGRHILDGVVILHEVLHTLKKGHHSGIIFKLDFEKAYDRVQWSFLFEVLQRKGFNEKWVQWIKMATVEGRVAININGEVKDFFKTYRGVRQGDPLSPLLFNLVADALSEMLNRAKEAGHLEGLVPQLVPGGLTHLQYADDTILFLANTEENIATIKFLLYCYEEMSGLKINYQKSEVIVIGGDESDTLRVANLFNCKSGKLPFSYLGIPMYVEGEWKISLRRTLGEGELEEWGQLHALLQNIELNSGKDSMCWNLNKTGMFSTKSLYREISFGGIKDYILQELWRCHIPLKVKVFFWLMLKGKIQTVEKLSTREEEECFGYIKGLAPCQYPKDRRIKYLI

SEQ ID NO: 179927 - protein, 32 aa, Oryza sativa
  Clone ID: PAT_MRT4530_77341C.1.pep
PIQQTPPRQQVVQTIQQTPLRQQVLQPIQQTP

SEQ ID NO: 179928 - protein, 30 aa, Oryza sativa
  Clone ID: PAT_MRT4530_77342C.1.pep
ALTSSLYLLRHGCFLFIYIYMNELIAFMYV

SEQ ID NO: 179929 - protein, 730 aa, Oryza sativa
  Clone ID: PAT_MRT4530_77343C.1.pep
MEVPISGGGGGERFCHAAQVVGADGEMDGEAMARFAAGAGLLGRGLSYAVVSIVGPQGSGKSTLLNQLFGTSFTEMDALKGRSQTTKGIWIAKAVGIEPFTVVMDLEGTDGRERGEDDTAFEKQSALFALAVSDIVMINLWCHDIGREHAANRPLLKTIFEVLMRLFSPRKTTLLLVIRDKTKTPLEYLTQALKEDIQKIWNAVRKPEVYKEAALSEFFNVEVTALSSYEEKENLFKEQVGQLRQRFIHSIAPGGLAADRRGVIPASGFCLSALQIWKVIRENKDLNLPAHKIMVATVRCEEIADEKLRSFISDKGWYDTEAMYFDEDVRTAKRQQLESEILKHTYDAFKKMLEHLHHVVLNKFKSDLEQSLRSGEGFAASARYCVQSSMAEFDAGLRDALVKHAEWDTTKVRSKLEQHIEAHATSVRGTKLAELKANYEKKLLDTLAGPVQSILETGEKDSWACIRRLYRHATESAILAFSASLSEFELDQTTIRKMVMELREHARSIVEEKAREEAGNVLMRMKERFSTVLSRDKDSMPRTWKGNEDIRAITREARLAALRLMSVMAAVRLDDKPDKIDRALTTALLDGGPLSQKRSIEFTSDPLASSTWEEVSEKNTLITPVQCKSIWRQFNAETEYAVAQAISMQLSGLLTITSGFLPTIMDIITAVINMSHNQKSSSHPPRHRPPLHPQSFRNQAQQQSQAQVQYQAPSSLSSSSSVGSNSDDES

SEQ ID NO: 179930 - protein, 325 aa, Oryza sativa
  Clone ID: PAT_MRT4530_77344C.1.pep
SGPRKTTLLLVIRDKTKTPLEYLTQALKEDIQKIWNAVRKPEVYKEAALSEFFNVEVTALSSYEEKENLFKEQVGQLRQRFIHSIAPGGLAADRRGVIPASGFCLSALQIWKVIRENKDLNLPAHKIMVATVRCEEIADEKLRSFISDKGWLELETAANSGLVPGFGKKLNAILDFYLSEYDTEAMYFDEDVRTAKRQQLESEILKHTYDAFKKMLEHLHHVVLNKFKSDLEQSLRSGEGFAASARYCVQSSMAEFDAGLRDALVKHAEWDTTKVRSKLEQHIEAHATSVRGTKLAELKANYEKKLLDTLAGPVQSILETGEKDS

SEQ ID NO: 179931 - protein, 175 aa, Oryza sativa
  Clone ID: PAT_MRT4530_77345C.1.pep
MLLLVIIAHSKPQRPLLDPSTASMGASTTHPDRCATEERVEAALPLVLVAHSHGRRRGERKDLAPTRRGVKGFSAREGRREGRSGELRACFGRPALSLHGDHRCKQPSAWLAVTASAFHESMHHLPSPPISSATFTAEHLDGLAALTSMTSYALATTTSKNYAWKAMALLGDTPN

SEQ ID NO: 179932 - protein, 77 aa, Oryza sativa
  unsure (1)..(77): unsure at all Xaa locations
  Clone ID: PAT_MRT4530_77346C.1.pep
GSETQPGGGVLGRGLGTVVPVSVAGEDNYDVGDPDLCXLLHCLRGVYYYLSDYAALGIAILWVKDSMCPWLYAYLPV

SEQ ID NO: 179933 - protein, 140 aa, Oryza sativa
  unsure (1)..(140): unsure at all Xaa locations
  Clone ID: PAT_MRT4530_77347C.1.pep
TRETEDGERLPPPAAIPSHSXRPGRHSAQSHAPVQLCGRSKGQEHGTCPSASDTLASSLLSPSCACAGRRRRLCPITPFCVNTIGLGPQKLGVFLRGLYGYICCKLERAIVRRIGSSHAIRKLDFCLTCVPWLDKCMRQV

SEQ ID NO: 179934 - protein, 195 aa, Oryza sativa
  Clone ID: PAT_MRT4530_77348C.1.pep
RKACVCKITLQEQVNIKIPLVSPSLNPMSNNPEQNHFNWSKGKRGGRRGSGPPPTDHGNSADQHIRPGRNQERVRMAWSTQPTAPPRILLTRSRRCRRRFRAGWEGSNRSSEEDDGNHLTSQRQSMGALPRAASGDGWERRRLAGSRSHQHLEGAPISFHIRRRGHRKSCSSPPPSGPSTNIRFVASHPRAEFLQ

SEQ ID NO: 179935 - protein, 848 aa, Oryza sativa
  unsure (1)..(848): unsure at all Xaa locations
  Clone ID: PAT_MRT4530_77349C.1.pep
SGRAFPAATSHRLLRRDADALELTPPPPTTARRHRDVRARGRALVVGPIPKGKKDYSTSDPGRGRSRRTRLVVDEATNDDNSVVXPLHPDTMARLPVXRRDTVLRRGKKRKDTVCIVLAAETCAAPTIRRNKVVTKALRVRLADVVAAPPCQGAPAAARLHMLPIADTVEGITGNLSDAFLKPYISEANRPVRMGDLFLVTGGMRTEEVKVIETDPTDYCIGAPDTEIFCDGEPIKREDEERLDEXVGYDDVGGVRKQMAQISELVELPLRHPQLFKSIGVKPPKGILLYGPPGSGKTLIARAVANETGAFFFLINGPEIMSKLAGESESNLRKAFEEAEKNAPSIIFIDEIDSIAPKREKTNGEVERRIVSQLLTLMDGLKARSHVIVMGATNRPNSIDPALRRFGRFDREIDIGVPDEVGRLEVLRIHTKNMKLAEDVDLELIAKDTHGYVGADLAALCTEAALQCIREKMDIIDLEDETIDAEILNSMAVTNDHFKTALGTSNPSALRETVVEVPNVSWEDIGGLENVKRELQETVQYPVEHPEKFEKFGMSPSKGVLFYGPPGCGKTLLAKAIANECQANFISVKGPELLTMWFGESEANVREIFDKASQSAPCVLFFDELDSIATQRGSSVGDAGGAADRVLNQLLTEMDGMNAKKTVFIIGATNRPDIIDPALLRPGRLDQLIYIPLPDEQSRLQIFKACLRKSPVAKDVDLNALAKYTQGFSGADITEICQRACKYAIRENIEKDIERERRSKENPEAMEEDEVDDIAEIKAAHFEESMKYARRSVSDADIRKYQAFAQTLQQSRGFGSEFRFERTEAGAGAAADPFASAAAVADDDDLYS

SEQ ID NO: 179936 - protein, 114 aa, Oryza sativa
  Clone ID: PAT_MRT4530_7734C.1.pep
YKYLDFSGRHKSDEGRLRPSRCAFARSPRIPIPLTIRYNRNNSQNRHNQITQPQSSQNHKINIQEELQYTSQSQNYITKFHSPAAGSNLDRRHCHPQPSPCYPSMAAATATGGR

SEQ ID NO: 179937 - protein, 962 aa, Oryza sativa
  Clone ID: PAT_MRT4530_77350C.1.pep
MAEAIILALSKINSTFGLDPTNIAKSAVSKLYQKGKSLAELPGKVEEIRMELTTMENVIEQLDTAHLTDKVIKGWIAEVRKLAYHVEDVMDKYSYHALQMEEEGFLKKYVVKGSHYAIVFDGIVAEIVQIEQEIQRVIKLKDKWLQPSQLIRNKHSDFERKRSQGCLPELVKDEDLVGIEGNRMLLTGWLYSNELDSTVIIVSGMGGLGKTTIVANVYERGKIRFHAHAWIVVSQTYDVEELLRKVLRKIGYADQAHLDGMDVHDLKEKFKENISDRRCLIVLDDVWDREAYNQIHDAFQNLQASRIIITTRSKHVAALALPTRHLKLQPLDKVDAFSLFCRRAFYSRKDYDCPSELLELANSIVDRCQGLPLAIVSIGSLLSSKQPIQHAWKQTYNQLQSELAKSDHVQAILNLSYYDLPGDLSNCFLYCSMFPEDCPMPRDNLVRLWVAEGFAARKENNTPEDVAEGNLNELINRNMLEVVETDELGRVSTCKMHDIMRDLALFVAKDERFGSANDSGTMMLMDNEVRRLSMCRWEDKGVYKAKFPRLRTLISVQTISSSSNMLSSIFSESTYLTVLELQDSEITEVPTSIGNLFNLRYIGLRRTKVKSFPETIEKLYNLHTLDIKQTKIEKLPRGIVKVRKLRHLLADKCADEKHSDFRYFTGVQPPKELSNLEELQTLETVEASKDLAEQLKKLTQLKTETLCFKTLEPISGRLHKLIVRGHWANGTLQCPIFQDCGRNLKYLALSWCHLGEDPLSLLASHVPYLTFLRLNRVYTTKTLVLSAGCFPELKTLVLKHMPDVNKVEIEDRALPRIEGLHIVSLYNVKKVPEGIEFLRSLKKLWLLHLHKDFNTYWESNGMHEKMAHANTAKTLILSAGCFPVLKTLVLMHMSDVNKVEVEAEALPHIEGLHIVKKVSEGIEFLRSLKKLWLLNLHKDFNTYSKRNGMHEKMVCGQEVCRI

SEQ ID NO: 179938 - protein, 38 aa, Oryza sativa
  Clone ID: PAT_MRT4530_77351C.1.pep
SPWCFLSKGQGFFSVWGRTSRGFGTCIWLMEQVFSGVG

SEQ ID NO: 179939 - protein, 118 aa, Oryza sativa
  unsure (1)..(118): unsure at all Xaa locations
  Clone ID: PAT_MRT4530_77352C.1.pep
VLLHHELPXRRFHHRXHHHHHRPPXRPPHPAAPVSQTTPPKRASPPPRRLPIGILRRRRRFPGGGGSEIYRLRKPARSSGWWGGRRRAGAISTAACVRACEESESPQSPAGCSVQAKA

SEQ ID NO: 179940 - protein, 86 aa, Oryza sativa
  Clone ID: PAT_MRT4530_77353C.1.pep
MTPYRRTKSLMYLLDDRKFDLKSNDKHTTPLRNGSSKRRLQGENDANSTVAARLRTGRGFHLKNPLREERKCSNAPRGKRRPQPEG

SEQ ID NO: 179941 - protein, 736 aa, Oryza sativa
  Clone ID: PAT_MRT4530_77354C.1.pep
LPPNFNVTRSYGISSRATKKLVKLKVVYNNGDNFNEDEFPDKPPANVERRHIGTSVVGMECYLDKALGYLRKRDIPVLGIWGMGGVGKTTLLKLINNEFLGAVDGLHFDLVICITASRDCKPENLQINLLEKLGLELRMDTGRESRRAAIFDYLWNKNFLLLLDDLWGKISLEDIGVPPPGRDKIHKVVLATRSEQVCAEMEARTTIKVECLPQDDAWKLFLHNVTEATINLDMRIQRLAKEVCNRCKGLPLALVSVGKSMSIRRQWQEWEAALRSINRSYQLLENSRRNSDNAILATLKLTYDNLSSDQLKQCFLACVLWPQDYSIWNIDLVNCWIGLGLIPIGKAICQSHNDGYSVIGQLKSVCLLEEGDMRQTEVRLHDTIREMALWITSEENWIVKAGNSVKNVTDVERWASATRISLMCNFIKSLPSELPSCPKLSVLVLQQNFHFSEILPSFFQSMSALKYLDLSWTQFEYLPRDICSLVNLQYLNLADSHIASLPEKFGDLKQLRILNLSFTNHLRNIPYGVISRLSMLKVFYLYQSKYAGFEKEFDGSCANGKQTKEFSLKELERFENGLALGITVKTSRALKKLSKLQNINVHNLGVEQLEGESSVSLKLKSSMSVVNFKMCLDIETLSIEYVDDSYPEKAIPYLEYLTFWRLPKLSKGFFKVFDKNLETFEPTLGTNPFIVSNSSFFARRRPMMRTAIQFSSYISLLLGASLCHAIPLFAKNFDSN

SEQ ID NO: 179942 - protein, 1016 aa, Oryza sativa
  Clone ID: PAT_MRT4530_77355C.1.pep
MMCRAGQWLLPHLAYPFKTAQNVDKLTKFRRKLQALRDDNEVRIKNAERKQKICPNIVSEWMEEARQAIDEADEIKAEYDSRTLCFHRLPPNFNVTRSYGISSRATKKLVKLKVVYNNGDNFNEDEFPDKPPANVERRHIGTSVVGMECYLDKALGYLRKRDIPVLGIWGMGGVGKTTLLKLINNEFLGAVDGLHFDLVICITASRDCKPENLQINLLEKLGLELRMDTGRESRRAAIFDYLWNKNFLLLLDDLWGKISLEDIGVPPPGRDKIHKVVLATRSEQVCAEMEARTTIKVECLPQDDAWKLFLHNVTEATINLDMRIQRLAKEVCNRCKGLPLALVSVGKSMSIRRQWQEWEAALRSINRSYQLLENSRRNSDNAILATLKLTYDNLSSDQLKQCFLACVLWPQDYSIWNIDLVNCWIGLGLIPIGKAICQSHNDGYSVIGQLKSVCLLEEGDMRQTEVRLHDTIREMALWITSEENWIVKAGNSVKNVTDVERWASATRISLMCNFIKSLPSELPSCPKLSVLVLQQNFHFSEILPSFFQSMSALKYLDLSWTQFEYLPRDICSLVNLQYLNLADSHIASLPEKFGDLKQLRILNLSFTNHLRNIPYGVISRLSMLKVFYLYQSKYAGFEKEFDGSCANGKQTKEFSLKELERFENGLALGITVKTSRALKKLSKLQNINVHNLGVEQLEGESSVSLKLKSSMSVVNFKMCLDIETLSIEYVDDSYPEKAIPYLEYLTFWRLPKLSKVSFGEDLLYIRMLNIVENNGLVDLTWIVKLPYLEHLDLSFCSMLKCIIAETDDGEESEIMADNTRVHAFPRLRILQLNYLPNLEIFSRLKLDSPCLEYMDVFGCPLLQEFPLQATHEGITHLKRIRGEEQWWSKLQWDCNKTFDHYKGFFKVFDKNLETFEPTLGTNPFIVSNSSFFARRRPMMRTAIQFSSYISLLLGGQTSNYTGETSETGSRNLEAHSCRRYKMGIASVIRSCCIFLIGLCLLWYSASVFFHYALAKK

SEQ ID NO: 179943 - protein, 529 aa, Oryza sativa
  Clone ID: PAT_MRT4530_77356C.1.pep
MGSIAQIAVGATTIMCRIGGWLLPHLTYPFKTAQNVKKLTELRRKLQARRDDIELMIENAERKQKVCPHVVRDWMEDAEHAIGEADEIKTEYDNRTPCFQRLTPNLNVARSYRISKRARKSMIKLKQVYAGGEFSEGEFPCKPPPKVEHRPIGTSVVIGMEHYLDMVMCYLREKDKNIPVIGIWGMGGVGKTTLLKLINNEFLGTVDGLHFDLVICVTASRSCRPENLQINLLEKLGLELRMDTGRESRRAAIFDYLWNKNFLLLLDDLWEKISLEEIGVPPPGRDKIHKVVLATRSEQVCAEMEARTTIKVECLPQDDAWKLFLSNVTEATINLDMRIQRLAREVCDRCKGLPLALVSVGRTMSIRRQWQEWEAALRSLNKSYQLFEKSGLKKENAILATLRLTYDNLSSDHLRECFLACAIWPQDYSIWNIDLLKRVCLLEEGDIGHTEVRLHDTIRDMALWITSEKGQHIGSGLGHNYTSVRKIQWGFVAEIAGGPGDSCGVARFGTTAGHDDARSLAEEDDDQKN

SEQ ID NO: 179944 - protein, 41 aa, Oryza sativa
  Clone ID: PAT_MRT4530_77357C.1.pep
MSGDQADDVGCDNSAFVENVLDNGVYSTITYSKENRASPQR

SEQ ID NO: 179945 - protein, 53 aa, Oryza sativa
  Clone ID: PAT_MRT4530_77358C.1.pep
VELEDDLVCMHSYIHDKQLYLSCTGTAENSCMCKLAPSTLYFCMFNLSRTCNY

SEQ ID NO: 179946 - protein, 100 aa, Oryza sativa
  unsure (1)..(100): unsure at all Xaa locations
  Clone ID: PAT_MRT4530_77359C.1.pep
PPLENXXXPXXXXLXAKKXXXGFXFGXXQPLVXGXXXLXGXXXXPGWVXCXPNXGKXKXXLXXXXXXXXTXQXXXXRXWXFPSLAXXTXPIPXXIRXLGN

SEQ ID NO: 179947 - protein, 164 aa, Oryza sativa
  Clone ID: PAT_MRT4530_7735C.1.pep
MAGTVLLLRLVFFHVVVLRSSAVGSKSAHHRCGPSAMTPCVAPSSLQCGPGPLWPSSAVAQHRRPQPCRPERRQLTGMEPELAILAELLPLRCDCPASIVAIDCLPLQLSPPCTASWPPDFHRAAAQPAPSRRRCSVRSPPPRPLPSAHRGHIRLRGRSLVRRP

SEQ ID NO: 179948 - protein, 62 aa, Oryza sativa
  Clone ID: PAT_MRT4530_77360C.1.pep
GGLIFKGGGVPPRFIPRFMYWFFGRREFPPRALFFGKLKGFLPKKKKKNMKQTKNIKKSPRN

SEQ ID NO: 179949 - protein, 88 aa, Oryza sativa
  unsure (1)..(88): unsure at all Xaa locations
  Clone ID: PAT_MRT4530_77361C.1.pep
PLKGVTTASSDVPSNKVILCSGGTRALASTEGQHSRESLVWPSKPCFVPEDEGSHCRRHMLKGAGMQADWNAIVARXEMKLPEDAQHL

SEQ ID NO: 179950 - protein, 83 aa, Oryza sativa
  Clone ID: PAT_MRT4530_77362C.1.pep
MGRDNDNYELYAAATLLLALAIARDRDREMLQRYTSYKLARLYINGQKSIPEPFILCCYNTSDNARGDKDAYGWMDDDAWMMI

SEQ ID NO: 179951 - protein, 85 aa, Oryza sativa
  unsure (1)..(85): unsure at all Xaa locations
  Clone ID: PAT_MRT4530_77363C.1.pep
MASSSGSRGSAVLVAGGGGGSSTAVEEELRALMEQRRAKRMLLNRESARRSRMRKQSHXLDDLTAQVAHLCRKNAHVVTALGLTS

SEQ ID NO: 179952 - protein, 151 aa, Oryza sativa
  unsure (1)..(151): unsure at all Xaa locations
  Clone ID: PAT_MRT4530_77364C.1.pep
FFFFFFYRIKTFLLPQLXNGWNRVAILSPQNTVSAHQYLQTKARIAFAAHGWHSLQPEPAQHKAHTRSTHKPTRXTHTQATIPGLFFVLHSITTQAVRFSFHFLSLPLPPSHDMGVMANGQWRXGHLGFVAWAQGLAVPLLEDSSEHWXST

SEQ ID NO: 179953 - protein, 70 aa, Oryza sativa
  Clone ID: PAT_MRT4530_77365C.1.pep
EQQNAQGAYSSTAEVKEEVKCIKAIIERLIQRDGHLIVIDEGAAPAADDGAARRTSESRILAVNPNYVID

SEQ ID NO: 179954 - protein, 656 aa, Oryza sativa
  Clone ID: PAT_MRT4530_77366C.1.pep
MSHPSSSSSSAPPAAAEATSLAPGFRFHPTDEELVSYYLKRKVHGRPLKVDAIAEVDLYKVEPWDLPARSRLRSRDSQWYFFSRLDRKHANRARTNRATAGGYWKTTGKDREVRNGPTTVGMKKTLVFHAGRAPKGERTNWVMHEYRLDGQTTIPPQDSFVVCRIFQKAGPGPQNGAQYGAPFVEEEWEEDDEDVGLLPVEEKDNSDDQEKEISGAMEKGYLQMSDLVQNLVDQNENGTIALPVSDNSNNSNHSEDVDGNSGDILSDQNLGSNFLHHVEPVEQNGLVLNENMFSSANAGDLFNISSPNDGFLELKDFADIADLENPLANESTIWPSDGWPWKSTDSMEAVNGASNEFSPLAGEQIFQPEELEQLLQSLQEDSHMGSTISDPPHSSITNLAKPEEDCLMFYDAPFDSSMCDDGFRQLNGFLGSPSTNLSGIDMVDDGMPYYDAMDDNLFNDLLSSVQPSAGSSSHAFSGPVLTQEVNNSTYTYSPTQKVLEPNFVVGAPSSARLPEAGSQLNYVVLPDSQTKSSLIGKRFVKILDSISAPPAFAAAEFPASLRKSLAPISGAHHNTIRVSAEVISIGSLTPDSQDKWSLEKDEGMELLFSAGFEPDTRVHFGCNTITAVLRGGFCLFFFSAIMLLVSYEVGMCIYGK

SEQ ID NO: 179955 - protein, 64 aa, Oryza sativa
  unsure (1)..(64): unsure at all Xaa locations
  Clone ID: PAT_MRT4530_77367C.1.pep
GRSSSYELLHHKPAGIVLNYRTEWSGIHPKAEIDKAAELRQRHAIATGNDRTKTYXAPSSSSPS

SEQ ID NO: 179956 - protein, 63 aa, Oryza sativa
  unsure (1)..(63): unsure at all Xaa locations
  Clone ID: PAT_MRT4530_77368C.1.pep
QXRSLLNCFLYKDSSSCKSALHGHGGHALDSAQTYKPKTILETVQILCTENGKGDDLFRQLTA

SEQ ID NO: 179957 - protein, 52 aa, Oryza sativa
  Clone ID: PAT_MRT4530_77369C.1.pep
GPPMAQVFPPFPKRDFERAGETPPAFCNVDIPNGPGGVCNWLGDPRTPKTGP

SEQ ID NO: 179958 - protein, 54 aa, Oryza sativa
  Clone ID: PAT_MRT4530_7736C.1.pep
LLELNAKGAPLINTTLTTSVFRPIANNVREAFLVLSLSRISSSGTGNQWVLSSD

SEQ ID NO: 179959 - protein, 91 aa, Oryza sativa
  Clone ID: PAT_MRT4530_77370C.1.pep
TDLPTLVNHQEQVLDREDTDEEQRLLAALEIEVKPMAMQIDYPEWATAFSWGHEVFKKLIENIIGWKNPASTYSRKQELLGFFSSKRMSNG

SEQ ID NO: 179960 - protein, 95 aa, Oryza sativa
  Clone ID: PAT_MRT4530_77371C.1.pep
APAASGGAPPPPPPPSPTRPSRPPPAAPPPPAPPRASASPPPAPAPPRWARRGTCGTRRATRRGRTRWRGRRRRTPPPSRPPPSATPCAASGATR

SEQ ID NO: 179961 - protein, 136 aa, Oryza sativa
  Clone ID: PAT_MRT4530_77372C.1.pep
PRVRVRPSLSFGCGYDQQVGRNGAAPATTDGLLGLGRGSVSLLSQLKQQGITKNVLGHCLSTSGGGFLFFGDDMVPTSRVTWVSMVRSTSGNYYSPGSATLDFDRRSLSTKPMGVVFDSGSTYTYFFAQAYQTTIF

SEQ ID NO: 179962 - protein, 550 aa, Oryza sativa
  Clone ID: PAT_MRT4530_77373C.1.pep
MSRSSRGGRQSASSATRMASRARPGFPVAPPPPMGPPPPPPMPPVPVMYLRGVPPPPPWLPQHLIICGLDPAAAERTDAFRSKSLLNFISRTGVLPSPEEELKRQVVVRELDKIVMGWAKRVAYDQREQYWNTTATVLTFGSYALGEFPFEIFNISYCDKRCLKCSALKAYGPESDIDAVCVGPCIASLQHHFFIVLRQMLEERPEVSDLHSIENAKAIHAFDPRLLAAVNEPSWRCLSGVRVNRQIMQLLPNIKKFQILLRCLKLWARKRGLHCHLLGFFAGIHLAILAAFVCIMHPHATLSSLFNSFFDIFSHWHWPLPVSLLDQPTPWRPHCCSFMPIVMPCSPPEFCASSITRSTFNKIKEELQRGFALTKLGVCTVEQGDRNGDINWTELFAPFPYTVRYKHFLRIVLSAPVAEELRDWVGWVKSRFRNLLLKLESIGVDCDPDPSEQADHSMIEPNVVFFWGLMYRTSTNICIDSVKEDFMKSVTNDIYGKEKCTHSDITMSIVWPTHLPKCVYAHSVYSQNRQNPRQFMMGNQLMNQDCNAVR

SEQ ID NO: 179963 - protein, 88 aa, Oryza sativa
  Clone ID: PAT_MRT4530_77374C.1.pep
EALALSQISADVHPKQYVMACLIVCHAAKCFFFLPESLCIHGALNCYVTPIYMKCSGRSVTTLTITAIWNSGIHQYMDFILIPDITIR

SEQ ID NO: 179964 - protein, 493 aa, Oryza sativa
  Clone ID: PAT_MRT4530_77375C.1.pep
MGDHQMMHAAPAAMYNGGGGGGTTSSHGVWWSNAVGVPAAATCSTTTELAGYTAWSSALAAGYDGMVADNGGKQAKSTTTASSESPGNNSSVTFQEPASIPDPAAVAAVPQPGLAGFTDWTQPFMNNGAGLHEFLQDGHHDMSASSLMNHSSNNLALQQAGHHHELLSSFGSDLLLSPTSPYGGFQSSLLRSLMEPTAKQQQQQPALAGLQQYHQYQQQMGHTPAAAAKFAQAVGARDSLQFTNDAPFWNPSAGFGMPAAVAVAAAAAQDQASVRSAKRSSPAPPRAAATLALKTAMEGVGDSSSVITKKETAFKKPRLETPSPLPTFKTDTASVLHETIEYIKFLHDQVGALSAPYLKNGAHQVPHLKNSSPDKSKHGEISLKGRGLCLVPISSTFAVASEVPVELWTPFGANFISDQNVDDWAELGCNVEESRSLKSYRSDGIVRGGGDRGDGRRLRSEVREAEEMEDEPPESRPPAARDSEVSAHEKRQE

SEQ ID NO: 179965 - protein, 97 aa, Oryza sativa
  Clone ID: PAT_MRT4530_77376C.1.pep
GRRPKAIFVGGGEDRLHTNDGENHPSSQAGKWPACENPIKKQKKLPRRRHSTGSRRRLRASPSRADPAAPALIAVRNLREREVRERISERTRGRTRG

SEQ ID NO: 179966 - protein, 129 aa, Oryza sativa
  Clone ID: PAT_MRT4530_77377C.1.pep
MSVGKKEMAPSKEDGAAAKGGARSYARCFSGLEFSVGPGSLRDADAGKLKSQIKKWAKAVVAYARQISFGSPRAAARSSSSRRAMSSTRGRDGHAEGGGGGGAATARSATFPSKSDLGEANNDEIVPAT

SEQ ID NO: 179967 - protein, 437 aa, Oryza sativa
  Clone ID: PAT_MRT4530_77378C.1.pep
MGDHQMMHAAPAAMYNGGGGTTSSHGVWWSNAVGVPAAATCSTTTELAGYTAWSSALAAGYDGMVADNGGKQAKSTTTASSESPGNNSSVTFQEPASIPDPAAVAAVPQPGLAGFTDWTQPFMNNGAGLHEFLQDGHHDMSASSLMNHSSNNLALQQAGHHHELLSSFGSDLLLSPTSPYGGFQSSLLRSLMEPTAKQQQQQPALAGLQQYHQYQQQMGHAPAAAAKFAQAVGARDSLQFTNDAPFWNPSAGFGMPAAVAVAAAAAQDQASVRSAKRSSPAPPRAAATLALKTAMEGVGDSSSVITKKETAFKKPRLETPSPLPTFKVRKEKLGDRITALQQLVSPFGKTDTASVLHETIEYIKFLHDQVGALSAPYLKNGAHQVPHLKNSSPDKSKHGEISLKGRGLCLVPISSTFAVASEVPVELWTPFGANFIR

SEQ ID NO: 179968 - protein, 63 aa, Oryza sativa
  Clone ID: PAT_MRT4530_77379C.1.pep
SWSQPCYCPFRRATRASICFSLGKERFPLHQLRNNLKKSFRLQKFLMLFLHFTFAQSFNTQAL

SEQ ID NO: 179969 - protein, 302 aa, Oryza sativa
  Clone ID: PAT_MRT4530_7737C.1.pep
MGRHACSAAGVQQKLRKGLWSPEEDEKLYNHIYRYGVGCWSSVPKLAGRLQRCGKSCRLRWINYLRPDLKRGSFSQQEEDAIVGLHEILGNRWSQIASHLPGRTDNEIKNFWNSCLKKKLRQRGIDPSTHQPISTAAAAAAAALDTSTQDQKPPATADGFALKQQQQVFDPFPVIDSFGSGFDATGMPLYGHLGGKDAAGFVDYSSVLDVSENLGYGESSSNSSNWNCGVGAPEVNNALESEPLHWATESKVEPFVGYGEGDAMEHKFGLPCHGQQEQGMTHFDFDVSRSMVVGDFNFEYFR

SEQ ID NO: 179970 - protein, 662 aa, Oryza sativa
  Clone ID: PAT_MRT4530_77380C.1.pep
MRSVMMCCLLLLLVSAAAGAEGKSEVALLLERVKPALQGEGEVGGNAQLATWTASTPLCQWRGLRWSTAATLPRELPCGNLSAGLAHHPVPDDLLLLLSIRLPASALAGHLPPELAAFSALASIFLAHNSLSGPIPLALGNAPALSLLDLASNRLSGSLPLSIWNLCSGNARLSLLRLHGNALHGPIPDPAALAPNTTCDALSLLDLSANRLSGPFPSSLVTTAFPALRSLDLSDNRLHGPIPHGLAPIHSLNLSYNNFSGQLPPDLASLPPDAFLANSPALCGPPLPHHCLPSNPLTSSAVAAIVIALMAAAVVLASLSIGWAQGRWRRAPLPPEEGTLTEDGEGKLVVFQGGEHLTLEEVLNATGQVVNKASYCTVYKAKLAEGGGSIELRLLREGCCKDAESCAPAVRRIGRARHDNLVPLRAFYQGRRGEKLLVYDYFPGNRTLHELLHGHGEQSQGMRPALTWARRHKIALGVARALAYVHAGHGEAHGSVRSSNVLVDEWFVARVAEYAVHRLLVAAAVGKADGYRAPELQSRGRCSPRTDVYAFGILLLELLMGRKASGELPAVVKAAVLEEVTMMEVFDAEVARGVRSPAEEGLLQALKLAMGCCAPVASARPTMAEVVRQLEEVRPRNSSRPSAIYSPAEPRSDAGTPTAAAV

SEQ ID NO: 179971 - protein, 100 aa, Oryza sativa
  unsure (1)..(100): unsure at all Xaa locations
  Clone ID: PAT_MRT4530_77381C.1.pep
ILAILAEALXAVFCEVMXACRRYTDHLTYKVKHLPGQIAVPIIMAHTXQGSYYMKHALKLGELYLLLKTKHDRYSLXTSPQRLVSQYEVFLLFLLFLFVF

SEQ ID NO: 179972 - protein, 55 aa, Oryza sativa
  Clone ID: PAT_MRT4530_77382C.1.pep
MARSSLKTAMPRYANSTLNRTPSAVYTAQWPLPARDDDAMVEGYRWHHDLTAAAA

SEQ ID NO: 179973 - protein, 1206 aa, Oryza sativa
  unsure (1)..(1206): unsure at all Xaa locations
  Clone ID: PAT_MRT4530_77383C.1.pep
HVGPTAPAGVSPSAPGPPWTVRLPRGSHYNDYNCGSHNSSEQHNQSSTPPSLMAPAPSDPPAMPAQSEQPKKESGGKPGPCFNCGKHGHFAGKCPKPXRAGPKFVQARINHASAEEARAAPEVVLGTFPVNSHPTVVLFDSGATHSFISKKFAGTHGLSVVXLKIPMRVHTHGNDMKTTHNCPSVTSEIKRSQLLAXKGVIDCASRTITLTNDKGEKITFRPLVPQKSVASQDQAATEEQTEIVKKSPKKLEDILVVQEYPEVFPEDLTTMPPKREIEFRIDLAPGTAPIYMRPYRMAANELAKVKKQVDEQLQKGYIRLSTSPWGAPVIFVEKKDKTKIMCVDYRAFNEVTIKNRXKYPLPRIDDLFDQLKGAKVFCKIDLRSGYPXLRIWEEDIPKTAFTTRYMLFECTVMSFGLTNAPAFFMNLMNKVFMEFLDKFAVVFIDDILICSKSEEEHEQHLHLVLEKLKVHQLYAKFSKCDFXLSEVKFLDHVITAQGVAVDSSNVESVTKWTPPKTVSQIRSFLGLAGYYRWFIENFSKIARPMTLLLKKDEKFKWSAECNQSFEEHKKKLVSAPILILPDQTKDFXVYCDASRQGLGCVLMQEGRVVAYSSRQLRPHESNYPTHDLELAAVVHALKIXRHYVIGNCCEVYTDHKSLKYIFTQPDLNLRQRRWLELVKDNDMGIHYHLGKANVVADALSRKSYCNALCTDKLQQDLEAWPTLVDQVRAAQVNDAEIAELKKNMRVGKAXDFHEDEHGTIWMGEMLCVPEDKELKDLILTEAHXTQYSIHPGSTKMYQDLKEKFRWASMKREIAEVVALCDVCQRVKVEHQRLAGLLQPLQIPKWKXEDIGMDFITGMPRTSSGHDSIXVVVDRLTKVAHFIPAHTTYTGKRLEELYLSRIICTHGVPKNIVSDRGSQFTSKFWQKLQEELGTRLNFNTAYHPQMDDQTERVNQILEDMLXACALDFGGAWDKSLPYAEFSYNNSYXGHFXMAPFEALYGCKCRIPLSWDQIGERQLFGTEVLSEAEKKVRIVRERLRIAQTQQKSYAENRRRELTFEVGDYVYLCVTPLKRVHRFQTKGKLAPCFVGPDRILEHRCEVAYQLELPSNMVGIHDVFHVSQLKKCLRVPEEQASSEHIDIQEDQTYVEKPVRILETNERRTXNNVIRFCKVQWSHHSEEEATWEKEDELKXPHLFASSSESRGRDSV

SEQ ID NO: 179974 - protein, 67 aa, Oryza sativa
  unsure (1)..(67): unsure at all Xaa locations
  Clone ID: PAT_MRT4530_77384C.1.pep
QERRPVQQGSGLHKLIRDTNFNKRNQLLPGHGSTSSMLDNLNXSSLNGHSCLKLDISNLTLMTHTMS

SEQ ID NO: 179975 - protein, 29 aa, Oryza sativa
  Clone ID: PAT_MRT4530_77385C.1.pep
YDQKYEHEIIMLMNGVSKYKLRNINVPPV

SEQ ID NO: 179976 - protein, 125 aa, Oryza sativa
  unsure (1)..(125): unsure at all Xaa locations
  Clone ID: PAT_MRT4530_77386C.1.pep
SSGDLNTTKILKSNEFWNPFQPPETILTSNGPSAFIPTSIWVILDXLESLSRYLXQTHLVSYPNSFRGSSTARHGWYDIVCGVVIARCSGLVLVGSHVVNIVLDQSKSYPLAGRSGQERERARYS

SEQ ID NO: 179977 - protein, 63 aa, Oryza sativa
  Clone ID: PAT_MRT4530_77387C.1.pep
RQQRRQGHGHRAGKGVPERVVLIKPIPSLNLARKPAHTHKNGGVGPANSAGAVAAGAASPIVV

SEQ ID NO: 179978 - protein, 129 aa, Oryza sativa
  Clone ID: PAT_MRT4530_77388C.1.pep
MAALPSPLKSGQRGRGGGVALPSPPSPSQNPNPRSGWRRRAATGPHPWQPTYRPSTPVEAESHRARGRAAIQDSAQATARRFVFDPIDLLLRRAVLSHRLCAFSPDLEAKKPTRAVDRLIECSQPALIE

SEQ ID NO: 179979 - protein, 240 aa, Oryza sativa
  Clone ID: PAT_MRT4530_77389C.1.pep
MHTISSPYQRLSATATNTLTSRSIDVRNSASFVKLPRIGLNIGNIVMSAKPNSGFSSETAQGESCTVGEKDGVIIVDHGSRREESNLMLNDFVAMFRARTGYKIVEPAHMELAEPTIKDAFGKCVQQGASRVIVSPYFLSPGRHWKQVDGYLPYVLFSTIKMKNFIQVGTIFFTQDIPALAAEASKEHSNITYVVTAPLGLHELMVDVMNDRIKYCLRHVAGNVEECTVCAGTGKCQLYP

SEQ ID NO: 179980 - protein, 157 aa, Oryza sativa
  unsure (1)..(157): unsure at all Xaa locations
  Clone ID: PAT_MRT4530_7738C.1.pep
HNYYEIITKNIAQLAHNRGHGYSNSFTLARDVPLYSQDTAPXMLPCASIPPRYLGXNCDSTPCTTQSTTAHRPWIIIIPSITRGMDSPATPTDFSPLHSLVPRNEPCYTKVTGNDLAGDREVGRAIXSHLHVEDDDANSPVLANAMDDDEWWAAASS

SEQ ID NO: 179981 - protein, 298 aa, Oryza sativa
  Clone ID: PAT_MRT4530_77390C.1.pep
LALLIRWYPGRPPAGLLDSAGAGVGRVAMAEEATLSHPSRYVKLSREHDAPAPAEDIRPGELNQPVHVPQLEGRRCSECGQVLPESYEPPADEPWTTGIFACTDDPQTCRTGLFCPCVLFGRNIEALREDIPWTTPCVCHAVFVEGGIALAILTAIFHGVDPRTSFLIGEGLVFSWWLCGTYTGIFRQELQRKYHLKNSPCDPCMVHCCLHWCANCQEHRERTGRLAENSAVPMTVVNPSAVQVMSMPESSSPVLAGRFLRDAGKRCNYICHERDEHGREPWSCFPRYGERSTIKLKG

SEQ ID NO: 179982 - protein, 153 aa, Oryza sativa
  Clone ID: PAT_MRT4530_77391C.1.pep
ALLLIIVFVLAGTVTMADHHKHQVVYSLGERCQPVMGYPMYSLPRCRSVAKRQCVGHVAPGSAVDEQLLQDCWRKLDKVDDSCCRRSKLNLMDGGIYRELGATDVGHPMADVIPACLRGDLEHSDQILPTFCNVHIPNGTGGVCYWLGYATTP

SEQ ID NO: 179983 - protein, 120 aa, Oryza sativa
  Clone ID: PAT_MRT4530_77392C.1.pep
MSALPIIVKQNSPNSKDGTTGGLRARATDSGRSDGAHAHQAPQACGCTQPAKVLDAYRAIAPAPPRPVVVRSTLGATDREPGARAGLPPAGQPTENPIRSTFGLPGDRPKTVCELSRAGR

SEQ ID NO: 179984 - protein, 64 aa, Oryza sativa
  Clone ID: PAT_MRT4530_77393C.1.pep
AILNRHYTTHPCCIGPTILNNQSRLYSSISKPGIYHSRPGAKQVINKYSIIFFMMRSVKLITKD

SEQ ID NO: 179985 - protein, 789 aa, Oryza sativa
  Clone ID: PAT_MRT4530_77394C.1.pep
MVIPWCSSMMRLLWFLFALLLARSVADAATANYTFTVESMRVSRLCNSTDIIAVNGQLPGPMIEVNEGDAVAVEVINGSPYNLTIHWHGILQLLTPWADGPSMVTQCPIQPNSSYTYRFNVTGQEGTLWWHAHSSFLRATVYGALIIRPRNGSAYPFPAPDQEVPIVLGEWWSRNVVDIESDAVSSGQLPRESDAFTVNGVTGELYQCANDTFTVDVQPNTTVLLRVINAGLNTHLFFKVAGHAFTVVAVDACYTANYTTDTLVLAPGHTVDALMVTNASAGSYYMAVQAYDSLSPTTMAVTDDTTATAIVHYNTTSTKKNATPVMPTMPQSSDSATANAFYFGLRGPPSPSAPAVPTKVDVNMTIELGLGQLPCDSTQSSCSGKSVAAAMNGVSFRLPSQMSLLEAQFNRTPGVYTADFPDAPQPSGTPMVEGTKVRRLKYNSTVEIVLQNPTAFPSENHPIHLHGFNFFVLAQGLGNFTPGNVSGYNLVDPVSRNTLAVPTGGWAVIRFVANNPGGNAPREAGDERRYRARAATAVSTQRAVARLGAAPADYGGLLVLLPKARGRRRNEEGERGVHYRDEVKGAVTMADGAGRDRSGLGPGKRRKTCARSPLPFLARTGSSGTRDGGRRQQAGHGRGGNGSAAWSETGESSERGRGGFYGVVMSVWEERKPTSSGTGARELRGEGTGSRARGQTAWAMARRQALLPAHGAGTKREKQRPGRVRKGENRGGERELEPCRFGKGERWEREALSPVFGRMQVERLGHARWLAGQGATQAAQRGRARGRTA

SEQ ID NO: 179986 - protein, 131 aa, Oryza sativa
  Clone ID: PAT_MRT4530_77395C.1.pep
MAAEYTNRVEAKKPVGDEDTSRRWRGMPAVMMKMPINGAVTNQPYRRGQQSAAVKTNHECKGTNINMINDARLEGKNSGDVGVLTPASNQKLRRTRVTMCTTIETRPTTATNTADAGMRSPPSIMEAAAGR

SEQ ID NO: 179987 - protein, 211 aa, Oryza sativa
  Clone ID: PAT_MRT4530_77396C.1.pep
FFFFFFQHTPQTLIHGHITIPFFFIGARTFIQHMGLSIPYLWGVYQPGAWVSTIIPHPTGIHGQYSLPHHTHRVGQQGRGRQHSYHHSWWFTDSQQGHVAGMGSHQPHTRVNTSTHIIISPSFIIIGTPSSHPIIRPQQPTGCVGYTIIYIMGKRNTHQLLNALYTIGFRFAGRRVGLNPWGRYPGTRVYTWHSGGHPAVSPHKLEVRHYK

SEQ ID NO: 179988 - protein, 59 aa, Oryza sativa
  Clone ID: PAT_MRT4530_77397C.1.pep
LVDEEMRGFHSSATILFRLLATCSYTRHRFWLSDNRVTPHNPQNFNSLWGNRPLTTPAY

SEQ ID NO: 179989 - protein, 61 aa, Oryza sativa
  Clone ID: PAT_MRT4530_77398C.1.pep
MARIKAHELRGKNRADLQAQLRDLTAELCLLRVAKDTGGAHNMLSKSKVVRTLIARVLTEI

SEQ ID NO: 179990 - protein, 113 aa, Oryza sativa
  Clone ID: PAT_MRT4530_77399C.1.pep
MGCAGSTPKTDDNSKKLKKPKPWKHNQAITTTQLKQMRDEFWDTAPHYGGQKEIWDALRAAAEAELSLAQTIVDSAGIIVSNSDMTICYDERGAKYELPKYVLSEPTNLIREG

SEQ ID NO: 179991 - protein, 469 aa, Oryza sativa
  Clone ID: PAT_MRT4530_7739C.1.pep
MDKGGGAGDCQPPESSSHENEEKNALVIPCSLAPIKTGKKYDQQQEEEENNWEYDEEEEEFLYDIDEDDDMMEASELIGVKHSDGSIYDPDSHPFHSLYCLDDTRETSLLPMRLSARTDHCQPCWTACIVHHGCRMMQIFSIKIAALSNAAADAPVQIYGFMAARDLFDPLRNYIFNRGRDDPFVLPGHYSDPNSLIRLSGPKRGISLENPAVIEYDLKIKKGEDEKDDLQLIDGVAAFSDLTPFHGVYSRRIHGIHGAVDISLALLRNGKESTIQIKIPKLIHGGIHLSISCFVSQIPEEIKLFDGTIVNPSKLRNFVVAVQLRTVLILDFKITPVVAAAGENGSNQIHRYCAFKATTHAANSNGDNDLSAFVSCTMAPTIPAASTHSSGHSNISIPHALGMDELPRGVQDFYGGGGRGTQRSLRMQRPLWKVLGLANGHGLSDKTEATKEVKVATFPHSSPSSAHHQ

SEQ ID NO: 179992 - protein, 132 aa, Oryza sativa
  Clone ID: PAT_MRT4530_773C.1.pep
MNQPVPEVEHLLRVQFELEQQQRRQQLQQEQHQRQLQQRQAQQLLQQQQQQQQQQQQQLILEQMLQQQLQDFDLLQSLQRSSSVEQHEHLERSLSLHERLHRGGQGIHSLERSGSLPGGAPLPASFGRKDPS

SEQ ID NO: 179993 - protein, 416 aa, Oryza sativa
  Clone ID: PAT_MRT4530_77400C.1.pep
MGSPSYRLAAAITIPSTDEFLLVRQPPPPSPAPAPEEEEYLYRGYVDSELYDLPSAPLRPLAGELRSDVAIRGADSVAGRLDISRLDVSASLDQICDQFGLPSGICGEWRLLKYVEEAEFGPDAGLNTVLIIGSLESKLEALQDSWRWMSKECASGLLSGAKSGGTRIGPYAYIGLLKPELPSNWTVAPALPCQGHTDGHMGVLHVNTNALIVGDHCVGQGSATLDNRAGGNMKDYFQTTYNFLDMSPHVLIPMHGRINLWPKHMLCGYLRHRRAREVSILQSIENGARTLFDIVSKTYADVDRKLWIPASFNVRLHVDHLNSQNKLPKSFSMDKFEVSCGTNFMLWWAVAYVQARSSPAILAATALAGGLAIAYALKRNSGNEPILPCAIINANANANGAITIAGDTVRVATIAA

SEQ ID NO: 179994 - protein, 127 aa, Oryza sativa
  unsure (1)..(127): unsure at all Xaa locations
  Clone ID: PAT_MRT4530_77401C.1.pep
SAAFACPATATWWLEPHDNEFVRQQYGIAASPCACNQLACCKLEKLTIVLGNMLRAGWAATMLHYXQDIEHWLQAMSAAADNCQLVWVDLYFDRNLAQAQAXLLAFNVXPSRYGYXPPRYYGAPSTN

SEQ ID NO: 179995 - protein, 247 aa, Oryza sativa
  unsure (1)..(247): unsure at all Xaa locations
  Clone ID: PAT_MRT4530_77402C.1.pep
MEESRADGRNPNQLRPFSCTRNPLDRAHGSARWAQGDTIVLAAVYGPKPGTRKGENPEKASIEVVWKPMTGQIGKQEKEYEMTLKRTLQSICLLTVHPNTTTSVILQVVGNDGSVSFCRNVLLSIVSGCLLDYEHSLVFAGIPLKHLAVAIGCGVLEDGEVILDTNKAEEQQLKSFAHLVFPNSRKSASSKEPNQKEEDSERGLITSITHGVMSXDYFSCIERGLAASSRISDFMRTTLQKQAPGDV

SEQ ID NO: 179996 - protein, 206 aa, Oryza sativa
  Clone ID: PAT_MRT4530_77403C.1.pep
MATGRAGWARPSGWRPRQRRWRGTARGRRAPRLHLRRMPARCSTTAHHPRHHPCPRPRRRQRRRWEELVESGVEAQTWRWWPLPVWLMLGSTAVWFVIFNVGVCAVGVLLSRARESLSPRCGSGGGGRVTRTASSAPERIHSSFSIFSFPSVIFYEFHLDAGEPQTPMPRKYLSVEESQPTTDLAGRNRQACRRFELPRRLSLPAL

SEQ ID NO: 179997 - protein, 76 aa, Oryza sativa
  Clone ID: PAT_MRT4530_77404C.1.pep
MEGEGRHDKQDQYSTTPKDGRDKIQFYALLPLIPLRHQQICCVHLDIESITDPLWSDSKVWNPFSDNDLTLLDIEF

SEQ ID NO: 179998 - protein, 60 aa, Oryza sativa
  Clone ID: PAT_MRT4530_77405C.1.pep
HCFTPCMTKKTQKLKFLCFPPLAYIHTYMYTHNLITGYVQTYIHTNTVNILWFYYTELTH

SEQ ID NO: 179999 - protein, 746 aa, Oryza sativa
  Clone ID: PAT_MRT4530_77406C.1.pep
MATTTLCLQGAALVVLIVCLAPVAPAWAQQPAGCPDKCGNTSIPYPFGIGSRCARDFNFRLVCNHAYSPPRLFVSEVELVSLSLDGEARALINARNYCSDGTTYISYNALRRDSQGQLPLSDVSFGRSTAYRFSAARNRFVVLGCPVLGYLVDAEEYYVSGCISMCRKSQAGNDHLPYILSLNKSAEENRVEPIYHRLNSTACNYMFLVEDKWIDTTYSYRAYFNRTDDFDVPVVLDWAIRNVRNCRVAKRNATKYACRSEWSECFDASDGVGYRCRCSNGYQGNPYLDSGCTDIDECQDKEKYGCYGDCTNTIGGYTCLCPRGTIGNVHEKNVCRPKDKFTFALKAVTGVGLGVFMSVFMAFWLRLRLQKRKLIRTRQKFFEQNGGIFLQQQMRSYGGAGGGVGGFKIFSTEELKNATNNFAVDRILGHGGHGIVYKGVLEDNTVVAIKKSKMMEEAQTKEFAREMFILSQINHRNVVKLLGCCLEVEVPMLVYEFVSNGTFYHYIHGKDPEVDIALDTRLRIAAESAEALSYMHSSASPPILHGDVKTANILLDDKFNAKVSDFGASKLAPTDEAEIATLVQGTCGYLDPEYLMTCQLTDKSDVYSFGVVVLELLTRKKALYLDGPEEDRCLVSCFTTAVKVGRHQELLDSQVRNELSDEMLQEITYLLMRCLSMIGEERPAMKEVAERLESLRRYQQHPWAKAEGNEEEIQSLLGMEQNNANYQLRQQDVLGLEEGNAYTFSL

SEQ ID NO: 180000 - protein, 53 aa, Oryza sativa
  Clone ID: PAT_MRT4530_77407C.1.pep
YTHTQLNFPLGSPSPLLGFLNIPLTSILLHNNTFLYFFCIFILNYRHQITTFQ

SEQ ID NO: 180001 - protein, 84 aa, Oryza sativa
  Clone ID: PAT_MRT4530_77408C.1.pep
MSFVISFTLLTLVNDAIIGNNLISSWFGMVYSWFGDRTVQPVWLYRMVGPIQQGMLYSVGLILFNYYLTVLLNSEMFAKCCFCK

SEQ ID NO: 180002 - protein, 174 aa, Oryza sativa
  Clone ID: PAT_MRT4530_77409C.1.pep
MLLPSTVEACTCKLQLQAMAGSGSGTPCASCKLLRRRCTSECVFAPYFPAEEAQRFAMVHRVFGASNVSKMLLDVPPPQRPDAVSSLVYEANARMRDPVYGCVAAISFLQNQVSQLQMQLALAHAETAALQLQLQQQHQDQDDHHHQQCILENAAAHHQLMLQEAFLKKESMWT

SEQ ID NO: 180003 - protein, 379 aa, Oryza sativa
  Clone ID: PAT_MRT4530_7740C.1.pep
DAWADAWARAHRTCVCAVVLGTLPHIYPLDRAPSRPPRSTERSIDRYTPARATNPAAGSCSRVGREWDGTRALPPVSSRSCARGSGLPRKTRSSTITSTATASVAGAPFPSSHRLQRCGKSCRLRWINYLRPDLKRGSFSQQEEDLIVALHEILGNRWSQIASHLPGRTDNEIKNFWNSCLKKKLRQRGLDPATHKPIAAAAAAATSSESAVTQVDEDHKPHGAAAAAAAADGLAANAKQSVFDPFPVTDFGAGFDLGAANMAAALYGSHPDDGAGFVADYSSVLDVSENLGYGESSSNSSNWTCAEVSNVLDSEVLNWAASAGADAAAKAEPFADMEQQHSGYGGEYQVEDDATLEHKFSLPCHEQSLAQFDFNLEYF

SEQ ID NO: 180004 - protein, 79 aa, Oryza sativa
  Clone ID: PAT_MRT4530_77410C.1.pep
MGVSGAWLAAQSTAPSIAAVVAVGVSGELGMARSKSERQAEVVGVEGVLPFVQQKGHHACGTRSRGRGSEDGLTVDKGP

SEQ ID NO: 180005 - protein, 554 aa, Oryza sativa
  unsure (1)..(554): unsure at all Xaa locations
  Clone ID: PAT_MRT4530_77411C.1.pep
LYCRSWMYSKKRAHPTFLKEAAKFVEVAKAHAVRENLRSVFCPCKVCKNEXLLQDPNEVLSHIVEQGFKEGHKIWTFHGEVGGRNEVMDDFCFDDAENFIIKDMSQGNIPECGGSDIENEGIEFDLEDMLWHVEPEVLTGRRXGLDNWEALEKAAKDLLYDEAKGCDKDYSMLRSVLELLRLKARNEXXGXXFXXXMHXLRXSRXKXNXXPXNTYQVXKLICPFSLGVQKXHSCENFXKFAKKISRDLXSCPTCGTSRYKTGNGASDGEVVDKDDAPVDEKKKIPRMVVWYLPVKDRLKRLYSNRDDAKLMGWHXEGKKNDGKIRHPADARLWKNFEALHLEFAKDPKNVRFALSTDGMNPFGDLSRTHSTWQVLLXTVYNLPTWICQKPKYIFLAIVIQGPRQPGINIDVFLEPLMEDMQELWEEGLXMWDKYRREHFTLRAIIFITINDLPVNFWLPGXLKRKFGCLICIDNTSYRYLTSSRKTVYMRHRRFLPQRHKWRKMANLFDKSVENDLPPEAXTGAQVFDMAKKIKVVFGKVXKKAIKRKKAKDQR

SEQ ID NO: 180006 - protein, 183 aa, Oryza sativa
  unsure (1)..(183): unsure at all Xaa locations
  Clone ID: PAT_MRT4530_77412C.1.pep
GEFRKKRGPCSPRRRSARRPGQPTTGGEKGASRRGQARRRRLPASVAPNSRECSCHVPDCAPNCNCNVFTCTHRGWGFRHVMLPKLLFPKLRAISTXAAQKPICLGVLELCLSPAEAHAQLHCIIFEVNSIYSTLWSRHPQRFRPSSRHPPPSSFSPVASLXPTHCRPSPSGFYLASPPNNYH

SEQ ID NO: 180007 - protein, 389 aa, Oryza sativa
  unsure (1)..(389): unsure at all Xaa locations
  Clone ID: PAT_MRT4530_77413C.1.pep
MEAGRAREEAARGGSLKQARASSGRRGDRAHRAADLLAGRGHDEARRSRCTTARSGAAALELWLTVLKSQDRQEVDCGAGPCSALLPPACGSYAQAHEAGKKKFFISEKVHLRSLFLTSSFKTVPELKYQDTMYVTFGPKAVLLYDFGDMAVESVWGPRERHMSAINFLPPLSTLFSYQPKPLGQPTTGGEKGASRRGQARRRRLPASVAPNSRECSCHVPDCAPNCNCNVFTCTHRGWGFRHVMLPKLLFPKLRAISTXAAQKPICLGVLELCLSPAEAHAQLHCIIFEVNSIYSTLWSRHPQRFRFLSRHPPPSSFSPVASLXPTHCRPSPSGFYLASPPNGRYSSPLLFTLLLHHLMHTSSGILIRLLRKINQIINCTFFLYLLLL

SEQ ID NO: 180008 - protein, 220 aa, Oryza sativa
  Clone ID: PAT_MRT4530_77414C.1.pep
MWVTERLRALLSRSGRLWGVKWRWATRLGEVEDKFMWILLEKSMSRDELVPITRVHEEAPLTETSIAVDAIITRNLEDAARDDAILPTTDGGAFVVDLHLREEPGGRSGGLAGGDEVVVAKYVREVAGTVSELVADDIFFGRVMKSWRRFGFVAWLGKRIERCLNLYLPWGFWDLVAFQAVIDQWLFRMSFWEWISLNFSVILIFNRSGELGDCFGGLDF

SEQ ID NO: 180009 - protein, 221 aa, Oryza sativa
  unsure (1)..(221): unsure at all Xaa locations
  Clone ID: PAT_MRT4530_77415C.1.pep
VSRDINQQCRTVAEAKEEEEATHDGGGPRRRXMHFQWLRAAVLGASDDLVSTASLMLGIGAACPADERAVLLSGLAGLVAVAWPSASRPPVRANRPRRRPRAARCLAGRNQARGPTPVSAGLRLQAAAVSPSSQAAATSALSFAAGAMFPLLAAWFVASYASRRLLPPPFRREAARPPRPXTVTASSFSRRRRRPEQRRPFPFSSPTTPTCSPERGVFWSV

SEQ ID NO: 180010 - protein, 58 aa, Oryza sativa
  Clone ID: PAT_MRT4530_77416C.1.pep
NNKQATTGSKNQPKNCRHAKQCPMPKLPQEVRPVQAEHQRLQGNSYTETIKQAITQRS

SEQ ID NO: 180011 - protein, 199 aa, Oryza sativa
  Clone ID: PAT_MRT4530_77417C.1.pep
MDTGSGGGGGGGGGGGGTSIHITALDGIVNVNSLFTLAAFIGLAWRPSADGPELAGGADRLGSACAAGDRVESDLVLFHVLAFACFLFSSIVALCLKQIVRTHPHYRLRSGGGGGSAVSRTAMINRVALRVGILASAVGSVCGCGFLMMALVNVVQVKLGRLGCGAGGAAAWGAVVPLVSLVPTAMLIYIGIVFYAFTR

SEQ ID NO: 180012 - protein, 120 aa, Oryza sativa
  Clone ID: PAT_MRT4530_77418C.1.pep
SPPPPFQWARFRKPPPSPGGPGVCLPPTRPLKTRLGLRRPPAPRESPPVYFPPPPGPLMPGPVIIKAQWIIFPPQNLCPAFFFPPSLLKGYQAPLFFFFFFFNAFLCWLVGFIPPFYGVI

SEQ ID NO: 180013 - protein, 70 aa, Oryza sativa
  Clone ID: PAT_MRT4530_77419C.1.pep
MWSMCPQRKLFDTGDSTGQHRFEGAIDNLVQQASCEGHLMINTRIHTSGETIFDRSAEIHNSPSSNKNRD

SEQ ID NO: 180014 - protein, 84 aa, Oryza sativa
  Clone ID: PAT_MRT4530_7741C.1.pep
NNQQTHILFRGYEHYFFFPFLFFTHPVSPPPLTVYCTKSYTETIVTSLPPHQTWWPSSSSPATSLPSTPSSSTPTSAGRCTLVP

SEQ ID NO: 180015 - protein, 53 aa, Oryza sativa
  Clone ID: PAT_MRT4530_77420C.1.pep
GWPPGPCWTSSHSSFGDSDRAVQTPRPFSEARANNVTTAAAGAYSWLGIIQLV

SEQ ID NO: 180016 - protein, 100 aa, Oryza sativa
  Clone ID: PAT_MRT4530_77421C.1.pep
QWQGNCKWPLARRRQMVPRLPVASQICNCETVSAPHGSGASNLSRRAPTHCGDGEGLHRLHGELECMYPPDLAIGQQIDHLVVVLHHQQPWLISITTTPT

SEQ ID NO: 180017 - protein, 43 aa, Oryza sativa
  Clone ID: PAT_MRT4530_77422C.1.pep
ECEMNSRGGKRSQHITPTYSLSPYLLTSISYSTTNLHPIVCPN

SEQ ID NO: 180018 - protein, 700 aa, Oryza sativa
  Clone ID: PAT_MRT4530_77423C.1.pep
MEYGGGREGGGGMNGNGTAYAGALSPAARYAESGGASLTWENLTAVLPGGGGRATKKLVQGLYGYAVPGRVVAIMGPSGSGKSTLLDALSGRLARNVLLTGKVLLNGKKRRLDYGVLAYVTQENVLLGTLTVRETVTYSALLRLPSTMSKAEVRRVVDDTLDEMGLRECADRNIGNWHLRGISGGEKKRLSIALEILTRPRLLFLDEPTSGLDSASAFSVIETLRQLAVDGGRTIVSSVHQPSSEVFALFDDLCLLSSGECVYFGDAKLAPQFFAETGFPCPSRRNPSDHFLRCVNADFDDVAAAMKGSMKLRAEADFDPLLKYSTSEIRERLVDKYRISEYAMMVRNTIHEISKIEGVIEEVVMGSQASWCKQLTTLTRRSFTNMSRDFGYYWLRIVIYVLMAVCLGTIYYDVGTSYAAIQARASCGGFVSGFMTFMSIGGFPSFIEEMKMFTLERQNGHYGVAAYIISNFLSSMPFLLAVSWASASITYWMVKFRPGFSYFAFFALNLYGGVSVIESLMMIISALVPNFLMGLILGAGVIGIMMLTSGFFRLLPELPKIFWRYPVSYIVYGSWGLKGAYKNDLIGLEFEPMMPGQPKLTGEYIITKMMGLNLNHSKWLDLSMIFVLLFAYRLIFFLVLKAKEAAAPYIRVAYTRFTIKRLERRASFRKTLAMSSMSKRHNQPPHPMAVQEGLNSPMPY

SEQ ID NO: 180019 - protein, 137 aa, Oryza sativa
  Clone ID: PAT_MRT4530_77424C.1.pep
MAMLELVQILRAQPGPFPPRPCRFRVRPRALPSVSPRCVILKLIQSMNARSVIVQLVAGIVGSSIGPQIRPEAPPSRSLRARLSADPLLLALDPLSTDPRAAASSMPEPAATIQGSNSLSAILSWSSSPDALKSGQP

SEQ ID NO: 180020 - protein, 1072 aa, Oryza sativa
  Clone ID: PAT_MRT4530_77425C.1.pep
MRLLAAAARAHRSSHRHFLLSSSFHLSSAATSTTTSSTSSYDPIKQFLLLLPSNTHSHHHHLSLPASLRRDAVLALARLIKVSPPCLLALHALTSPTSSSSSPSPLPARFAAALRLASSAQALPTFASLLLAALLPDATPDLLAFCEGFRGRSGRYAARRLALHAFLAAGMADEALDVLARVRRAGDTPSLSALAALLRLLFRGGEVRAAWKVFEEMAARGPRPNLAIFNAMIFGLCHRGLVRVSGGLLGVMGRFHVVPDACSYNILMKGHCLYGQAEDAFNLFDEMRVTGCCPTIVTYNILMNELCREGRMVEARMLFDEMLQAGVEVNTITFNVLIDGYAKAGQMENANMACAEMKAMGLMPDCCTFNILSAGAYKFGKAALFVLDQQQLHEMFGSQLSTDGIDMLICRLCWDGRLDDAWELLCSAIEKGVQVSVSGFNALIAAYSKEGFDEEAFELYKTMNKLGLAPSSSTLNYLIMGLCNRGRLDQARLFLEYMVRMGYCVIASFTIYLDSSFRAGDVLGALKCWDDMKIVGLQPDFVAFSAYVNGLCRLDFLDEAYNGFIEMIRRGLVPNNFTYNSLISAFCRAGNVSEALKLEQKMRQSGLVPDIFTRNILIDGFCREGGLNTANNLFFGMYSIGLTPDVVTYNTMLNAYCRSKDINGAMIFMNKMLADGCEPDIFTYNIWMHSLCSNHLLNRAMMLLDELAATDCAPNSVTYNTLMDGICSDVLDRAMILTGRLIKLAFQPNTVTINILFSHFCKNGFGKRALVWAEKLRDDSFNFDDATRNILDWAYRDMEDDPHASSADIDKCLFLEFLMLMTCTTIRNSRSFKFTHKKFGYWMIIEMLNSYPRELLDNFQVMDSSAAGVTYSLLCFFMTDSAIRCNGYCSHCYCQMESQRISGIYGDGKQGEVCFVPDADIMLAVTLKYLGVYIDKTMFSQCILVVQVPTEVIALLISLTLCLVVSGTINRVLDVYAEHAAKGETLVVVVAGEEDGGSGSDGGGYDKAGMDSGKYVQYTPDQVEALERVYAECPKPSFCRRQQSPTSSPSRRSRSGSQNRSLQMFDKKRMKE

SEQ ID NO: 180021 - protein, 130 aa, Oryza sativa
  Clone ID: PAT_MRT4530_77426C.1.pep
MSGYFFSSSSPDDFTFARNLSGCCCVEGGEGGNVGGGGGRSGGWRQRWRCPMRSGSGSDGSGYDKAGMDSGKYVHYTPGQVEALERVYAECPKPRFSRRQQLLCELSILANIEPKQKIKVWFPKQKPTNV

SEQ ID NO: 180022 - protein, 76 aa, Oryza sativa
  Clone ID: PAT_MRT4530_77427C.1.pep
FAHDALVDQDALSESLLAPFDHLSSGPWAFQMYALPSCVSLLITWCSCALVPCPRSCQHRHLVVLLPSPHSVRVSE

SEQ ID NO: 180023 - protein, 984 aa, Oryza sativa
  Clone ID: PAT_MRT4530_77428C.1.pep
MDAPADQQVADSTSTCCAIHLWSELDDMLDVARNVRRLEETVGQLAAQRSSLHGAIVDARVVGVDDGEDGGAADRLRRLGCTEEAANWLGRARVAEKQGNAVAADYAALSMPRLRLVARYRIGKRASRALRQAQQLVQERGAICAARRGVGSFAATTHQSAPTPAAAAVGTEDYLKEALGYIADDAVGVIGVCGMGGVGKTTLLRAINNSFLPTARQPPASSKVFDHVVWAVASKECRIDRLQDDVAKKLGLPLASLPDEHSDADLEQRALPIAEHLKNTGFLMLLDDLWECFDLKLIGVPYPDGSAGDELPRKVVLTTRSEIVCGNMKADRVLNVECLKPDDAWTLFEMNATAAAVTSHPAIAGLAREVAGECRGLPLALITIGKALSTKTDPELWRHAIDKLRNAHLHEITGMEEENAGMLRVLKVSYDYLPTTTMQECFLTCCLWPEDYSIEREKLVECWLGLGLIAGSSSIDDDVETGARIIAALKDVRLLESGGDVVGDTRGVRMHDMIRDMAIWIASDCGATRNRWLVRAGVGIKTASKLNEQWRTSPAAAGASTERVSLMRNLIEELPARLPARRGVRALMLQMNTSLRAIPGSFLRCVPALTYLDLSDTIVMALPGEIGSLVGLRYLNVSGTFIGALPPELLHLTQLEHLLLSDTNMLDSIPRNVILGLQKLKILDVFASRYTRWRLNADDDDAATASEASLDELEARNASIKFLGINVSSVAALRKLSGFTNVSTRRLCLKDMAGPASLTLLPSTLSDTLGGLDMLERLQHLAIRSCTGVKDIVIDAGSGSGSDSDDELRRSFRLPKLDRLRLLSVRHLETIRFRHTTAAAHVLPALRRINILNCFQLKNANWVLHLPALEHLELHYCHDMEAIVDGGGDTAAEDRRTPTTFPCLKTLAVHGMRSLACLCRGVPAISFPALEILEVGQCYALRRLDGVRPLKLREIQGSDEWWQQLEWEEDGIKDALFPYFKNHS

SEQ ID NO: 180024 - protein, 1107 aa, Oryza sativa
  unsure (1)..(1107): unsure at all Xaa locations
  Clone ID: PAT_MRT4530_77429C.1.pep
MEPESATPTLQLRKIRSSWRLKPTFGKPRRQQGQAPPRPNNSGKDVIRGHVNHVTAEDVLTTPDVIVGTFLIHSIPGTILFDSGASHSFISVPFVGRNQLGVERLRNPLLITTPGGVMTAKYYSPAVPIEIQGIPFPSDLILLDTKNLHVILGMNWLAQFQGVVDCARRTVTLYRGPEQPVVFFAPPTSVGSLELHQIGLSEIPIVSEFGDVFPEELPGMLPKREIEFRIDLAVGTTPLYNRPYRMVANELAEVKKLLEELKEKGYIRPSTSPWGAPVIFVEKKDKTKRMCVDYRALNEVTIKNKYPLPRIDDLFDQLKGATVFSKIDLLSGYHQLRIREEDIPKTAFTTCYGLYEFTVMSFGLTNAPAFFMNLMNKVFVEYLDKFVVVFIDDILVYSQSEEDHQQHLCLVLGKLREHQLYAKLSKCEFWLSEVKFLGHVISAKGVAVDPETVTAVTDWKQPKTVTQVRSFLGLAGYYRRFIENFSKIARPMTQLFKKEEKFVWSPQCEKAFQTLKENLVSSPVLILPDTRKDFMVYCDASRQGLGCVLMQEGHVVAYASRQLRPHEGNYPTHDLELAAVVHALKIWRHYLIGNRYEIYTDHKSLKYIFTQSDLNLWQRRWLELIKDYDVGIHYHPGKANVVADALSRKSRCNTLSVRGIPPELHQQMEALNLSIVGRGFLATLEAKPTLLDQICEAQKNDPDMHGILKNMKQGKAAGFTEDEHGTLWNGNGVCVPDDKELKQLILQEAHESPYSIHPGSTKMYLDLKGKYWWVSMKREIAEFVALCDVCQRVKAEHQRPAGLLQPLQVPEWKWDEIGMDFIIGLPKTQGGYDSIWVVVDRLTKVARFIPVKTTYGGNKLAELYFARITWDKSLPYAEFSYNNSYQANIQMAPYEALYGRKCRTPLLWDQVGESQVFGTDILREAEAKVRTIRENLKVAQSRQKSYADNRRRDLEFAVDDFVYLRVAPLRGIHRFQTKGKLAPRFVGPFRIIARRGEVAYQLELPASLGNVHDVFLVSQLKKCLRVPSEQADSEQIEVREDLTYVERPVKILDAMERRTRNRVIRFCKVQWSNHAEEEATWEREDELKXPIPISSPVLPNLGVEVPF

SEQ ID NO: 180025 - protein, 40 aa, Oryza sativa
  Clone ID: PAT_MRT4530_7742C.1.pep
QIMVECMKIEDSTKPCLADWLATKQSNFGFKLPTFSITST

SEQ ID NO: 180026 - protein, 1003 aa, Oryza sativa
  Clone ID: PAT_MRT4530_77430C.1.pep
MTAKYYSPAVPIEIQGIPFPSDLILLDTKNLHVILGMNWLAQFQGVVDCARRTVTLYRGPEQPVVFFAPPTSVGSLELHQIGLSEIPIVSEFGDVFPEELPGMLPKREIEFRIDLAVGTTPLYNRPYRMVANELAEVKKLLEELKEKGYIRPSTSPWGAPVIFVEKKDKTKRMCVDYRALNEVTIKNKYPLPRIDDLFDQLKGATVFSKIDLLSGYHQLRIREEDIPKTAFTTCYGLYEFTVMSFGLTNAPAFFMNLMNKVFVEYLDKFVVVFIDDILVYSQSEEDHQQHLCLVLGKLREHQLYAKLSKCEFWLSEVKFLGHVISAKGVAVDPETVTAVTDWKQPKTVTQVRSFLGLAGYYRRFIENFSKIARPMTQLFKKEEKFVWSPQCEKAFQTLKENLVSSPVLILPDTRKDFMVYCDASRQGLGCVLMQEGHVVAYASRQLRPHEGNYPTHDLELAAVVYALKIWRHYLIGNRYEIYTDHKSLKYIFTQSDLNLWQRRWLELIKDYDVGIHYHPGKANVVADALSRKSRCNTLSVRGIPPELHQQMEALNLSIVGRGFLATLEAKPTLLDQICEAQKNDPDMHGILKNMKQGKAAGFTEDEHGTLWNGNGVCVPDDKELKQLILQEAHESPYSIHPGSTKMYLDLKGKYWWVSMKREIAEFVALCDVCQCVKAEHQRPAGLLQPLQVPEWKWDEIGMDFIIGLPKTQGGYDSIWVVVDRLTKVARFIPVKTTYGGNKLPELYFARIVSLHGVPKKNFGKTWDKSLPYAEFSYNNSYQANIQMAPYEALYGRKCRTPLLWDQVGESQVFGTDILREAEAKVRTIRENLKVAQSRQKSYADNRRRDLEFAVDDFVYLRVAPLRGIHRFQTKGKLAPRFVGPFRIIARRGEVAYQLELPASLGNVHDVFLVSQLKKCLRVPSEQADSEQIEVREDLTYVERPVKILDAMERRTRNRVIRFCKVQWSNHAEEEATWEREDELKAAHPDLFASSSESRGRGSV

SEQ ID NO: 180027 - protein, 74 aa, Oryza sativa
  Clone ID: PAT_MRT4530_77431C.1.pep
WRPPRGRRRRRLHDCSAPRGVASVAVNRRSYLSPRLFCSLRPPVFFVLLRPDFVFSVFCFFSFLSPTCFFSNVS

SEQ ID NO: 180028 - protein, 1592 aa, Oryza sativa
  Clone ID: PAT_MRT4530_77432C.1.pep
MSWHRAGVLLLGAQSCLPVPGVPAVGGIGSVLLSMARMGWKLCHVFRLYTVVMAGSVTRRGLDMTGFVLELRGMCVVLGYPHGVDYQARPLPEQEGEDAEPHAGWEVTAVILSGSPERTSLAVTAGGDSFPAACQNAALLAIGTLHQRYPDELQHSPYRYHPRRGGARDYATFRDAGSEDDAPIVHLARMVEAYDAARIDFHQMVRRGMVENNMKILELRQENLQLKKDLDAVEAQLHQLKIAQGEDCRPKRRRVCRSQKITARKSTSRPELVRQSLAWTCFVETPRAEPAPVVPQEGEASGVGSTEDALLLTFRPGPSQRDEEKVIFAAHQLQGPASLWWDHFQATQPEGQPITWARFTAAFRRTHVPAGVVALKKREFRELKQGNRSVMEYLHEFNNLARYAPEDVREDEEKQEKFLAGMDPELSVRLVSGDYPDFQRLVDKSIRLEAKHKELESHKRRLANFRNQQGANQRVRYTNPYPGGSSSQPQQQHQQPRSAPRPQFVPGQGRRDASGPQRLCFNCFEPGHFADKCPKPRRQQGQAPPRSNNGGKDVIRGRVNHVTAEDVLTTPDVIVDTKNLDVILGMNWLAQFQGVVDCARRTVTLYRGPEQPVVFFAPPTSVKSSELHEIGLSEIPIVREFGDVFPEELPGMPPKREIEFRIDLAPGTTPLYKRPYRMAANELAEVKKQLEELKEKGYIRPSTSPWGAPVIFVEKKDKTKRMCVDYRALNEVTIKNKYPLPRIDDLFDQLKGATVFSKIDLRSGYHQLRIREEDIPKTAFTTRYGLYEFTVMSFGLTNAPAFFINLMNKVFMEYLDKFVVVFIDDILIYSQSEEDHQHHLRLVLGKLREHQLYAKLSKCEFWLTEVKFLGHVISAKGVAVDPEAVTAVTDWKQPKTVTQIRSFLGLAGYYQRFIENFSKIARPMTQLLKKEEKFVWSPQCEKAFQTLKEKLVSSPVLILPDTRKDFMVYCDASRQGLGCVLMQDGHVVAYASRQLRAHEGNYPTHDLELAAVVHALKIWRHYLIGNRCEIYTDHKSLKYIFTQSDLNLRQRRWLELIKDYDVGIHYHPGKANVVADALSRKSHCHALNVRGIPPELNQQMEALNLSIVSRGFLAALEAKPTLLDQIREAQKNDPDMHGLLKNMKQGKAAGFTEDEHGTLWNGNREAHESPYSIHPGSTKMYLDLKEKYWWVSMKREIAEFVALCDVCQRVKAEHQRPAGLLQPLQVPEWKWDEIGMDFITGLPKTQGGYDSIWVVVDRLTKVARFIPVKTTYGGNKLAELYFARIVSLHGVPKKIVSDRGSQFTSHFWKKLQEELGTRLNFSTAYHPQTDGQTERLNQILEDMLRACVLDFGKTWDKSLPYAEFSYNNSYQASIQMAPYEALYGRKCRTPLLWDQVGESQVFGTDILREAEAKVRIIRDNLKVAQSRQKSYADNRRCDLEFAVGDFVYLRVTPLRGVHRFQTKGKLAPRYVGPFRIIARRGEVAYQLELPASLGNVHDVFHASQLKKCLRVPSEQADSEQIEVREDLTYVERPVKILDTMERRTRNRVIRFCKVQWSNHAEEEATWEREDELKAAHPDLFASPSESRGRDSV

SEQ ID NO: 180029 - protein, 97 aa, Oryza sativa
  Clone ID: PAT_MRT4530_77433C.1.pep
LEFVVDDFVYLRVTPLRGVHRLQTKGKLAPRFVGPFRIIARRGEVAYQLEVERPVKILGAMERRTRNQVIRFCKVQWSNHAEEEATWEREDELKAAH

SEQ ID NO: 180030 - protein, 863 aa, Oryza sativa
  Clone ID: PAT_MRT4530_77434C.1.pep
MVRPFCRSPHQLHHCHADISSHPSTMLPANFFFFIIVIVIIALATIAPPVSAERYDYPTANLSTRWVNNAAALQHSVGYSDGSAVRAIVLRSPKTFYGPSYAAGFFCSPPCDAFLFAVYIVYTNSGAGITMTTTGIPQVVWSANRARPVRENATLELTYNGNLVLSDADGSLVWSSGSSSRSVAGMEITDTGNLVLFDQRNVTVWQSFDHPTDTLLPGQSLMEGMKLRANSTTTNSTENQVYMAVQPDGLFAYVESTPPQLYYSHSVNTNKSGKDPTKVTFTNGSLSIFVQSTQPSNISLPQASSTQYMRLEFDGHLRLYEWSNTGAKWTVVSDVIKVFPDDCAFPMACGKYGICTGGQCTCPLQSNSSLSYFKPVDERKANLGCSPLTPISCQEMRSHQLLALTDVSYFDVSHTILNATNRDDCKQSCLKNCSCRAVMFRYGQNDSDGTCFSVSEVFSLQTIQPEALHYNSSAYLKVQLSPSASASTANKTKAILGATISAILILVLAVTVITLYVQRRKYQEIDEEIDFEPLPGMPVRFSYEKLRECTKDFSKKLGEGGFGSVFEGEIGEERVAVKRLESAKQGKKEFLAEVETIGSIEHINLVRLIGFCAEKSNRLLVYEYMPRGSLDRWIYYRYNNDPLDWCTRCRIIMDIAKGLCYLHEECRRKIAHLDIKPQNILLDEKFNAKLADFGLSKLIDRDQSKVVTVMRGTPGYLAPEWLTSQITEKVDVYSFGVVLLEIICGRKNIDISQPEESVQLINLLREKAKDNVLIDIIDKKSTDMVSHHQEEVIKMLKLAMWCLQNESSRRPSMSMVVKVLEGAVSVENCLDYSFANANSVISAQDNPSTYSAPPSASILSGPR

SEQ ID NO: 180031 - protein, 118 aa, Oryza sativa
  Clone ID: PAT_MRT4530_77435C.1.pep
MGAAMPLAAPRRDATRPYASHCISYGPRVLLCCCDDYLTLALSLPCFLLPSDLGWSQPQQALPIRSKDKAKSTRNKKTISGLCGTAPAPALPLLELELSQTVSAPPKLGVELGRALSQ

SEQ ID NO: 180032 - protein, 108 aa, Oryza sativa
  Clone ID: PAT_MRT4530_77436C.1.pep
MAQWAGGGGAQARAHLQNHTTIFSKSCWVASGGGGRLRNKRRRAAGRSGGSGQRAVESGAGRRGAAAPRSGGSVGASAFARLKTLGYYILSISCESRLQKQIGQPALR

SEQ ID NO: 180033 - protein, 492 aa, Oryza sativa
  Clone ID: PAT_MRT4530_77437C.1.pep
MASSTAFAAAFALLLLASSAAAEGEAVLTLDAGNFTEVVGAHDFIVVEFYAPWCGHCNQLAPEYEAAAAALRSHDPPVVLAKVDASADLNRGLAGEHGVQGYPTIRILRDRGARSHNYAGPRDAAGIVAYLKRQAGPASVEIAASASPPAADSIANDGVVVVGVFPELSGSEFESFMAVAEKMRADYDFRHTTDAGVLPRGDRTVRGPLVRLFKPFDELFVDSQDFDRDALEKFIESSGFPTVVTFDTSPANQKYLLKYFDNAGTKAMLFLSFSDDRAEEFRTQFHEAANQYSANNISFLIGDVTASQGAFQYFGLKESEVPLVFILASKSKYIKPTVEPDQILPYLKEFTEGTLAPHVKSEPIPEVNDQPVKTVVADNLREVVFNSGKNVLLEFYAPWCGHCQKLAPILEEVAVSLKDDEDVVIAKMDGTANDVPSDFAVEGYPSMYFYSSGGNLLPYDGRTAEEIIDFITKNKGSRPGEATTTESVKDEL

SEQ ID NO: 180034 - protein, 205 aa, Oryza sativa
  Clone ID: PAT_MRT4530_77438C.1.pep
MASTSGSAAAVEERGNSERKRKRGATGESEGSEAQPSKWRTRRAHEIYSSKLLDAIRLVRSGSPSSSAAAPPRSRAVREAADRALAVSARGRTRWSRAILASHRRRIQAARRARLREAISPPSRHPSSSSGKGPKAPALARKAKVLGRLVPGCRKLPFPALLAEASDYIAALEMQVRAMTALAEVLSTVSGSGSASSSGGSSSPA

SEQ ID NO: 180035 - protein, 248 aa, Oryza sativa
  Clone ID: PAT_MRT4530_77439C.1.pep
LFDLFTSILDIVIQNARSEGQLDSGIVDIKAKSVKMKESPKTVHVDSLSGASTVLFTFTIDRGFTWESANAILEERQKDGAGYSDVGFYESRREWMGRRHYMLAFEGSTEGMYRVIRPAVGEALREMPLVELKSKYRKVSSIDKIGNGWQEEYDASSKQCMHGPKCKLGSYCTVGRRLQEINILGGLILPVWGIVEKALAKQVRQIHKRIRVARLETNDNERIVGLMIPNSAVESVLEGLQWVQDIDD

SEQ ID NO: 180036 - protein, 89 aa, Oryza sativa
  Clone ID: PAT_MRT4530_7743C.1.pep
GVHPTIRGEVWEFLLGCFDPGSTFDEREQIREKRRDIPCDLQRGGLGFGKLRRWPRQRRARARPPAVQRAAAAAFGEQRRPRPRPPASS

SEQ ID NO: 180037 - protein, 48 aa, Oryza sativa
  Clone ID: PAT_MRT4530_77440C.1.pep
FGFLRSITTIPCILKGHKDGVISHLLLIDEDTFPHRFQGKPAPKTLQK

SEQ ID NO: 180038 - protein, 130 aa, Oryza sativa
  unsure (1)..(130): unsure at all Xaa locations
  Clone ID: PAT_MRT4530_77441C.1.pep
MAPSVMASWSTTRAXFRGLKYTAKVPFVHHANGTKYSTFCPISRIRCMQVWPIEGIKKFXTLSYLPPLTVEDLLKHIQHLVRSKLAPCLELSRSISLVLRLPVVHMLGRGSFYHGFHCTPWGIFNCPHVL

SEQ ID NO: 180039 - protein, 238 aa, Oryza sativa
  Clone ID: PAT_MRT4530_77442C.1.pep
MSEPTAAELAALIKALSATVDKLQASVTTLQQASSSTTKSIGEHHNNRPPRFQKMDFPKYDGKSDPLAFINRCESYFHQQQIAEEEKQNEGTPPWHHFTELLHLRFGPPLRSNPPDELMAYKRTGSVVDYQDSTPEETGGTNTHVSLHAIAGVRFNDTMQVHINMGGTNLLALLDSGFTHNFVSTAAASLTKLKLLPNGKMQVMVANGEYVSCPGLYRNTAFTTDTETFQIMLRFKRI

SEQ ID NO: 180040 - protein, 104 aa, Oryza sativa
  unsure (1)..(104): unsure at all Xaa locations
  Clone ID: PAT_MRT4530_77443C.1.pep
YTGGGRARRSLPPPARPAASMFDCLDQPPGTYGASSGPPHSCWFLXLCSERRARHCSAACDCECASVIHPHDRMVRTASHNPIRTPVAKAKTRQSGRSTNSTSD

SEQ ID NO: 180041 - protein, 123 aa, Oryza sativa
  unsure (1)..(123): unsure at all Xaa locations
  Clone ID: PAT_MRT4530_77444C.1.pep
AATSQLSSAAAPAPPHPPXLSHLLTPPPPASAPPPPSPPPSRXSPPPPAAAAAAPPPPPPPPPPXPPPPPPPTLPARPPPPPPLLLMLAFALGRAPIIPAAPLSHRREPRPRRHRGGEWQRQN

SEQ ID NO: 180042 - protein, 390 aa, Oryza sativa
  Clone ID: PAT_MRT4530_77445C.1.pep
MSSRGGGGGGRAGRVGGGGGGGAGGGGGGGGGGAAAAAAGGGGDFGRAVARAAVARMLEAAGFVCAHRSAVDALVDVLLRYICQLGRAATFHANLAGRAAANECDVIQFLEECGAAYYGFAGAASVSARCLANSAVVKDMAVFVGASKESPFAGRPLPRFPVQRVPLHSTTSFAVLGRESGMSHVPEWLPAFPEPHTYVRSELWSEEVAKAGADEVERARQRRKAEKSLLSLQRRLALAGADGFRPGMLVDDAVKANGLDVVESKANPFHERALPYGEKAVSEVTMPGVGKTFSVVEAFAPAFEESKGGEFDEGMDQGQNDSQTQKRVVPKERPPVYFRIGIDKKSMVMALNSRALVELKDPWFFKEDKEQRAELILREAMDNPHELTQL

SEQ ID NO: 180043 - protein, 89 aa, Oryza sativa
  Clone ID: PAT_MRT4530_77446C.1.pep
YISTIESNKTKLSTRRSNDSPYVRVVDESNVHSIRQIYNDIKETERYRLASMAIMACIPTTAIVWLIASSSRTKSRCLRKSKYHVSVRQ

SEQ ID NO: 180044 - protein, 48 aa, Oryza sativa
  Clone ID: PAT_MRT4530_77447C.1.pep
MGPDVDIGGAVDVMDVGGQVRIVDTAREDKDLCLCRAPCVRVGCVASG

SEQ ID NO: 180045 - protein, 81 aa, Oryza sativa
  Clone ID: PAT_MRT4530_77448C.1.pep
SFYHHRIWHTAYLQVFNRSIVTPQLHMLRAKWIKTMMCFFKNNLHKRLSDQKPGQVITKESLSYGSRKDKTEGRFKTSSCC

SEQ ID NO: 180046 - protein, 512 aa, Oryza sativa
  Clone ID: PAT_MRT4530_77449C.1.pep
MAGKQLPSSLARARAASPRGLLAAAALLLLLLLAASYSLLLSPSSPGGLASPSSGPGSAADTAFLASLDRFLASPRRSAAPAAAPGDLDAAIRAEEEERLYGGGAWPAAPAPLRVYVYEMPSRFTYDLLRLFRDSYRETSNLTSNGSPVHRLVEQHSIDYWLWADLIAPESQRLLKNVIRVRRQEEADIFYVPFFTTISYFLLEKQECKALYREALKWVTDQPAWQRSEGRDHVIPVHHPWSFKSVRRFVKKAIWLLPDMDSTGNWYKPGQVYLEKDVILPYVPNVDLCDSKCVSETQSRRSTLLFFRGRLRRNAGGKIRSKLVTELKDAEGIIIEEGTAGADGKAAAQNGMRKSLFCLNPAGDTPSSARLFDAIVSGCIPVIVSDELELPFEGILDYRKIALFVSSNDAVQPGWLVKYLRSIDAKRIRQMQSNLLKYSRHFLYSSPARPLGPEDLTWRMIAGKLVNIKLHIRRSQRVVRESRSICSVPNPVMIETLYSDCMTPNVKEQDVL

SEQ ID NO: 180047 - protein, 25 aa, Oryza sativa
  Clone ID: PAT_MRT4530_7744C.1.pep
LISLLVPSHNAPGICYSLIMSFAQN

SEQ ID NO: 180048 - protein, 63 aa, Oryza sativa
  Clone ID: PAT_MRT4530_77450C.1.pep
NQPLCSVWDNIQNDHLNGIFLPSQMSDNGGIFGIIIKTGMNKKILSILNSAPVQAIMQEQIVQ

SEQ ID NO: 180049 - protein, 94 aa, Oryza sativa
  Clone ID: PAT_MRT4530_77451C.1.pep
MSQRPPELAKEGGSHEGVEVVVYRRKAKAATRGYQRRGVGDKNYVEARWWGEARADGEEAHDSAIDLPTGVVCLRAPIFSLFFRSMQIQRYRMG

SEQ ID NO: 180050 - protein, 31 aa, Oryza sativa
  unsure (1)..(31): unsure at all Xaa locations
  Clone ID: PAT_MRT4530_77452C.1.pep
MGNCSPSPXXXGRPTSXSGSXPLDXXXSAKX

SEQ ID NO: 180051 - protein, 106 aa, Oryza sativa
  unsure (1)..(106): unsure at all Xaa locations
  Clone ID: PAT_MRT4530_77453C.1.pep
ALWGLAFHNNRRAXXXPRASPFFTGWDLTGFHRLTLCTLRAVFNGPCLGCHGRGPTFPGAWVSRVPPACPPLPRCFFFLGGCLGPLGSGWVLLLPVLVPSSAPVCL

SEQ ID NO: 180052 - protein, 2142 aa, Oryza sativa
  Clone ID: PAT_MRT4530_77454C.1.pep
MGAGGAAKQIVDSLLARFLPLARRRIETAQAQDGQYLRPSDPSYEQVLDSLAMVARHTPLPLLEALLRWRESESPKGAHDASTFQKKKLWIGLENFVFDWLINADRVVSQVEYPSLVDLRGLLLDLVAQLLGALSRIRFSSVTERFFMELNSRRNDAPLSRSDSLSIINGMRYLKLGVKTEGGLNASVSFIAKANPLNRPPNKRKSELQHALCNMLSSILAPLAEGGKHHWPPLGVEPALSLWYDAVARIRGALMYWMDKQSKHIAVGFPLVTLLLCLGDSHTFNTHFSQHMEILYKYLKDKNHRSMALDCLHRLVKFYLNVYADYQPRNHVWDCLDSVTSQLLTVLKKGLLTQDVQHDKLVEFCVTLAESNLDFAMNHMILELLKPDSLSEAKVVGLRALLEIVVSPSNKQIGLDVFQEYGIGHYIPKVKSAIESILRSCNKAYSLALLTSSKATIDNVTKDKSQGSLFRSVLKCIPYLIEEVGRNDKMTEIIPQHGISIDPGVREEAVQVLNRIVRCLPNRRFAVLKGMANFILKLPDEFPLLIQTSLGRLVELMRLWRVCLSEELLAKDMQNVKRSSLGGDALQRSPFHRSRDVSEFRASEMDAVGLVFLSSADVQIRLTALELLRCVRALKNELRDYSANEWGDSKLKLEPEPIFIIDIIEENGEDIVQSCYWDPGRPYDLRREMDPVPLDVTLQSILESADKSRWARYLSEIVKYAAELCPSSVQDARQGLWGLEVVRRLEQITPVELGGKAQQSQRPETKLDQWLIYAMFACSCPPDSREEFALRAAREIFHIVFPSLRHGSESYALAATAALGHSHLEVCEIMFGELTSFLEDVSSETEAKPKWKPLYTIFHKKNPRSRREDLRTHVANIHRMIAEKIWPGMLSRKPVLRLHFLKFIDETCRQILPPSDNFQDLQPLRYALASVLRYLAPEFIDAKSERFDSRLRKRLFDLLLSWSDDSGSTWGQEGNSDYRREIERYKASQHNRSRESLDKLAFDREMAEQLEAINWASMNAIASLLYGPCFDDNARKLSGRVISWINSLFMELAPRAPFGHSPVDPRTPSYSKHTDGGRFGGRDKQKTSHLRVLLAKTALKNILQTNLDLFPACIDQCYSPDSPISDGYFSVLAEVYMRQEIPKCEIQRILSLILYKVVDQTKLIRDSALQMLETLSLREWAEDDADGVGHYRASVVGNLPDSYQQFQYKLSSKLAKDHPELSEHLCEEIMQRQLDAVDIIAQHQVLTCMAPWIENLNFVRLKESGWSERLLKSLYYVTWKHGDQFPDEIEKLWSTVASNTRNIIPVLNFLITRGIEDCDANPSAEITGAFATYFSVAKRVSLYLARICPQQTIDHLVCELSQRMLEDDEEPVRPGKVDTSANVVLEFSQGPSTSQVATIVDSQPHMSPLLVRGSLDGAIRNVSGNLSWRTSAVTGRSVSGPLSPLAPEVSIPNPTTGRSGQLLPALMNMSGPLIGVRSSAGNLRSRHVSRDSGDYYLDTPNSNDDILHQGGSGVHGINANELQSALQGHQHLLSRADIALILLAEIAYENDEDFRENLPLLFHVTCVSMDSSEDIVLEHCQDLLVNLLYSLAGRHLELYEVESSERENKQHVVSLIKYIQSKRGSLMWENEDPTLVRTELPSASLLSALVQSMVSAIFFQGDLRETWGSEALKWAMECTSRHLACRSHQIYRALRPSVKSDSCVLLMRCIHRCLGNPVPAVLGFAMEILLTLQVMVENMEPEKVILYPQLFWGCVALMHTDYVHIYCQVLELFCRVIDRLTFRDRTTENVLLSSMPRDEFDINGYTSDLHRLESRTTSERLLSVTETGKVPDFEGVQPLVLKGLMSSVSHGSAIEVLSRITIPTCDSIFGSPETRLLMHITGLLPWLGLQLTKDASSLGSSSPIQEQNQKAYYVASNISVWCRVKSLDDLAEVFRAYSFGEIISLEDLFARASPPICSEWFPKHSSLAFGHLLRLLERGPLDYQRVVLLMLKSLLQQTPVDPSQIPQVYNVVSQLVESALCAEALNVLEALLRSCSGVTGGQGDDIGFGENGHGMGEKVHQSMLLPQSSFKARSGPLQYAAAGSGFGTLMGQGGGSAADTGVATRDVALQNTRLLLGRVLDTCALGRKRDHKRLVPFVANIG

SEQ ID NO: 180053 - protein, 151 aa, Oryza sativa
  unsure (1)..(151): unsure at all Xaa locations
  Clone ID: PAT_MRT4530_77455C.1.pep
FVDPTESSSTTTASILSFPLHSTTPLLEFRRTPWWRRWRRRRRSAHAPPPPPPPPLSASARAPPPLPPPVVRLRAAAAXPPRAPAPRPAAAGQRLAQPPPTPRHRPHVAARSPATPXPPPARYRRPCATAARAPAAPPPPPALLPPPTASA

SEQ ID NO: 180054 - protein, 67 aa, Oryza sativa
  Clone ID: PAT_MRT4530_77456C.1.pep
ALSNLVRSHLNVMSMSSAINRVMLSYRYRPNPLTNPREACYLYNGWSSKGRFFVRHQISNNVHLFSR

SEQ ID NO: 180055 - protein, 323 aa, Oryza sativa
  Clone ID: PAT_MRT4530_77457C.1.pep
MTRTMNQRLSNAMERRPNGDLEFSWKRARLHGQHILPEVRDQGNEPTCVFQAVCAAAEMTMMRNLADRNPPSSTDTRFDAELLAHDYEVEVQRSLGKDHDLGHTVRADTALRLFGSIGALATSSGWEGHQRVRLRNYRSLSISNFERVAEYIIQGTPLLGTLPTGDEFRTMLPDEIFEFRRGLLPAGTVASTHMVLFMGFGYRNGRPYLVFLNSNGKSFGDEGLGRVYFDQIYAELFYALNARAPDASVRTSHHNEDASASTSATIQQFTLSSSARPGPAHTDARASTSSTTMQLSSSSTPPTAPRRRDDQPSPPRPAQRRRL

SEQ ID NO: 180056 - protein, 767 aa, Oryza sativa
  Clone ID: PAT_MRT4530_77458C.1.pep
MAAVSEVEVDGVVFPPVARPPGSGHAHFLAGAGVRGVEIAGNFIKFTAIGVYLEEGAAVPALAKKWAGKSADELAADAAFFRDVVTGDFEKFTRVTMILPLTGEQYSDKVTENCVAAWKAAGVYTDAEGAAADKFKEAFKPHSFPPGASILFTHSPPGVLTVAFSKDSSVPEGAVAAAAIENRALCEAVLDSIIGEHGVSPAAKRSIAARVSQLLKAESTGDVAAAEPAPLIILIERRFQKMLPIQIVFTYTTGEYGIFSAIRKVIWCRKRKPSEEKGERAGAIAGGDQSPLSLSEAKAGTVSANMVRPNWSSVGKAREDVCLGRPLHRCRKRREKVHRRSLNLSSSLQDRPSTTKTDTDVPQLTKPFTLDLLVVFIPVLCGLSQRGTHVGPTCQNASSSLSSPLLSFPHVYLTSPRFDGDAAAVVAATGDAAAVGGGPAGGQWWRGGVGGLLFGRHPRGPRPRGGVCSVKFGCSTTTAGSFPADGLVGLSGDAVSLVTQLGGEASLGRRFSYCLVPHSVNTSSAFNFGTLANVTELGAASTPLVAGDVDTRKQTEQASPDLTLEFGGGGGRAAVALKPENASVTVQEGTLCLVIVATTKQQPVSILGNLAQQNIHVGYDLDAGTVTFATADCAGSGRPTEQTSGGQARCGRGRERRRGAGRGERGRRRRRHPWPQFSRPRRQRRRRRECVSAGQRRAKQAVEGRAGTTPKTASSRAGATGRLSLLKRRRRRRLPGLSDGPTPRSHAPPPAAGPPPYPPAALQRGEK

SEQ ID NO: 180057 - protein, 43 aa, Oryza sativa
  Clone ID: PAT_MRT4530_77459C.1.pep
FFVKQFSWWGKILQLISNPCLPGALYQFLKAIRRIFNRTGGFL

SEQ ID NO: 180058 - protein, 131 aa, Oryza sativa
  unsure (1)..(131): unsure at all Xaa locations
  Clone ID: PAT_MRT4530_7745C.1.pep
MAMWAAWHGTAQARPCLGRGLSGRHGPTDAPGRTMPAHVPHSRPRHGPTRLGPCRAGPKARRPISLYFVCRAWSAGPSCRASPACRRGGPGTAGPCLGRAKKPCHXPGLRASGLMAIYCPRWSQRNVIISL

SEQ ID NO: 180059 - protein, 393 aa, Oryza sativa
  Clone ID: PAT_MRT4530_77460C.1.pep
MSRRRRNDGGEADGRASKTARRRPAQTKMKHLYLVLDDGDEATTTYTIHKLDVDDDAGIIHAPDVDRPATRFAAAPAAGGGQMHFLAMAGKNIVAVDGQGGGPTAVYDTEAAALTFASPLPGRLSSSGAGLAVVVEDGGHGGGEALYALTSLGERMPASFEALSWARDPCASPSSLLFSSSSSPGRHYYWSWKNVADTPPPFAEEEAVTAYAVHPDGRTIFVSTTGGGGGGTYSFDTERRKWRRHGDWVLPFRGQGYFDGELDAWVGLHREVHGRVCACQVASRGGARPPEYRETLDYDSVSSSRSKNRRQRATLTYMGDGMFCAVETCETPPTSSSSSEGGGGGGGVEVHVTVFGLKYNRRGELQARVRRAAGAFPLPKQHVPSFSPVAFWM

SEQ ID NO: 180060 - protein, 392 aa, Oryza sativa
  Clone ID: PAT_MRT4530_77461C.1.pep
MPADSQDDRFRTLVQVDWYNSVIMGRSHPVVEMKWLDWQYMFSKNNLVFNEVRKLYSTAFFGTTKKGHDFVKWTIQVQQYRVSMAQFATALGLDDDDLNRPHIFVEDALSPTSTTFFYEKDAPKDCLGTTRGLRPYYRVLYSIFRWPLLPKVGDATALPGRHALLLSRMRYNKPDFSIMKLIWSEIYETVCEPKRGCIYAPYIMKMIKAKTGICYFKDNQHKPFRPHAPTTSATPSTRATRASTSAAPSSSAAPQCSESSSPIKKALRAIFCMCAKTAKKVKKIERRQKEDWIAVGKDVSDIFDDEEFVDPFAAYETARDIASGEGPSGISHSFNEESSHSEESSDDEESDAPTENVPTDPDEAVDAAGQDIDSPHSGDTEIIPSDGDDDEA

SEQ ID NO: 180061 - protein, 113 aa, Oryza sativa
  unsure (1)..(113): unsure at all Xaa locations
  Clone ID: PAT_MRT4530_77462C.1.pep
MAAVSEVEVDGXXFPPVARPXGSGHAHFLAGAGXRGVEIAGNFIKFTAIGVYLEEGAAXRRLAXKWAGKSADXLAAXAAFFRNVVTGNFKKFTRXTMIXPLTGXQYSDKXTEN

SEQ ID NO: 180062 - protein, 309 aa, Oryza sativa
  Clone ID: PAT_MRT4530_77463C.1.pep
MGRGEAAGSARLGRRGRVSMAQFAAALELDDDDLSCPHLFAEDALSVTSTTFLYEKDAPKDCLGTTCGLLPYYRVLYSIFRWSLLLKVGDATALPGRHALLLSRMRYNKSDFSIMKLIWSEIYETVCEPKRGCIYAPYIMKMIEAKAGICYFKDNQHKSFRPRAPSSSATPSARETRASTSAAPSSSAAPQRSESSSPIKKALRAIFCMCAKTAKKFADPFAAYEAARDIASGEGPSGTAHFFNEESSHSEESSNDDGGDDIPDPESDAPTENVPTDPDEAVDAAGQDIDSPHSGDTEIIPSDGDGDEA

SEQ ID NO: 180063 - protein, 454 aa, Oryza sativa
  Clone ID: PAT_MRT4530_77464C.1.pep
MAAMAPSSVLVLLGVVLLVAGGRLCECAASGGGFSVEFIHRDSPRSPFHDPAFTAHGRALAAARRSVARAAAIAGSASSSASGGGAADDVVSKVVSRSFEYLMTVNLGSPPRSMLAIADTGSDLVWVKCKKGNNDTSSAAAPTTQFDPSRSSTYGRVSCQTDACEALGRATCDDGSNCAYLYAYGDGSNTTGVLSTETFTFDDGGSGRSPRQVRVGGVKFGCSTATAGSFPADGLVGLGGGAVSLVTQLGGATSLGRRFSYCLVPHSVNASSALNFGALADVTEPGAASTPLVAGDVDTYYTVVLDSVKVGNKTVASAASSRIIVDSGTTLTFLDPSLLGPIVDELSRRITLPPVQSPDGLLQLCYNVAGREVEAGESIPDLTLEFGGGAAVALKPENAFVAVQEGTLCLAIVATTEQQPVSILGNLAQQNIHVGYDLDAGTVTFAGADCAGSS

SEQ ID NO: 180064 - protein, 106 aa, Oryza sativa
  unsure (1)..(106): unsure at all Xaa locations
  Clone ID: PAT_MRT4530_77465C.1.pep
MAFTLTNVGLSTPAAADMLLVRPVARSWTXVCFPRVGRAGFAVVRPSGPSTPTDMYIMMSGSIYKANEACAVDTASVECAEQXDEVKELLATGIHSRDMLKETFYP

SEQ ID NO: 180065 - protein, 435 aa, Oryza sativa
  Clone ID: PAT_MRT4530_77466C.1.pep
MPSFRIFALDVAFESDDGGNEDEPGSESNPLRLYKTRAVDLDPRRPRVNYLKNLLKCGKDRMVSPDTIPADSQDDRFRTLVQVDWYNSVIMGRSHPVVEKKWLDWQYMSSKNNLVFNEVRKVCERKYVADLLALQYTWNEEVIGQFYSTAFFGTTKKGIDFVKWTIQGQQYRVSMAQFAAALELDDDDLSRPHTFVEDALSPTSTTFLYEKDTPKDCLGTTRELRPYYRVLYSIFRWSLLPIVGDATALPGRHALLLSRMRYNKPDFSIMKLIWSEIYETVSPPSTRATRASSSAAPQRSESSSPINKALRAIFYMCAKTAKKVKKIERRQKEDWIAAGKEVSDIFDDEEFVDPFAAYEAAQDIASGESPSGSTHFFNEESSHSEESSDDEESDTPTEHVPTDPDEAVDTAGQDIDSPHSGDTEIIPSNGDDDEA

SEQ ID NO: 180066 - protein, 1271 aa, Oryza sativa
  Clone ID: PAT_MRT4530_77467C.1.pep
MGSVKFGCSTATGRLVPGRQAGRARRRRGLPRDVARRRGIARPEILLQSYCLVPHSVNTSSALNFGALANVTEPGAASTPLVVGDVDTYYTVVLDSVKVGNKTVASAASSRIIVDSGTTLTFLDPALMGPLVDELSRWITLPPVQSPDGLLQLCYEVAGQEVEAGERITNHIDKHLYSIVESCSDNHSTYVERIVRYRNAKISFEGTLCLAIVAITEQQPVSILGNLAQQNIHVGHDLDAGTVTFAAADCAGSGRASAMEGSDSSRSRDKRDADDDVDARSSWKEDDEHEDVEDRKNRSGKSTRYIYDDEGDEDDYDVRRESRVSKVPRRSPEERSERRLSDGYKDRDGDSSRRRREDNNDWDSSRRSGSRTSGHDVSRSKSRSSDRTSSDRADTRDSRSSADQSKNRSAREAHDYRNELSERWEDTERRKGSARTDKNDQDRRSIDPRYDSPPARDDRIVDSVDNTRQNTLHYNAKSEESDEKCMDQVEGTNRISDNVETKDMLPYVDKDGHALSRDGRNKEARHHREKDDGDQGHSDSDNERNISMKEKIRVDAHGDYKSYRGRDRNRELEGSKEHWGSRQRHDSKEPNDYDVGAEWRHGQERLDGGNFHGRSGYRKDSRGRYESSKGPSSYGNRYDSSDSIEIRPNRNLDFGRESSVSGRRINMGSLQDLTPGTSDPSEENKRNYGNGEDAQERYYDDVQNMDGKIPSDSHTGRGGAIASNNSGAGPSGSGSIISPTPQQGPKGSRPSRGLRGRPNVRDPQRMGLPVPLMPPPPFGPLGLPPGPMQPIGPNMSHSPGPLGPGVFIPPFPGHLVWPGARGIDVNMLSVPTNLPIPPVAGPSFTSSVAAGPNHSIHLNQTGSGLGSPANAPGTGFNPLSTPNHEILQDKPPAGWTPQRGPAGKAPSRGEQNDYSQNFVDTGMRPQNFIRELELTSVVEDYPKLRELIQRKDDIVSNSASAPMYYKCDLKDHMLSPEFFGTKFDVILIDPPWEEYVHRAPGITDHIEYWTPDEIMNLKIEAIADTPSFIFLWVGDGVGLEQGRQCLKKWGFRRCEDICWIKTNKKNATPGLRHDSNTLFQHSKEHCLMGIKGTVRRSTDGHIIHANIDTDIIIAEEPTDGSTKKPEDMYRIIEHFALGRRRLELFGEDHNIRPGWLTLGKGLSSSNFHKEAYIKNFMDRDGKIWQGGGGRNPPPDAPHLVVTTPEIESLRPKSPPQKSQQQQSMPPMGSSSSTNRRSVMNSSQIVVTVVGSETMMPSPWSSNPMSGFGMPE

SEQ ID NO: 180067 - protein, 120 aa, Oryza sativa
  unsure (1)..(120): unsure at all Xaa locations
  Clone ID: PAT_MRT4530_77468C.1.pep
AMLYAARGAHLLCYPGAFNMTTGXLHWELLQRARAADNQLFVATCAPARDTSAGYIAWGHSTLVGPFGEVIATAEHEETTIMAEIDYSLIDQRRQFLPLQYQRRGDLYQLVDVQRSGSDE

SEQ ID NO: 180068 - protein, 824 aa, Oryza sativa
  Clone ID: PAT_MRT4530_77469C.1.pep
MATRLRWWRRRATRLRWCVKFGCSTTTAGSFPADGLVGLSGDAVSHVTQLGGEASLDRRFSYCLVPHSVNTSSALNFGTLANVTELGAASTPLVAGDVDTYYTVVLDFVKVGNKTVALAASSRITVDSGNAKISFVTPANCKKQTEQAIPDLTLEFGGGGGRAAVALKPENASVTVQEGTLCLAMVATTKQQSVSILGNLAQQNIHVGYDLDAGMVTFATADCAGNGRPTEQTSGGQARCGRGRWRRRGGGRGERGCRRRRRPWPQFSRPRRQRRRRRECVSAGQRRAKQAVEGRAGTTPKTASSRAGATGRLSLLKRRRRRRLPYLVSSSSSPPPQPPPGPLRGSDPEVARAATGCRTSSPPASRPAERREVRGRDEEGREEEEEMTWHSDMWGPHGSHADSATTSDKTGVKTPEDLNTVAFHGNPSKPGDPPSYTSPYLPSASHPIQTRDAGTLNPSSNAFGGVSRVGEEGVAGAEGEELSKMGPEAARETKGSLAAAFGFLGTSGGEPRAAPPRRRLPLGAPLHRQPHRRLQPLGRPQARPPRRADVKAALRCRLISNSATTSAAVDGHVSHAFKRAGESSAWVLILRRSALEASGAIVDDAFTVECTITVITEIPDNVAAAAPAAPANVLPPFSGRGLSLSHHLGELLRRGTGADVTLVVSGKCFPAHRAILASRSPVFMASLFGDMKEKSSRSVEIRDIEPQVFGAMLGFIYTDSVPELDQQDGVVVAQHLLAAADMCGLDGLKIMCEEKLIAGATVETAATTLALAEQHGCPRLKARCVEVVAANLDAVMATEGYKHLMASSPLVMNDLLRAVRGRKS

SEQ ID NO: 180069 - protein, 405 aa, Oryza sativa
  Clone ID: PAT_MRT4530_7746C.1.pep
MKISLAKASQKNPPVRYDALSLHKSRQALSRSTRRSWHMDVTDLPAVSVSAAASLKARASSLCSRTNPTRQQAPEEGTCECNLRLLAAGAGWGSAVAATGGGGPSDLQRRRRECLAMARLLGKCGWRRRRLGKCDGGGSPSGLRHRRREHLATALTRESALRHLGRWGNKFGKGSCALAKVKEKVRAGGGRGGATSAARAPLPSLAAGFTSAGVYNIVLSTHRPPPTHHSPLIRSNGVLQSTTTHAPRRPAGHADASSGAEPERMYFVLLKPRADARMMDDGELRSWHMSFLPGDMTASGKRRAARALVPARLGWLCRVVDGGRAGGGVHQARLLQVHSGRADVPRGDARQNRGQGGWVTDSGSGVIIGVIDTGINSRATTKLSAPDPTVRDKNKSRIEYKFSKL

SEQ ID NO: 180070 - protein, 349 aa, Oryza sativa
  Clone ID: PAT_MRT4530_77470C.1.pep
MATAASFRPEAARSPPAVQPPAPPLSKVVLRFPWFSSGVRVILSWFKVALCQLSVTADKARNIARAREAIEAAAAGGAKLVLLPEIWNGPYSNDSFPEYAEDIEAGGDAAPSFSMMSEVARSLQITLVGGSISERSGNKLYNTCCVFGSDGELKGKHRKIHLFDIDIPGKITFKESKTLTAGQDLTVVDTDVGRIGIGICYDIRFQELAMLYAARGAHLLCYPGAFNMTTGPLHWELLQRARAADNQKLIIHVANLVVSNSNRTFCYQLFVATCAPARDTSAGYIAWGHSTLVGPFGEVIATAEHEETTIMAEIDYSLIDQRRQFLPLQYQRRGDLYQLVDVQRSGSDE

SEQ ID NO: 180071 - protein, 273 aa, Oryza sativa
  unsure (1)..(273): unsure at all Xaa locations
  Clone ID: PAT_MRT4530_77471C.1.pep
HATHVFIFSLDAHTYAWVQRTTEALTTDGEIYRSMAVVGVGSVKFGCSTATXAGSFPADRLVGLGSGAASLGRRFSYXSYCLVPHSVNTSSVLNFGALANITEPGVATTQLVAGDVDTYYTVVLDSVKVGNKTVASAASSRIIVDSGTMLTFLDPALMGPLIDELSRRITLPPMQSPDGLLQLCYEVAGREVEAGERIPDLTLEFGSGXAAALKPENACVMGQEGTLCLEMATTTSPTPTSTPAGAGQHEVGGSRWRVDGGSRRAAARARGGG

SEQ ID NO: 180072 - protein, 132 aa, Oryza sativa
  unsure (1)..(132): unsure at all Xaa locations
  Clone ID: PAT_MRT4530_77472C.1.pep
CLCCCCYVFCVLCIISVYYFVSVLLFCDGVSISXYVFLCVFLYVFLYLSWYXCICLCICFYAYIFCCVVSLLMSCLGYLYYAFCYLLCRXLCLLCYVGVSCCVGCILFSCRLVCAMLLVCLAMYLCASFLLV

SEQ ID NO: 180073 - protein, 36 aa, Oryza sativa
  unsure (1)..(36): unsure at all Xaa locations
  Clone ID: PAT_MRT4530_77473C.1.pep
XSRSLSCTLSPSSKAGRSTLKTCMQMSTPYTDSYIY

SEQ ID NO: 180074 - protein, 236 aa, Oryza sativa
  unsure (1)..(236): unsure at all Xaa locations
  Clone ID: PAT_MRT4530_77474C.1.pep
REKCAGCFSKPNILKFEQAANIELQRLHEILQSFTPRDEPDKRRNEKGSTLSLTTKQIYDXIKLPPGAVSPLWDAIWKCRAPLKVKLFAWLLVEDSLSTKKNLQKKNIVPTGTCDIYNEGTETTSHFCFLCPFAKSFRDKIGVQPMIQDVHLFHXLKLVHGVPILHFQIFYLLCFWAMWNHRYDVVFRGQAPSIASWLQRCMREAALWTENIKTEDRHVISVWKEILSSXLQTLNS

SEQ ID NO: 180075 - protein, 79 aa, Oryza sativa
  unsure (1)..(79): unsure at all Xaa locations
  Clone ID: PAT_MRT4530_77475C.1.pep
YCKAVKTLTRDRLXICQEEDDWKRIXDRMPCTHLKELIKEAHDKHKLIVKTIKSDPWSVTHDYQCKVIEDDTLISKHGS

SEQ ID NO: 180076 - protein, 32 aa, Oryza sativa
  Clone ID: PAT_MRT4530_77476C.1.pep
HVRLVHLCLSIHALCPPHSHPYIILSFAMIHS

SEQ ID NO: 180077 - protein, 71 aa, Oryza sativa
  Clone ID: PAT_MRT4530_77477C.1.pep
STIVFITYEFQEACIIDSALCTLCKTEASTQQYITEGPPKPKHCIPTRNYMLQHKDALGIYKLATATLMVL

SEQ ID NO: 180078 - protein, 74 aa, Oryza sativa
  Clone ID: PAT_MRT4530_77478C.1.pep
AAGCTSTTDHRHLQVKKKTLIGSRGIAAGRVIWYHTVISRKKKFLNDIDDLSPSKFRSPLHLFFYLTEKLKLSP

SEQ ID NO: 180079 - protein, 47 aa, Oryza sativa
  Clone ID: PAT_MRT4530_77479C.1.pep
SGTVVRNQIEEPETPRSRQIHDGQSAPQASGSVSSPALSSLIIPSIP

SEQ ID NO: 180080 - protein, 185 aa, Oryza sativa
  unsure (1)..(185): unsure at all Xaa locations
  Clone ID: PAT_MRT4530_7747C.1.pep
MAGLAHLVLALLLPLALLPPAARGTEETPQYTTVHAESDFEVRRYRDTVWMSAPSDDISFHVATKLGFHRXPLHSSAYFVRLYLPAKFQAXPPVPLPELNLHPDRWPSHCIAVRSFSGYARDNNVVEEAEKLALSLSRSPWANSTNYPSKSAYSIAQYNNPFRIIGRLNEVWFDVDCKSTGVEAY

SEQ ID NO: 180081 - protein, 164 aa, Oryza sativa
  Clone ID: PAT_MRT4530_77480C.1.pep
MAARPDEDIPATLDVNKGDGLRHTSHEENEDDVNQVDGSHLRKNDQAYHGPIMRSCTRIIQQELNSLFAQLNPNFSENFILPKCSIFVLPRFTPKDIITMPRRMSYVEDDKGNIEEESTHAQPAAVYANKKMVYGAKAQISRLVRPSQSRDRVHGIHGWKEGKV

SEQ ID NO: 180082 - protein, 37 aa, Oryza sativa
  Clone ID: PAT_MRT4530_77481C.1.pep
SAVLDMVEECTTGSRNIYSTMVVLYVDIMDVCFFMSL

SEQ ID NO: 180083 - protein, 524 aa, Oryza sativa
  unsure (1)..(524): unsure at all Xaa locations
  Clone ID: PAT_MRT4530_77482C.1.pep
MAQIKLDFALETSNKWQITSGPLLRWQKKLKRATEECDDTIRMCRQRVQEEQEAEQVARNSFFPRRIAHATKSLISSIFHGNIDEPSRSVVRRFEWFADGANDFLRSVEYGGTPRHYLFFDPLIGHLLAVMALHLRNAKARVYQMLWKSKHGGAYLEVVKATMNMTSTRRTIRGAKKAKLLRGMDQRTQRRTVVTCDFICDFLNLWAAHAPVQLQGSILDWIQKEKETEKGFINKNILMSEVVVSAVISEAVSRVSTFFINKHKRKLNEEDGMERLEMARIRMEAALEISSRWPPVTDASLLRWRKKLKRTSDECSQVMERCKRRAMEDDEMEQEVRQCAFPKRIAHATRSFLSSFTGQKKVDSLITTSTIQKFERLADGASEFLRFMEFGSIGRRINYMLVDPLTGHLLAGKALRYEISQGNQHYLAAWPMSFAERGLEAGVLLWYQNHERPEKNFIFGILLRLAASTNVTGIVARCLELLPPNFKPVAEAAKQEXHSETHHARPNSACCQGHNHHGRYPEPV

SEQ ID NO: 180084 - protein, 73 aa, Oryza sativa
  Clone ID: PAT_MRT4530_77483C.1.pep
RAATNLHESNNIQGFASVFSIRLITAFSERKHIRCRKYNCTLHGLTTEDNYAKRLEDFTEHGSNWSRSLLESG

SEQ ID NO: 180085 - protein, 36 aa, Oryza sativa
  Clone ID: PAT_MRT4530_77484C.1.pep
LVASTFLVWVRLCINGEHGKILCGGAYSCHGGHIRA

SEQ ID NO: 180086 - protein, 33 aa, Oryza sativa
  Clone ID: PAT_MRT4530_77485C.1.pep
MSPPPVANAGLTAAMPSVTRRSDRRDAAGLTAG

SEQ ID NO: 180087 - protein, 51 aa, Oryza sativa
  Clone ID: PAT_MRT4530_77486C.1.pep
LFVVLERPKSQKTLLNITIKDGMPLNRGTTKQPLTNAVSLDKVCCLNLFTR

SEQ ID NO: 180088 - protein, 77 aa, Oryza sativa
  Clone ID: PAT_MRT4530_77487C.1.pep
MGGEGTAPRSSDLMFRRDNIVFSLLVDCLVFRTAVHSPPFMFLGLYGYPDSDHASPPEAVVVGDTRFMPPTPQLESA

SEQ ID NO: 180089 - protein, 229 aa, Oryza sativa
  Clone ID: PAT_MRT4530_77488C.1.pep
LDQRRAARGQLDWIRGCFYIEEHEEEEEEGHQAYPSPIHRFFLEIHHPARARARGRGRGKAATAMLGHLVGLVKVRVVRGVNLAVRDLRSSDPYVIVRMGKQKLKTRVIKKTTNPEWNDELTLSIEDPAVPVRLEVYDKDTFIDDAMGNAELDIRPLVEVVKMKIEGVADNTVVKKVVPNRQNCLAEESTIYISEGKVKQDVVLRLRDVECGEIELQLQWVDIPGSKGV

SEQ ID NO: 180090 - protein, 559 aa, Oryza sativa
  Clone ID: PAT_MRT4530_77489C.1.pep
MAPARVHSNGRLLMLLLLLAVAGFAAAQPSQDNPPAGYYATNFSPSMAIVIVVLIAAFFFLGFFSIYVRHCYGGRGDYSTTPLPRSGAARSRRQRGLDQSVLATFPTMAYADVKAHKSVKGALECAVCISEFDDDETLRLLPKCSHVFHQDCIDTWLASHATCPVCRANLVDGASEPASDVAAELPTAPAPRPEGATPSEAAAPGGEAPAAAAAAAVVIDVEETEEERIIREEAAELTRIGSLKRALRSKSGRAPAARFPRSHSTGHSLSSSAAASAGAERFTLRLPEHVLREVIAAGQLQRTTSLVAFRAGRQGSTRRGLRSGGGGGGGEGSSRAGRSVRLGQSGRWPSFLPRTFSARLPAWGSRSTRRGDGDGSSKGGRTAGSGAGAGGNTTTCSPRISSPCSPRTSPPVPPHLFVMECYLGGADACAELTENGQLLVMAKRLGEEGLMQEFASRVRLLMDPAWTTPWRRPGGEAGHAVDAAAEEEEDAGHRTAAGSGGDEEDDDADKEERIPSGRAGTGHADADDHREKGENRGNKERRLTWITLTCRAHGNSAAT

SEQ ID NO: 180091 - protein, 214 aa, Oryza sativa
  Clone ID: PAT_MRT4530_7748C.1.pep
MAGLAHLVLALLLPLALLPPAARGTEETPQYTTVHAESDFEVRRYRDTVWMSAPSDDISFHVATKLGFHRLFQYLMGANLNSSRIRMTTPILTSIVPGAGPLHSSAYFVRLYLPAKFQASPPVPLPELNLHPDRWPSHCIAVRSFSGYARDNNVVEEAEKLALSLSRSPWANSTNYPSKSAYSIAQYNNPFRIIGRLNEVWFDVDCKSTGVEAY

SEQ ID NO: 180092 - protein, 200 aa, Oryza sativa
  unsure (1)..(200): unsure at all Xaa locations
  Clone ID: PAT_MRT4530_77490C.1.pep
MEEAAAAADMNGGVHQSRFRRVCVFCGSSSGKRRSYRDAACXLGKELVARKVDLVYGGGSLGLMGEVAEAVRNGGGHVIGVIPTTLMGKEVTGETVGEVREVGSMHERKAEMARRSDAFVALPGGYGTLEEVVEVIAWAQLGIHAKPVGLLNVDGYXDFLLALVDKAVADGFIPPSHRHLFVSAPDAPSLVHKLEEYVPV

SEQ ID NO: 180093 - protein, 144 aa, Oryza sativa
  unsure (1)..(144): unsure at all Xaa locations
  Clone ID: PAT_MRT4530_77491C.1.pep
PTTAENEGDVDAAAVLAGGGHAEDYVAAILATGRGRAEDNAAAKCGPEVRLPFEQNTFSHADLTGEELDLQVEGTDKWVGEAVEVVIAIADGGGXEPSVVFAGVSXSAGPARSSPKRRGYVQGSIAAQVETQGRRQQGRVXCPP

SEQ ID NO: 180094 - protein, 104 aa, Oryza sativa
  Clone ID: PAT_MRT4530_77492C.1.pep
PCQLAACGGDENTTSSDITITTLCIHQPKPDIQMDLDADLEGILGPMSTCCKAYEVYFQMDFVPRQNSHQAIGNLQNKLRISLLSDVNRISVQLITRGEVVLRL

SEQ ID NO: 180095 - protein, 86 aa, Oryza sativa
  Clone ID: PAT_MRT4530_77493C.1.pep
MAGRIGVHVQPRLSRSQIGNHEFPHMTNKIYISVRVNDSTAGGGSTDSKAVALGAWVDEFMNTYDIDHWKKQCERQAHGIEWIYLG

SEQ ID NO: 180096 - protein, 156 aa, Oryza sativa
  Clone ID: PAT_MRT4530_77494C.1.pep
MRRRRLRIGKVLDCFSFSMCCARSSGCLCLRASEEDGDEEAAMERKSLVSSSSQVDQVIRLRDLVDGTRTLGFHLEPKTVELKVSMHCNGCAKKVQKHISRMEGVTWFEVDLEKKKVVVTGDVTPLEVLQSISKVKFAQLWPLPPQPAAPATVSSA

SEQ ID NO: 180097 - protein, 105 aa, Oryza sativa
  Clone ID: PAT_MRT4530_77495C.1.pep
MAEEKKHHHLFHHKKDGEEESSGVVDYDKEKKHHKHLEQLGGLGAIAAGAYALHEKHQAKKDTENAHGHKVKEEVAAVAALGAAGFAFHEHHEKKDAKKHAADQY

SEQ ID NO: 180098 - protein, 68 aa, Oryza sativa
  unsure (1)..(68): unsure at all Xaa locations
  Clone ID: PAT_MRT4530_77496C.1.pep
MTYMVKYDTVHGQWXHHEXSVKDYKTLMSGTKDAAQIRWKDTEEIPWARVGAEYVVEDTGDMTDMDKA

SEQ ID NO: 180099 - protein, 138 aa, Oryza sativa
  Clone ID: PAT_MRT4530_77497C.1.pep
MVKEEEGTHRNDASKEGNGAEGVAIVKLAIRHGKSFAYSSLSSPTHRTKSHTIVEECRTAPIHRPSYEVTTEHPGAPRGHNLTDGRSQPPPPSTLGAGAAKPPRLLARCHHHQARRRHSSAASLTAGKPCRHPHLPHH

SEQ ID NO: 180100 - protein, 485 aa, Oryza sativa
  Clone ID: PAT_MRT4530_77498C.1.pep
VCSRYVMINMNTVSIGIEDRKCSVIWAASGILRETNPSLPPRTSSSPRKPHRLPPLHSPPDAAMLRRAIGLPAAAGRAASSRWRGFLTVSFDLEDGKHERAEFKLSVPWGSTSASPSGDAIERAVSSEGCKVDTSRLTMNSMGKGGVIASSVLMTATNFDASKARSRRGRGRQMNLVDIHIWPQESRAAATLMRKNDKSRLAWHSTWSFDMESTNSPRGKSLLTSNLSDKTQDLQYKGFICNEIANEFEVSLKNHFSIHQTLGRGAEGQVLRCSTQKGAHRSAVKRCDVPRKHADEELRSCANVLLMIIWTEKKMETLMKLEFFKEAVLGINYLHQKGFIHRDIKPSNIFLDNLNNVKIGDFGSGAFMGSASCLGRGNRFWGTQFHASPELWNMHTHNEKTDVFSLGILYFELFGGPTSSNGRYKRLEKLESILNSSKWKTNPLQTWLNCNISKGWGGKVPVLIRMLQISPRLRPACRDILLMLS

SEQ ID NO: 180101 - protein, 480 aa, Oryza sativa
  Clone ID: PAT_MRT4530_77499C.1.pep
MIKRRYFRQDHGDKSGSSSSSSSSSSGSDSDREPAEEAAPTEEVEEQQEEQEDEQHVGEEDSGEEQEEELEPVVEQESSGYQSEYSSGNDVDEPSADSDEHIILRHEEDPEINSSVKRASSGKADSTKDASDTDDALEVDFNNYILKCKSVYKCKLCPRIICLNEEMVRVHLKSKRHARSKKLLGEGRLKLMLNSDGELEEEQETHAERHARTVALAQAAPKPKEEEGEQRRNAQSARQLEPGRLGARPGKRRRNAGDPPPTMTRRSGHPAHDATASGGTEHTSTAAAQWSTTVAQWRPGRHGYGGACPKSRGPPASRSLGEARDVRRGAGRCRGETASAPDSWHLGCDIGSKIPAVAMARAVRRSKAGSSSRPTRKRKNVGVVEDSDGVVEDSDSGVSEVRRQVWRMSCPPPTLGRTPAAVPRQLACRPSPARPPPTLGRPPAAVPRQLAHCPLPTWPPSTLGSTPAVAPRQLTCRHAC

SEQ ID NO: 180102 - protein, 179 aa, Oryza sativa
  unsure (1)..(179): unsure at all Xaa locations
  Clone ID: PAT_MRT4530_7749C.1.pep
RVSSCVCENRAPFSRATPSDACSSHLPLRLLLPSPYPPPPPTPPSPYPPPPPTPPISQRRRQHRSGFVAGRRSEDGSIACDREGIRRRRQRGRRRRALGKAAMTTVVTATMAVTXFLVLVLRMSLYALPSTTIDRVNDRSTSTTIDRVNDRSTSTTIDRVNVTICLVAYDVFLISKTYA

SEQ ID NO: 180103 - protein, 1530 aa, Oryza sativa
  Clone ID: PAT_MRT4530_774C.1.pep
MSERKMDRFAALGKDVLSLGIDDDMAAAAAIGFVDESKDQQHLDNSIPLSPQWLYAKPTDAKILGHGSLLDPSEKEVRMPEGAADKKERRRNVFDADSSLRWLEEERETSLPGRRERKKEVDRDMESRKNDRRSDNVSVRDGGDSRAPPSERWNDGSTRGSGNEGRRDGKWSSRWGPDDKEKDSRSEKKLDAEKDESHAEKQTFTGRLLTETDSRDKWRPRHRQESHSAGTGTYRAAPGFGLEKGRAKESNVGFSAGRGRANPNSIPSFTRPSSAGPIGAPATHGKCASSAVTFCYPRGKLLDIYRQQKAMPSFDDVHCKLEEVPSVVLSSPVKPLAFVAPDTDEEAVREDIMKGKVISSEVANTTGMQRDRKKELEGLASGIDGKKDTSSVAFSGLGQEESSTLISEKDAFYDGGVISAGITFPSKDLTMEQNEFGLSGIREDAKINEVNSSADLDLGVKLPNDSSSLFLESPFEHIQQPPVLYQNNDMDTKASGQASYPEDLTLFYLDPQGGMQGPFLGADIISWYEDGYFGLELPVRLANSPDDSPFRPLFEVMPHLGQKPQPLPPVSHGETSESPDSVHNSFDDKVPASGSFGKNDQTSKRDSESYVLDLKRGEQEAAVQSHMSWLPSHETEKTASNVDIRQQHIPESVSLDAEEILYTARPNSSTGQSLRDLENDRSDFQLGSRDHRAAMGEANLPQHDVPRESELSPLGLLWSELEGMHPKQPLSSNVLGVNERRNPKPAAPKDIPPVSMRHGQLGRMNEAPVVRDEWPANFGRLDNVTDTNISGRLPQLEPDLNHLNMEEQMLLQQIRREQRQQEQLMARNNLEFPGPFPGQVFDSLHQHRQSMNQPVPEVEHLLRVQFELEQQQRRQQLQQEQHQRQLQQRQAQQLLQQQQQQQQQQQQQLILEQMLQQQLQASNFGPTNMVDQVLLREHVLNDLHHQPHHLQRQHDAAIEQLIQAKFGQGIHREHHNDLMDVLSRSNQRQMLPLEQQILLGLHHDQLQSQQLANALRQHAGREEERHLSGGWPMDESGHFIRSGTSPNQGHASRLGHFDLLQSLQRSSSVEQHEHLERSLSLHERLHRGGQGIHSLERSGSLPGGAPLPNLDVVNSLARHHGIGQLETHGDLYSLGQMPMVPSGVHPQQHRLQEQLSGNLARLDRHWSDANGQLQNTLMEPSRISQMQMEAQKQRRNVEMNLAVDNSHAWASLRNNERSTEQDLSDLFHQKLVQSQQSRGYPDVPVPASFGRKDPSSLFAQPAADNPLRSPADRLSFDDPLAERSLFAKAGQAGQEGAANLESLTSSIENSGKLGLRSSSGSMLDMQRGDFSGIMGGGASGNQLVGLANEVPRGKRQGSSASLVGDDTNFAEEAGSNWPEATMPKGGTHSLLKRPPSQHGSATQALSTDISSTIRLKKAGHASSDDHKLESGGVTSAAQPVDIPVSTNKEAGSFISPSGTSVDGPSFREMVKSTKKPALQQYDASESADGGPGGKGAKKKTKKGKQIDPSLLGFKVHSNRIMMGEIHRLDD

SEQ ID NO: 180104 - protein, 53 aa, Oryza sativa
  unsure (1)..(53): unsure at all Xaa locations
  Clone ID: PAT_MRT4530_77500C.1.pep
TXXSFADMMRRKISXXAHLMYDXKDDNLFEHFSAVAQPAXCLHCKRLCREFFV

SEQ ID NO: 180105 - protein, 149 aa, Oryza sativa
  unsure (1)..(149): unsure at all Xaa locations
  Clone ID: PAT_MRT4530_77501C.1.pep
KIVRPVRSKHCSTCDRCVEQFDHHCPWVSNCIGKXMVRDPASPASFIPWLSYSAFNHTGALSFFIMDLFLFFGVAVLAVVQASQIAKNITTNEMANSMRYSYLRGPGGRFRNPFDHGARKNCSEFLLNGYNEDIERLDHTSHTDEEMGM

SEQ ID NO: 180106 - protein, 163 aa, Oryza sativa
  Clone ID: PAT_MRT4530_77502C.1.pep
TRNKKYSFFPGKKTPFVIPGKKKNGGEGPPILIPDKGGESAKKKKKKKKTQRKKKRGPGGKIIHNFPGVTQYTGGLKNTRTYGGGFGVCKKHIGGFLGVWGKTRGPGSQICHKIGQGPRPISWGEKEGGTRDMHMRCGKGKRGFYRKNPIWGTKKELTPHTGG

SEQ ID NO: 180107 - protein, 642 aa, Oryza sativa
  unsure (1)..(642): unsure at all Xaa locations
  Clone ID: PAT_MRT4530_77503C.1.pep
MASEIEVLEDTTTTMAASAAPVAPASPSPSPAAAADGEEGEGPAPAAEDDSLKNDVYTAAAYGDLEKLQRLVEGEGHPVTEPDGLGYHALQWATLNNRVAAAQYILEVVPHCASRPSVARFGWPSSSRCLLASEGFGWGFGVFTFSSLAGVLDRLHYLFSCLXHTHGADVNAVDHTGQTALHWSAVRGHIQVAELLLKEGAKVDVADLYGYQATHVAAQYGQTAFIYHIVAKWNADPDVPDNDGRSPLHWGNLEACTVLVQAGKKDDLMVKDKTGLTPAQLAADKSHRQVAFFLDNAKRVYDRGCDGNTNFGKLSKLGLAPVLWCIIVGLLATYIHSVISGQYIMDMTAPFGLFAWSGVFLATAGLVMFYKCSRKDPGYIKANIRDSQNQRDDEPLLKLELDNPALLSGNWSQLCITCKIVRPVRSKHCSTCDRCVEQFDHHCPWVSNCIGKKNKWEFFMFITLEVFAMIITGSAAIIRMVRDPASPASFIPWLSYSAFNHTGALSFFIMDLFLFFGVAVLAVVQASQIAKNITTNEMANSMRYSYLRGPGGRFRNPFDHGARKNCSEFLLNGYNEDIERLDHTSHTDEEMGMIQMTNAVSQNGEGPSHHGNGTGHSCAESHAHSKSHSQIVCVHAEAPLFI

SEQ ID NO: 180108 - protein, 151 aa, Oryza sativa
  unsure (1)..(151): unsure at all Xaa locations
  Clone ID: PAT_MRT4530_77504C.1.pep
PRTRPHDSPLVPRPYVLNRMVTGREKILTTSRASHTLSLXIQCXQQVQDVSQXCRCAAMRRIVRSYEESMPMPLHPGCAAYWSEYYCMEGSEEKHGYFLEGSFEEGYYGEQHQQPWMTRVRLTRARQYAAQLPRMCRIEPQQCSIFAVGQY

SEQ ID NO: 180109 - protein, 54 aa, Oryza sativa
  Clone ID: PAT_MRT4530_77505C.1.pep
HRPERTHICLNTSQHTSQVSCYQFFLTHSMCHKRWLVTSPNLPSPRSASFAACT

SEQ ID NO: 180110 - protein, 44 aa, Oryza sativa
  Clone ID: PAT_MRT4530_77506C.1.pep
LNCGISTPKNVKLLHRQIYPEAAGGARAMRTETVQACLLSLLLV

SEQ ID NO: 180111 - protein, 58 aa, Oryza sativa
  Clone ID: PAT_MRT4530_77507C.1.pep
SPCKYQINHNFFHTETFSESTFTSSELVTKKRKQNYILYLQRHHKELLTVLTVSLMFD

SEQ ID NO: 180112 - protein, 131 aa, Oryza sativa
  Clone ID: PAT_MRT4530_77508C.1.pep
MTKSIRGKKCSSRQLRSHNRRLFSQCNFKRVANKELAATEKYSRRSSKDCEDLDSIELTCPLCRGEVKGYTLVEPAREQLNQNKRSCMQDGCSYMGSYGELCKHFEELMASVWHEGPHGAMQINEMNLADP

SEQ ID NO: 180113 - protein, 1422 aa, Oryza sativa
  Clone ID: PAT_MRT4530_77509C.1.pep
MGDVLPRSYARPAGMLPPNNEFGIREITPGLACSGPGGAYELVERMEYLYVRVVKARGLKWSGEFDPFAELRLGGYSCITRHVEKTASPEWDDVFAFSRERIHAPFLDVLVRGRGFAKDDYVGSTRLDLGILPDAPASVQPDSSPAPQWYPVFDKKGEFRGEVMMAVWFGTQKDSYFDSAVHADAAFPVDDKLAAHIKHIRYDVPRLCYVRVKFTEVRDIVFADKARVGEVFVRSRILGQVHRTRTSMDHRWKDEENGHLFVAAAPFKDYLNMSVVGVKNGKEEVIGHVNVLLDSFERRCDARPISPRWFSLMQPEGAAKIDKYSAKISVVLCLECGYKVLSEPVHYLSDVRPAAREQERERKCIGLVELGIREAILTATRTRDGRGSCDAYCVAKYGVKWYRTRTVTDSISPRFHQQYHWEVHDHCTVLTVAVFHNSQIGDKGGLVAGDPVKDVLLGKVRIRLSTLETGRTYAYAYPLMSLHGGGVKKMGELRLAVRFSSTSTLGLFQTYAQPHLPPMHYHRPLTVVQQEMLRREAVTIIAHRMGRMDPPLRRECVEHLCESHALRWSMRRSKAHFFRLAEALEPLSAASAWFYHVCRWTNPVTTVAVHVIFTMLVCYPRLVLPTFFLYKFMLGMRNYLRRPKHPWHVDMRVSHADTAHPDELDEEFDEFPTARPPEVVRMRYDKLRSLNARIQEIVGDIATHAERARCVMTWRDPRATGLYLLGCLCLAVITFSVPFQAVALLTGFYLMRHPILRQRLPDVVANFFRRLPCKNTAPLAPAAAAQLHALLLTSGHLLRYHGLHPLFMVYCACGRPSSAHNLLAQMPQPPPVSFSNSLLRSYTGLGCHREALAVYSAMRAFDHLTFPFAAKACAGLRLGRHGRAVHCRALAAGFGGDTYVQNALISMYMSCGDVGAAEAVFGAMRNRTVVSWNAVIAGCVKNGYAERALEVFGEMAADGVGIDRATVVSVLPACAQAKDLNTGRAVHRLVEDKGLGDYVAVKNALIDMYGKCRSLEDARRVFDHCKHDKDVVSWTAMIGAYVLNDRAFEAISLGCQMLMSGAAWPNGVTMVYLLSACASMPSGKHAKCTHALCIRLGLKSDIAVETALIDAYARCGKMKLMRLTLERGSWRAETWNAALSGYTVSGREKKAIELFKRMIAESVRPDSATMASILPAYAESADLKEGKNIHCFLLTLGFLRSTEIATGLIDVYSKAGDLDAAWALFQWLPEKDVVAWTTIIAGYGIHGHARTAILLYDRMVESGGKPNTVTIATLLYACSHAGMIDEGIKVFKDMRNVHGLMPNGEHYSCLVDMLGRAGRIEEAHRLIQDMPFEPSTSVWGALLGACVLHKNVEFGEVAAKRLFQLDPENTGSYVLLGNIYAAADRWRDVQDVRRMMVERGLLKEPGSSLVEARSVQCRTAMP

SEQ ID NO: 180114 - protein, 92 aa, Oryza sativa
  unsure (1)..(92): unsure at all Xaa locations
  Clone ID: PAT_MRT4530_7750C.1.pep
PRVRVRVGPKPPKPGPKPNPQPPMPGPYRKPKPPKPGPKPKPGPPQPWWPMPIXNPPCPSRRLRVVGLAIISASLDRASMLTSAQHLNGCPN

SEQ ID NO: 180115 - protein, 92 aa, Oryza sativa
  Clone ID: PAT_MRT4530_77510C.1.pep
SSSGDALPLRMRHRRPRPPRAAAAVAPFPTACGSGGDSFSWRRGKGRPTSPLSPLLLVQMAQLLCGRGTPRRSAPRACRDWCQAATASAARR

SEQ ID NO: 180116 - protein, 381 aa, Oryza sativa
  Clone ID: PAT_MRT4530_77511C.1.pep
MAMSPCEVREGARDSGIDGMLAKEAWRLERSEWLEEVESNDDESMDSQAIPRMRKISTKVKHKVGWTDDIPQVSDLENDILTAEFSEKEVKEAIFQMDHNSSPGPYGFPAEFYQVFWEIVKNDLMALFREFHKGTLPLYNLNFGIIVLLPKKADAKQIQQYRPICLLNVSFKIFTKVGTNRIATVAHKVIRPTQTAFLPDRNIMEGVVILHETVHELHTKKMDGIIFKIDFEKAYDKVKWQFLQQTLRMKGFSQSWCNWISNWVEGGTESPYTIENSEILIGNVWRIGFKENLAHGRAKTTPMPKDQGGLGVLNLDIMNRCLLSKWLFKLLNGDGLWQNLLRNKYLKGKPLSHMSHKLGTSQFWAGLMLSSFVPIGSTLGV

SEQ ID NO: 180117 - protein, 57 aa, Oryza sativa
  Clone ID: PAT_MRT4530_77512C.1.pep
DSERIIVRSNLDQPDSNRARALQHMAEIQKGLPPGTILDQAYDSTRSGSIVAKRKST

SEQ ID NO: 180118 - protein, 364 aa, Oryza sativa
  unsure (1)..(364): unsure at all Xaa locations
  Clone ID: PAT_MRT4530_77513C.1.pep
IPIHYRKLRNSDWKCVEDRFQRKLSTWKGKNNSYGGRLVLLNSVLSSLPMFMLSFFEILXGALQRLDYSRSRFFXSSDSQKXYRLTKWEYICRXKGGLGVLNLDIMNIYLLSKWLFKLLNGDGLWQNLLHNKYLKGKPLSHTSHKPXTSQFWAGLMKVKDHFFFXYGSFKPGNGMEIRLWEDTWLDLQLLKYQYPSLYNVVRKRHSTLAEVMSTTPLNVSFRRSIVGPKLVEXNDSISRLANITLSNEKDCFIWLLHNNGQFSVKSMYNAIINSNVRIRKRILWEISVPPKIKVFMWFLXKKVILTKDNLIKRKXRGNKQCCFCNTQQTIQHLFFDCYEQQDTMRNGATRLELVAKELLFQFGW

SEQ ID NO: 180119 - protein, 420 aa, Oryza sativa
  unsure (1)..(420): unsure at all Xaa locations
  Clone ID: PAT_MRT4530_77514C.1.pep
MKAILVEHLSGLKINFHKSEIFCFGGAKEMKDQYKQLFGCNSGSFPFRYLGIPIHYRKLRNSDWKCVEDRFQRKLSTWKGKNNSYGGILVLLNSVLSSLPMFMLFFFEIPRGVLRRLDFYRSSFFWSSDSQKKKYRLTKWDYICRPKYQGGLGVLNLDIMNRCLLSKWLFKLLNGDGLWQNLLPNKYLKGKPLSHMSHKPGTSQFWVGLMKVKDQFFQYGSFKPGNGIEIRFWEDTWLGLQPLKYQYPSLYNVVRKRHSTLAEVTSTTPLNVSFXRSIVGPKLVEWNDLISRLANITLSNENDCFIXSLHKNGHFSVKSMYNAIINSNVRICKRILWEVKVPLKIKVFMWFLXQKKVILMKDNFTKIKWRGNKQCXFCNTQETIQHLLFDCHKQQDTMRNGATRLELVRSQGTFILVWIA

SEQ ID NO: 180120 - protein, 167 aa, Oryza sativa
  unsure (1)..(167): unsure at all Xaa locations
  Clone ID: PAT_MRT4530_77515C.1.pep
ATLNIKILAEVMSTTPLNFSFRRSIVGPKLVEWNDLIFRLANITLLNDKXNCFIWSLHKNGQFLVKSMYNAIINSNVKIHKRILXEVKVPQKIKVFMCFLKKXVIITKDNLVKRKWRGNKQYYFCNIQETIQHFFFFDCHEQQDTMRNGATRLELVAKELLFQFRWH

SEQ ID NO: 180121 - protein, 1244 aa, Oryza sativa
  Clone ID: PAT_MRT4530_77516C.1.pep
MGVAELPRVMDALARRASTLRDALGRSQGNTESTVAILGSFDHRLSALEAAMRPTQVRTHAIRMAHENIDKTIKAADAILSQFDLARRAEATILRGPHEDLEGYLEAVDLLKSIVCFFASNKSLKNNDGLLNRVNNILSKSALKIEEEFKQLMTTYSKPIEPDRLFDCLPKPPRAPKDDNDADGGHTHSEHPSKGLETGICRTPTLMPPRILPLLHDIAQQLVQAGNQQSCYRIYRDSRGSALEVSLRKLGVEKLSKDDVQRMQWEALEAKIGNWTQFMRIAANRLCFNQVKLLLAGERRICDQVFDGINFNKDQCFAELAGSSVLTLLSFGDAVAKSKRSPEKLFVLLDMYEVMHELQPEVEEIFEGRFCSEMREAALGLTRRLAQTAQETFADFEEAVEKDTSKTIVQDGTVHPLTSYVINYVKFLFDYQSTLKILFQEFETGSETESQLAVVTMKIMQALQNNLDGKSKQYKDPALTYIFLMNNIHYMVRSVRRSEAKDILGDDWIQRHRRVVQQNANQYKRVAWAKLLKCSNDAYSNLLIADQNGQLVLSQLKVHLKPTAEILQTLSVQATGSSPAELSSSGVSRAMIKERFKSFNMQFEELHAKQTQWTIPDQELRESLRLAVAEVLLPAYRSFIKRFGNLVEHGKNPNKYIRYSPENIDQALGTDALPTSSDKQGIVKVEHEIATVGTERPKNDHNHISMTEGWTDDIPQVSDLENDILTAKFSEKEVKEVIFQMDHNSSLGPDGFPAEFYQVFWEIVKNDLMALFREFHKGTLLLYSLNFGIIVLLPKKTDVKQIQQYRPIYLLNVSFKIFTKVGTNRITTVAHKVIRPTQTAFLPDRNIMEGVVILHETVHELHTKKMDGIIFKIDFEKAYDKVKWQFLHQTLRMKGFSQSWCNWISNWVEGGNVSVKVNDNVGKKFRTCKGLRQEDPMSPILFNIVADMLAILIERAKADGQIRGVIPHLVDDGLSILQYADDTIIFLEHDFEQAKNMKAILCVFEHLSGLKINFHKSKIFCFGGAKEMEDQYRQLFGCNSGSFPFRYLGIPIHYRKLRNSDWKCVEDRFQRKLSTWKGKNNSYGGRLVLLNSVLSSLPMFMLSFFEIPRGVLQRLDYYRSSFFWSSDSQKKKYILTKCDYICRPKDQGGLGVLNLDIMNRYLLSKWLFKLLNGDGLWQNLLRNKYLKVKSMYNAIINFNVRIHKRILWEVKEKHDTMRNGATRLELVAKELLLQSGWCSTYKIP

SEQ ID NO: 180122 - protein, 432 aa, Oryza sativa
  Clone ID: PAT_MRT4530_77517C.1.pep
MKAILCVFEHLSGLKINFHKSEIFCFGGAKEMEDQYRQLFGCNSGSFPFKYLGIPIHYRKLRNSDWKCVEDRFQRKLSTWKGKNSSYGGRLVLLNSVLSSLPMFMLSFFEIPRGVLQRLDYYRSSFFWSSDSQKKKYRLTKWDYICRPKDQGGLGVLNLDIMNRCLLSKWLFKLLNGDGLWQNLLRNKYLKGKPLSHMSHKPGTSQFWAGLMKVKDHFFQYGSFKPGNGMDIRFWEDTWLGLQPLKYQYPSLYIVVRKRHSTLAEVTSTTPLNVSFRRSIVGPKLVEWNDLISRLANITLSNEKVCFVWSLHKNGHFSVKSMFNAIINSNVRIRKTILWAVKVPLKINVFMWFLHKKVILTKDNLIKRNWRGNKQCCFCNTQETIQHLFFDCHEQQDTMRNGATRLELVAKELLFHFGWRTLISGPSALRQE

SEQ ID NO: 180123 - protein, 571 aa, Oryza sativa
  Clone ID: PAT_MRT4530_77518C.1.pep
MEEEGADHRPPSSSSGGRGFLSGLCAAALRRKPISAHAAHAASGEGLVRQLGVFELVLLGIGASIGAGIFVVTGTVARDAGPGVTISFVLAGAACVLNALCYAELASRFPAVVGGAYLYTYAAFNELTAFLVFTQLMLDYHIGAASIARSLASYFVQFLELIPFLKGHIPTWIGHGEEFFGGVVSVNILAPILLIILTTILCYGVKESSAVNTFMTTLKIVIVIVVVFAGVFEVDVSNWSPFMPNGFKSVVTGATVVFFAYVGFDAVANSAEEAKKPQRDLPIGILGSLLACVLLYVAVCLVITGMVPYTLLGEDAPLAEAFAAKGLKFVTVLISIGAVAGLTTTLLVGLYVQSRLYLGLGRDGLLPSIFAKVHPTRHTPLHSQIWVGCVAAVLAGLFNVHELSHILSVGTLTGYSVVSACVITLRWNDKTTSCRSLGNMSIWQEGVLCLVIIALCGFVAGMCYRFSYAIAFMIIALLIAVAAGFALQFRQVYVDPPGFSCPGVPIVPMVSVFFNMLLFAQLHEEAWYRFVILSLLAVGVYAGYGQYHAVPSSSDHPHPAVAYHGIPSEAP

SEQ ID NO: 180124 - protein, 1398 aa, Oryza sativa
  Clone ID: PAT_MRT4530_77519C.1.pep
MRAQPPNGLQSKGPGDGLYKRQPKALLALARKQRRPINPKRSFAEVVRAGEMAGGGGRYGGGRGTGSGGDGQDGDGRGGVFNPGRGEAATGNGSGGASGRGHQGRGGDSNRGPDGQFAVNLNAATASGTDVPRGESRVDIVTAEAGTSSKASKGRCFRCKEKSHAVSECTKILCDICEAPEHTALSCPLLLAPKPTASMCGWGVDGGGFFMIPTPTTGAVKPREHNKTAIIRVENGHISVDNLIIELRRLVPVRFQWDVKETAPDTYMVQFPSVIELDRLRRVGSVPSFDFNVNLVIDKWEQEIEAKFVLKKTWFKVYGVSYEIRDFLSLHAVGSVIGQTTTVDMIYLRKNGVVRMQVAVDELADLPPSVYVVVRNHGYEIFFEPELPEVDGKGKKKIDDIDQDGERKNGGDHDVHMEDRDPKRQKNGSDGSLRMEIGGLAPAKLPSTRTNNMVLDNEAFSPSPSSDTPATTTELEAFASYSSVVLETPMSQLGAQGTGNSESTKEAVGEVVYSDEVSTQLAKLATTKVLSTEVAVQLAGTDEVVTNGKEQQQEPVSMAQELQHVSASFLSPVEHVLDCNVQSELLPKNSQLAGDGRVTSTKNLMAVLATNEDQLSASSAATSKAQDAAQAVGARSPTRRRPRRPVDPIPTRQSERQKAMANADAPVANRAELLKKVHNLETLTGVSLGKNDLEIKESINQIKISEVDRFATLYSSAVASTSNVDKSNDELLKLSSLQHLCSDWLEEAESNDDESMDSQAIPQMRKISTKVKHKVVKNDLAKLLRDEELYWYQRSKTNHLLQGDSNTKYYHLIDNGKHRKQMIFQLEQEDTIITGEGNLKEYITNYYKGLFGPPDHNHVSMIEGWTDDIPQVSDLENDILTAEFSEKEVKEAIFQMDHNSSLGPDGFPAEFYQVFWEIVKNDLMALFREFHKGTLSLYNLNFGIIALLPKKADANQIQQYRPICLLNVSFKIFTKVDTNRITTVAHKVIRPTQTAFLPDRNIMEGVVILHETVHELHTKKMDGIIFKIDFEKAYDKVKWQFLQQTLRMKGFSQSWCNWISNWVEGGTVSVKVNDNVGKNFRTRKGLRQGDPMSPILFNIVADMLAILIEKVKVDGQIRGVIPHLVDDGLSILQYADDTIIFLEHDFEQAKNMKAILCVFEHLSGLKINFHKSEIFCFGGAKEMEDQYRQLFGCNSGSFPFKYLGIPIHYRKLRNFDWKCVEDRFQRKLSAWKGKNSSYGGRLVLLNLVLSSLPMFMLSFFEIPRGVLQRLDYYRSSFFWSSDSQKKKYKLTKWDYICRPKDQGGLGVLNLDIMNRCLLSKWLFKLLNGDGLWQNLLRNKYLKGYLHVFQLAPLLVYDAFTGTTGYYAQWCYTLGNSSQGTFISFWMAWYLQNFVIDST

SEQ ID NO: 180125 - protein, 2058 aa, Oryza sativa
  unsure (1)..(2058): unsure at all Xaa locations
  Clone ID: PAT_MRT4530_7751C.1.pep
MSPSSTWRPTDLRYKRDPPGGPXGIESYRQHIHHNLRNPRTSVPQYPLYPVYGYPPSTVARQVGGLGAQGSTTMSSSFVDNSANPGINQGVSTLTMLVWTQVGEIVFPVYTTVSISTGPSMIGSENAVVTTLDGSMSKDPLAEVENGTSTTSEPEKDPSAAKSCPSDENHELTRTTSEATRSCCPIHKTRKHTLQACWVFLDVQAEIRVCKERGIQRTSLTRDVHCPIHKTKNHDLSSCKVLLSAMKTSPPMVQQSRISLTDVDKERGVTVISDRFVGVIDIDPHEPSVLHLLEDQGLSLTSTPRDVFAIDGTSTSARANAEEENQVVTPAQHIGAINAILREIPYDPVLNDDLARWTXRLRESVANLGNAFEEAAAGAQPEQPTAGGADCEPPEXRTSPRRATPPPRGTSDLHDHLNGRREARRTQDNXNRSRHCVSSRRRGNEERGGHPSENQDRDDREQRVPGDTARGRRNNDDDDGDRRRNNNGERRQDSREPRRHPRNRTPEPSDSSSSSSSSLSDRHPRRTYDRRQPTAPGGGCRAFSHSLRYVRWPERFRPGAIEKYDGSTDPEEFLXVYSMVLYAAGADDNALANYLLAALKGSARSWLVHLPPYSISSWADLWXXFVANFQGTYKRHVIEQDLHVLTQNLGKSLRDYVRRFNECRNTIPDITDASVIRAFKTGVRDRYTTQELATRRITIARKLFEIVDRCTHADDALRRKNDKPKTGGEKKPAKDAPESSKKKSRKSGKRKAQTEVLAAEYADPQGNDTKKIWCPIYKSDIQSLEDCFVFKKSLAKQLALEKGKRVRVVEKVAEAATQDSDSAYPDFDLHVLHIFXAPRRRYPIMVEPTIRNIKVARVLIDGGSSINLLFASTLDAMEIPRSELMPTDQPFHGITPQSSSKPLGKNTLPVTFGQANNFRTEQITFDVAEFDIAYNAIIGRTALAKFMAASHYAYQVLKMPGPKGTITIXGNAKLAVQCDKQSLDMVEHTPSPPATAEAPKKVSKTNKTPKPDGAIKIVPLSSANLDKTELALITFLRDNADVFAWQPSDMPGVPREVIEHKLMVRPDAKLVKQKLRRFALDRKQAIREELDKLLKAGFIREVLHPEWLXNPVMVWKANGKWRMCVDFTDLNKACPKYHFPRPRIDQLVDSTAGCELLSFLDAYSSYHQISMAKEDEEKTAFITPFGVFCYVKMTFGLITTGNTFQRTVQGALNDQLGNNVEAYVDNIVVKTKTSDSLIDDLRETFDNLXRYRLKLNPEKCMFGVPSSKLLGFLVSGRGIEANPEKIKAIENMKSPTRLKEVQKLTVCMAALSRFVARMGERGQPFFALRKKQDKFVWTQEAEEAFIALKRYLSNHPILVAPQPNEELFLYIAATPYSVSTDIVVEREKVQRPVYYVREALHDAKTRYPXIQKLLYAVIMMLRKLRHYFQAHRVTVVSSFPLGEVVRNKDVVGHIAKWVVELSQFDVHFVPRTAIKSXVLADVVADWTMPEXSNSQTDNETXTTAFDGALNSQGARAGFILTSPLGDQFKHAIHLNFKATNNTAEYEGLLARIRAAAALGVKRLIVKGDSELVANXVHKDYKCSSPELSKYLAEVRKLEKRFDEIEVRHVYRKDNIEPDDIAQRASRREPLEPGTFMDVLTKPSVKAANDEDSTVAPDISSGAIEAERVVADIETIDDWRIPLIKFISSDELPADDAEVEKIICQAKIYCMIGNDLYKKAPNGVLLKCVSSDDGKHLLLDIHEGICGSHAADRTLVRKAFRQGFFXPTALKDACDMXTHKATSTSAQNYPSHLAVLVLGPRHTRTIPTRTGRSQIPXVAIDKFTKWIEATPTGEIKADNAIKFVKGIFCRYGLPHRIIMNNGSQFISADFQEYCIRLGVKICFASVSHPQRNGQVERANDIVLQGIKTLLWAVRTTPTTSNKETPFFLVYGLEAMLPTELRHQSTRVQKYSDEDQEEQRNDDVNLLEEHRERVTVRAASYQQALRRYHKKRIRACTLSIGDYVLRWVQSQTERNKLTSKXEGPYTITQVLRSGAFKIADGDGRELANSWNIDQLRKFYV

SEQ ID NO: 180126 - protein, 484 aa, Oryza sativa
  unsure (1)..(484): unsure at all Xaa locations
  Clone ID: PAT_MRT4530_77520C.1.pep
MKAILCVFEHLSGLKINFHKSEIFCFGGAKEMEDQYRQLFGCNSGSFPFKYLGIPIYDRKLKNSDWKFVEDRFQRKLSTWKGKNSSYGGRLVLLNSVLSSLPMFMLSFFEIPRGVLQRLDYYRSSFFXSSDSXKKKYRLTKXDYICRPKDQGGLGVLNLDIMNRCLLSKWLFKLLNGDGLWQNLLRNKYLKGKPLSHMSHKPGTSQFWAGLMKVKDQFFQYGSFKPGNGMEIRFWEDTWLGLQPLKYQYPSLYNVVQKRHSTLAEVMSTTPLNVSFRRSIVGPKLVEWNNLISRLANITLSNENDCFIWSLHKNGHFSVKSMYNAIINSNVRIHKRILWEVKVPLKIKVFMWFLHKKXVILTKDNLIKRNXRGNKQCCFCNTQETIQHLFFDCHEQQDTMRNGATRLELVAKELLFQFGWRNKIAKNIFASRPYNLATSETDFGKRVRSPCDDHHLLSLTHDRKQLGGPLVKMCSYILPPFFNR

SEQ ID NO: 180127 - protein, 224 aa, Oryza sativa
  Clone ID: PAT_MRT4530_77521C.1.pep
MDVSAALSSDYSSGTPSPVAADADDGSSAYMTVSSAPPKRRAGRTKFKETRHPVFKGVRRRNPGRWVCEVREPHGKQRIWLGTFETAEMAARAHDVAALALRGRAACLNFADSPRRLRVPPIGASHDDIRRAAAEAAEAFRPPPDESNAATEVAAAASGATNSNAEQFASHPYYEVMDDGLDLGMQGYLDMAQGMLIDPPPMAGDPAVGSGEDDNDGEVQLWSY

SEQ ID NO: 180128 - protein, 93 aa, Oryza sativa
  Clone ID: PAT_MRT4530_77522C.1.pep
MYVVPFEAHCRHGCPHHHLFAKTVELPRSFRWGDQIRPPLALGWPDLVASDFRVARSGAPKVAVIDPDAKWAKTTPMMEVEARRGDPMNGIAT

SEQ ID NO: 180129 - protein, 115 aa, Oryza sativa
  unsure (1)..(115): unsure at all Xaa locations
  Clone ID: PAT_MRT4530_77523C.1.pep
ILCVNDNGSHIYFLKSKVHHRSLNLYRCVIPVPKLANRPFRPLNLFDCVIPISKLADHSFKFSKSFSCVTPVSKLGFEYHLGQIXRDRGNTTEQVGGPKRVICKFRGRDDTVGQV

SEQ ID NO: 180130 - protein, 606 aa, Oryza sativa
  Clone ID: PAT_MRT4530_77524C.1.pep
MGDETSTSVATQSQEPAAVGAGSVKQQLSKLVIASLRTTVPEVEVDPMVEVCTAKFGDYQCNNAMGLWSRIKGSGTSFKNPNAIGQAIAKNLPPSDIIESTSVAGPGFVNIVLSNSWVAKRIQDMLVNGIKTWAPILPVKRAVLDFSSPNIAKEMHVGHLRSTIIGDTLARMFEFSNVEVLRRNHVGDWGTQFGMLIQYLFEKFPNWEEIGSQAIGDLQTFYKASKNRFDGDAEFKDRAQQAVVRLQGGEERYRAAWNKICEISRNEFDMVYKLLNVKLEEKGESFYNPFIPQVLEELNNKGLIKESEGAKVIFIEGHQIPLIVVKRDGGFNYASTDLAALWYRLNVEKAEWIIYVTDVGQQQHFDMFFNAARMAGWLPDPKEKKYPKTNHVGFGLVLGSDGKRFRTRSTEVVRLIELLDEAKSRSKSELLQRLTENGKIVDWTEEELEKTSEAVGYGAVKYADLKNNRLTNYTFSFEQMLSDKGNTAVYLQYAHARICSIIRKSNKDVEELKMSGAISLDHPDERVLGLYLIRFAEVVEEACTNLLPNVLCEYLYNLSEMFTRFYTNCQVVGSPEETSRLLLCQATAVVMRQCFELLGITPVYKL

SEQ ID NO: 180131 - protein, 338 aa, Oryza sativa
  unsure (1)..(338): unsure at all Xaa locations
  Clone ID: PAT_MRT4530_77525C.1.pep
MKCIRSYRDDCGELVDRSDFDREVAAMEVCRGHPYIVQPRAHGRCDDGEAVLVMEFVGPTLRQVLRRERGGRTRRSELEVRVAMRQLLSGAKRMHDAGLMHRDLKPDNVLVDARGNLKICDLGLSQSTASPPPYSNPIGTRWYCAPEILLGSTDYDERVDAWSLGCIMAELLARKPLFRGSSDREQLGEIVDVLGVNDIKRWRGYKGAAAAGRMXPDSFLRGFFPSPADARMLRRPPLSEAGFEVLSGLLTCNPEKRMTVAQALRHRWFKEADSASLRHRRGRRSPASGRCRRFFQGRRWKGRRGAGRGAQGGGLCTASGRGRRRGRHRECAFEGERA

SEQ ID NO: 180132 - protein, 147 aa, Oryza sativa
  Clone ID: PAT_MRT4530_77526C.1.pep
MRTSEVPPTKLRLGRPASEGRGAADPSAVEPAAGDDDGGCGDAGCGELDRWHGLGRSSRHSTATAMVQSLPARGAAGRRKKMGTWMSLVWFLMFPAKKYKIVVVGLDDGKTTTLYKLHAAQTNLPQPDLSPPWQWQPRGLELVGWRY

SEQ ID NO: 180133 - protein, 204 aa, Oryza sativa
  unsure (1)..(204): unsure at all Xaa locations
  Clone ID: PAT_MRT4530_77527C.1.pep
GTRRKSSSEKALHTSPPPPRXPPPTPTMAATATATXPPRRPDVPPPLLFPLRRSRSSPPPRPLPPPRAGASQRLPSPPAHAAHRPRLPTPDHRRLLLPAPPLPRLRPRPLPLRPPLLPPRAPPPPPPRTPRRLPRLRPRLPPPRAVPPAAGGRVLQWRDIQRRAPLPRRRGGGGPRRRRRGAAVRGRLRRRQPRPPVRLGRHVP

SEQ ID NO: 180134 - protein, 138 aa, Oryza sativa
  Clone ID: PAT_MRT4530_77528C.1.pep
IDVSREYFDLGLPVIKKAGVAHKVDFREGAAMPILDNLLANEENEGKFDFAFVDADKGNYGEYHERLLRLVRAGGVLAYDNTLWGGSVALEDDSVLEEFDQDIRRSIVAFNAKIAGDPRVEAVQLPVSDGITLCRRLV

SEQ ID NO: 180135 - protein, 60 aa, Oryza sativa
  unsure (1)..(60): unsure at all Xaa locations
  Clone ID: PAT_MRT4530_77529C.1.pep
TMLLYVLGGLGQERTAFVVVLCISASLVEIPREKLMAKPMRTXNAAMELAWVLLGSTGGP

SEQ ID NO: 180136 - protein, 123 aa, Oryza sativa
  Clone ID: PAT_MRT4530_7752C.1.pep
PMPLSRPRAPRLPALHPPTPVSDALSADEKIYFNGCRSFLLWQKAARDTMAKGGRPELANVATCNPCKKRGGGGWKGRPEQVPPQLQLQGVRATDASVIRIELISSCRNRCPRVHHYSWSGCA

SEQ ID NO: 180137 - protein, 332 aa, Oryza sativa
  unsure (1)..(332): unsure at all Xaa locations
  Clone ID: PAT_MRT4530_77530C.1.pep
PSRSSQPGAAPSWGRPPARRPRLLQRAEAVAAPPPLLRLSAVAAEAAARPAQVPSFAPALTLPPPPLQIPHPTATRRQPARRPPLPPLPPAQPAAVVSSSSSAVAAVGGVELPSARRCDSAAGGAKRRAPASSSSSSGAQRREAGGAGRSGRANGGAKPTGRSGAAAGGRAGGVSLRSSSPAPPRPWPERGPALRCPPPPPPPPHPTTRXVQSRSLPAPPPPPRQPPLPPRNGRAGGVGGGGAAHRRGRGLHLLDDAPPPPVPPHPPSSPRQGVRYLRRHRLRSPLSPGSRVLPPSVRGLVSPCAFACSRAPTPPFFFCDRENSRTLMADLL

SEQ ID NO: 180138 - protein, 113 aa, Oryza sativa
  Clone ID: PAT_MRT4530_77531C.1.pep
MEAADETTEEEGRMKSLPLHGRISSVGSSLAANPTLRECPVLWLVVTMEHAPSSSSSRPADPTLNPKYIDRFIFLIQYIDGIKLKRQRPAAAGHAVIMACKETDMPMEELDDI

SEQ ID NO: 180139 - protein, 57 aa, Oryza sativa
  Clone ID: PAT_MRT4530_77532C.1.pep
YYTVTATLDSRVGTSNAEGNPSPRLGLALLFLPRGVSDRKWLSWCILSMGCVTYVMS

SEQ ID NO: 180140 - protein, 115 aa, Oryza sativa
  Clone ID: PAT_MRT4530_77533C.1.pep
MAQPPTGRLSASSAPSSIREAWSRSREHEEVRTRHLDRPVRGGCQPARRRGVRRVGRGSARAAGGLAAARRVEGRARQRAGSWRPRGGGRRGGGRRRGGRRGKRRAGGRRGSGRS

SEQ ID NO: 180141 - protein, 93 aa, Oryza sativa
  unsure (1)..(93): unsure at all Xaa locations
  Clone ID: PAT_MRT4530_77534C.1.pep
FLAPGLGVKAFFPPGTKTPKAMPIFFSMDPGVNKNFFXKMGDPPLDLGKVKEPXFVARGALFLALAGVKFVKGATLFFWGGFSLPKGSPPRFN

SEQ ID NO: 180142 - protein, 182 aa, Oryza sativa
  unsure (1)..(182): unsure at all Xaa locations
  Clone ID: PAT_MRT4530_77535C.1.pep
GFAQSGDGVGAIELFMRMKEAGFLSNQGTLTSVLRACTGLVTLEVGRQVHAHVLKYDKDLILHNALLDMYCKCGSLQDADALFGRMPQRDXVISWSTMIXSGLAQNGRSIEXLKVFDMMKSEGPRPNHITMXXVLFACSHAGLVERGLVLLXVQWRKLFRIQPEREHCNCMRSTLVGQGSLM

SEQ ID NO: 180143 - protein, 81 aa, Oryza sativa
  Clone ID: PAT_MRT4530_77536C.1.pep
MARMTYDHYILVDFYPKGYCAGAVVQQCRYACELCQVDLGLHSAILLSHFLVNWQSILTVAGFPSQVRAPFIQKHNVPGER

SEQ ID NO: 180144 - protein, 42 aa, Oryza sativa
  unsure (1)..(42): unsure at all Xaa locations
  Clone ID: PAT_MRT4530_77537C.1.pep
AKGEGAPECEKFAXKYYRSLCPSEWIERWNEQRENGTFPGPL

SEQ ID NO: 180145 - protein, 648 aa, Oryza sativa
  unsure (1)..(648): unsure at all Xaa locations
  Clone ID: PAT_MRT4530_77538C.1.pep
MVAPPSQATSEAELQSSIVCSLLRREDEEERRGWGCSRLPARRPASTLWQQLPYYAMLLLDPPLLAGAARFLLHSDPHTAHPLLVAFSRLWGPRPAPRRARAAXDLAAAGLTADPVAVSRLIKLCVRHGTPSDGRLIHRHVFGGGDVAAPSCSSLFVSNSLVSLYAKFGLLDDALRLFDGMPHKNVVSWTTVVAALANARGRKEDALRLFVAMLRDGVAPNMYTFSSILGACSTPRVLAAMHGSIVKVGLDSDVFVRSSLIDAYMKFGDLDGGRRVFDEMVTRDLIVWNSIIAGFAQSGDGVGAIELFMRMKEAGFLSNQGTLTSVLRACTGLVTLEVGRQVHAHVLKYDKDLILHNALLDMYCKCGSLQDADALFGRMPQRDVISWSTMISGLAQNGRSIEALKVFDMMKSEGPRPNHITMVGVLFACSHAGLVEDGWYYFSSMEKLFGIQPEREHCNCMVDLLGRAGKLDDAVKFIHEMNFQPDSVIWRTLLGACRMHKNADLAAYAAKEILRLEPDDQGARILLSNTYADLRQWADAEKSWKMMRDRGVKKDPGRSWIELGKQDLATEQKEDLLKYHSEKLAIAFGTMNAMERKHIMIMKNLRICGDCHAFAKLVSKSEGKVIIIRDPVRFHHFQDGVCSCNDYW

SEQ ID NO: 180146 - protein, 110 aa, Oryza sativa
  Clone ID: PAT_MRT4530_77539C.1.pep
GPLLFKSLWPRFSPCLTVEKPCGFPNLGGGGAHPSFFPWWCLSVEGPADFPFQHFCASVWGGGARPVLAPFPRPVCCFRPPCVASLLGALLPALFPFFPFSLSPFFGSSP

SEQ ID NO: 180147 - protein, 194 aa, Oryza sativa
  Clone ID: PAT_MRT4530_7753C.1.pep
MAAGSSAADSPSSGRPFSLPTLYKRFPCLPPPFPPLATLSPRRIRARAVALSLRRRRRAPVRRRRRPGPPPASASPPSASPHSRRPRPPLRFARRPPERRRPRRPEPRRRLPPLRSSFPPPSSSRGEPWTAPFASPFPPLPRVPLRRAVGRRRRPSGRGRAASRRPCRRGHLRVRPAAARWARPVSRPRPRVRL

SEQ ID NO: 180148 - protein, 105 aa, Oryza sativa
  Clone ID: PAT_MRT4530_77540C.1.pep
MEGVGARQRRNPLIPRPNGSKRHLQHQHQPNAAEKKTAATSNYFSIEAFLVLVFLTMSLLILPLVLPPLPPPPSLLLLLPVCLLILLVVLAFMPTDVRSMASSYL

SEQ ID NO: 180149 - protein, 175 aa, Oryza sativa
  Clone ID: PAT_MRT4530_77541C.1.pep
MAGTARDELTAVARDGDGVRGRRPAAPDLARGVAAATANPHPAAVSLTLSAKESWEKQERKGRDSKEEDEAAAAGFIARDGEEAAARASARKPRPRPSSRRAPTSRTVVHVAAVKDEMAQQKLRYRAIDAILHWMMPFIANTCLHQLGILTPIICNFLDSLIRFRVAVNNNLKWS

SEQ ID NO: 180150 - protein, 84 aa, Oryza sativa
  Clone ID: PAT_MRT4530_77542C.1.pep
MNSRMDFTDRAQKAVEDAMALAEQYAHSQLVPVHLAVSLLDPPPDPSKDQQNAPPVVSTLFRQVIERAHGDPQLFDRALKKTLV

SEQ ID NO: 180151 - protein, 681 aa, Oryza sativa
  Clone ID: PAT_MRT4530_77543C.1.pep
MGIRQRRRLLAVAAAFLSLLALRNAAAAASPAPVRVGVVVDMTSGEGRRSLAGISMAVEDFHRRRHRPGSAAVVELRVRDSRGDDGAAAARAAEDLIKNAQVQAIIVTTEADTAVVARLRRHHRVPILTFPISGGAPPPSSHHPPHHATATAPPFGADHTSARAALTGILTAIFSSARRAAGSPPHGRRYNAGAPTGRRLDRRRLAGRRSSSGEVLRIAVPRKTGFQAFVDVRIDPDTKRQNITGYCIDVFNAAMARVRPRRKYEFHVFDGSYDDLVRNVSSGKFSAAVGDVTITADRENLVEFTMPYTSSGVSLLVPEENDSKPIQWIFVKPLTRDLWLATIGFFFYTGFVVWMIEQPRNPEYQGSSVRQLSTASYFAFSTLTFSHELHGKLRLRPSVKSLDQLLLTAGLLLLLIVVYCSYTASLSSMLTTSRLRPSVVDLDQLRHNNDYVGYQNKSFVYSLLNQTFKEDRLKPYANGKEYAEALRRGKVSAIVDEIPYIRSFMSDQNNSNEFWVFPQTYNILGFAFGFPIGSPLVHNLSVAILDMTRITNKTDSQLTDDHGSHSTPLTLENFSGLFVIVGSVSTLMLLISIVRLVVSRCSETANTNAPSIDDDNGDEESNPQQNDTEEPLLEARDNDSRSADQNGSFAADQEPSQMQSGTSNGHVPAQAQHIQIEMSPA

SEQ ID NO: 180152 - protein, 187 aa, Oryza sativa
  Clone ID: PAT_MRT4530_77544C.1.pep
GAMAGTARDELTAVARDGDGVRGRRPAAPDLARGVAAATANPHPAAVSLTLSATSFGSDNLIERNQLLSEESWEKQERKGRDSKEEDEAAAAGFIARDGEEAAARASARKPRPRPSSRRAPTSRTVVHVAAVKDEMAQQKLRHRAIVHAILHYWMRPFITTLKPIVSNFLDSLIRCRVAVNDNMKWP

SEQ ID NO: 180153 - protein, 32 aa, Oryza sativa
  Clone ID: PAT_MRT4530_77545C.1.pep
TVSPIQQQTVQPIQQQMVQLIPTGLRTPQQRP

SEQ ID NO: 180154 - protein, 702 aa, Oryza sativa
  Clone ID: PAT_MRT4530_77546C.1.pep
MGIRQRRRLLAVAAAFLSLLALRNAAAAASPAPVRVGVVVDMTSGEGRRSLAGISMAVEDFHRRRHRPGSAAVVELRVRDSRGDDGAAAARAAEDLIKNAQVQAIIVTTEADTAVVARLRRHHRVPILTFPISGGAPPPSSHHPPHHATATAPPFGADHTSARAALTGILTAIFSSARRAAGSPPHGRRYNAGAPTGRRLDRRRLAGRRSSSGEVLRIAVPRKTGFQAFVDVRIDPDTKRQNITGYCIDVFNAAMARVRPRRKYEFHVFDGSYDDLVRNVSSGKFSAAVGDVTITADRENLVEFTMPYTSSGVSLLVPEENDSKPIQWIFVKPLTRDLWLATIGFFFYTGFVVWMIEQPRNPEYQGSSVRQLSTASYFAFSTLTFSHGQIIKSPLSKIVVVIWCFVVLILVQSYTASLSSMLTAKRLRPSVKSLDQLLLTGDYVGYQNGSFVGSLLKKRGFMPSRLRSYGTQKEYAEALRKGSMNGGVSAIVDEIPYLTSFLSNPQYQKEFQMVNRFYKTPGFGFVFPLGSPLVHDLSTAILNLTGETEGSKIEEKWFGSSEQSTGGDANPSSSSSSSDSNPLTLQSFSGLFIISGCISALMLLISVVNRVICAKCAKEARVHDVEHGGSTSSSSTEQSRPLQIVVDSNPEPDQAVQEVANDGCQDAQLMQASVGNERHHPVQNCINGPVPEHHPQMEMNTG

SEQ ID NO: 180155 - protein, 144 aa, Oryza sativa
  Clone ID: PAT_MRT4530_77547C.1.pep
SSPPSSPRPCLPSSTTPSACARSAAVSLNRLPSVSTSTDKAPISILNDLVISRVFAEAAPPMPLLGCLPMRTHPLPLFLCSFAATDDVDVPSLVGNIVGAGEENCRRIAEILSRGCNSRGRQSQALPACPRHPLPQLHREEGNE

SEQ ID NO: 180156 - protein, 74 aa, Oryza sativa
  Clone ID: PAT_MRT4530_77548C.1.pep
FVTLLSLNHDHPDQSMEKKNNQAATTNRSTATTTNKSNIDHSQHTLCRSLLCMYVSIVRARIISRCLQPGDPLV

SEQ ID NO: 180157 - protein, 162 aa, Oryza sativa
  unsure (1)..(162): unsure at all Xaa locations
  Clone ID: PAT_MRT4530_77549C.1.pep
QSSEIVSDAHSGGRHEAALLVGRRPHPRRRSRVHAQTTSSPPSSPRPRLPSSTTPLACARSAAVSLNRLPSVSASTDKAPISILNDLVISCVFAEXHPLPLFLCSFAATDDVDVPSPVGNIVGAGQENCRRIAEILSRGCNSRGRQSQALPACPRHPLPQLH

SEQ ID NO: 180158 - protein, 45 aa, Oryza sativa
  Clone ID: PAT_MRT4530_7754C.1.pep
ENDTASGNIKMNHPTCGYCSKSIPENKGFTVPFHSYLYDLLITEI

SEQ ID NO: 180159 - protein, 228 aa, Oryza sativa
  unsure (1)..(228): unsure at all Xaa locations
  Clone ID: PAT_MRT4530_77550C.1.pep
CSRHVGPCTVSSSTCHQRLTPTDAAASIPKSDQSSETVSDACSGGRREAAPLAGLRPHPRRCSRVHTQTISSPPSSPRPCLPSSTTPSACARSAAVSLNRLPSVSTSTDKAPISILNDLVISRVFAEAGFRSGDIKLAILXPAPPMPLLGCLPMRTHPLPLFLCSFAATDDVDVPSLVGNIVGAGEENCRRIAEILSRGCNSRGRQSQALPACPRHPLPQLHREEGNE

SEQ ID NO: 180160 - protein, 179 aa, Oryza sativa
  Clone ID: PAT_MRT4530_77551C.1.pep
MELRWEIWRRRIERGKRGNGGVEWSEGVFEKKGIEEIGEIRKTSAAVSLNRLPSVSASTDKAPISILNDLVISCVFAEAGFHSGDIKLAILCPASPMPLLGCLPMRTHPLPLFLCSFAATDDVDVPSPVGNIVGAGQENCRRIAEILSRGCNSRGRQSQALPACPRHPLPQLHREEGNE

SEQ ID NO: 180161 - protein, 109 aa, Oryza sativa
  Clone ID: PAT_MRT4530_77552C.1.pep
MFEGNFFLSLAIHINFGNPATEPIRYPDDRIWEFDMAHRSNFLVDVVPGTVFVASGELPPQKVMQIAVGRAAEHFEISGVQKGSGFPFGTRIPAFSLSAERSLRGYASW

SEQ ID NO: 180162 - protein, 172 aa, Oryza sativa
  unsure (1)..(172): unsure at all Xaa locations
  Clone ID: PAT_MRT4530_77553C.1.pep
LIFRDYRRSGFGDDWILQVIYRYCCDLGPVRPGSGCRSDRRVSRGQTGQLASGWPTLCRFWFRVVCLDIRDCFMLASRWILCREVIKLSSTSRVLQFVFSRVQRSNQRDTNGQIGGIAAVRPVGTRQSDRRQVQATAASSGGXTGRSPRARRRAPKRSDRRNTFGQTAIRQI

SEQ ID NO: 180163 - protein, 82 aa, Oryza sativa
  unsure (1)..(82): unsure at all Xaa locations
  Clone ID: PAT_MRT4530_77554C.1.pep
NHLQKQRQHIVDFRNNVNFLQCLGTIKNCYYVWRTLLSLYLSAQKSYSSCSGHRLLDKLVVGHEMVKSLVELPXNQGTPLDS

SEQ ID NO: 180164 - protein, 224 aa, Oryza sativa
  Clone ID: PAT_MRT4530_77555C.1.pep
MASPAVVRQRPTVGKQAGEGESAAAAGDGGGGRPPAARRPSLLSQALASTASLANLLPTGTVMAFQLLAPTFTNNGACDATTSLLTAALLALLALSCVLASFTDSVRGPDGRVYYGLATPRGLWLLDYPPAGAGAPPQPDTSRYRMRAIDGVHALLSVGVFGVVAARDKNVVGCFWPSPAKGTEEVLGIVPLGVGVMCSLLFVVFPTTRHGIGYPVTNNTTSSS

SEQ ID NO: 180165 - protein, 93 aa, Oryza sativa
  Clone ID: PAT_MRT4530_77556C.1.pep
MGDSIVGQKASSSTAQYTAQRFGPAQPLPLHDNVVPSRAQHGSTVPRSRRPHGLNGVGAPRGWARRDMVSRVPARPSRATHFGHVSVAPLLVL

SEQ ID NO: 180166 - protein, 834 aa, Oryza sativa
  Clone ID: PAT_MRT4530_77557C.1.pep
MGEGIGATAGLAACRSAAAITAVRYRLADKDLLVLVTSDKELVHMHDEYDRLRPAILAHPCGRPKSRPVHTDGLESQAHVSEAQQAGTRQRGSFSLSPSHRKRKQRRPLLSSPDDASPLAADPLVSRHPTMATGGGGGGDIGADSERRLKKAMDKLYHFPKPKAGTGPGSSKPSSASTSSALSIGRAGKAAGAGGRRFGMVRGSRLPSQLAAMSAISPPPPCRPWDRADLMRRLATFKAMTWFAKPKVISPVNCARRGWINIEPDVITCEACEARLLFSTPSSWAPQQVEKAAAVFSLKLDNGHKLLCPWIDNICDESLALFPPTPPPVLVENYHEGFSSLLRLSALPRISCSSLESMKKRSPQLEQFLLKPFSSSVVLKGGFILTEDSTIKDLDHTFQDADTYYQALKIISLCGWEPRLLPYAVDCGTKSHSDANSSSTLTQPGLINNSMEDRVVVYAPNEVDGSTVIADARQAYQHYDPLSVVLDCQFCGACVALWPFSLVERPLQLFKLISDSSRQDEQTEGHAGRVSGAGPSKTANIGFNFTIAGGPPPTRQNFRPRVSLPVVSRHLKADLSSHGHFISSGSDNHMVPVTLHASGLTKRKRSMDESHMLEGNNTISTDAGTTTNGADHQRENSVNGTSNLVANPEHQQGGSHSDTSRVTSTGEVSNEESETGHAAIKSHTSTDELGQHGSDPKSLPVEDSSNAHDLAKTCTNNSRPVQAATLTKSSNDGEKGASQPSGSQGLYDKLNEFDPMKQHRTFCPWICPDGGETLPGWRLTLPALLSQDKRIDEDSQVEPQISLLSEEDDPVTSVRKLFMTPPSKKLRIHRAEKG

SEQ ID NO: 180167 - protein, 541 aa, Oryza sativa
  Clone ID: PAT_MRT4530_77558C.1.pep
MAVVFSNPMVHARRFLQTGLDIFSFGNCEDYGIVLPRETAALMDGHTNGTNGSCSKPCEPLTDYCIPDYILNPDSEQVLVDQAPCCPVVVFINSRSGGQLGSSLIKTYRELLNKAQVFDLSEEAPEKVLHRLYCNFEKLKSNGDPIAFQIQSNLRLIVAGGDGTASWLLGVVSDLKLSHPPPIATVPLGTGNNLPFSFGWGKKNPTTDQEAVKSFLGQVKKAREMNIDSWHIIMRMRAPQEGPCEPIAPLELPHSLHAFHRVSGSDSLNMEGYHTYRGGFWNYFSMGMDAQVSYEFHSERKRNPEKFKNQLTNQSTYAKLGLKQGWFAASLTHPSSRNIAQLAKVRIMKRPGGQWEELKIPRSIRSIVCLNLPSFSGGLNPWGTPGTRKVQDRDLTAPFVDDGLIEVVGFRDAWHGLVLLAPNGHGTRLAQAHRIRFEFHKGAAEHTFMRIDGEPWKQPLPKDDDTVVVEISHLRQVTMLASDPCKSKSVNDPSSPMCCSNHDDDERNSLEDEDEWEEGRKKFGAADTFKFPDEVDVAHLS

SEQ ID NO: 180168 - protein, 92 aa, Oryza sativa
  Clone ID: PAT_MRT4530_77559C.1.pep
LGDQGWRRDARRAVEALLLRWRVAAEPGGQLVEALCSVPQIHQLPAGFLLGDSNCPNLHLAVVAPLGHPRLNPNEEVVPEVEVEHPKLANLH

SEQ ID NO: 180169 - protein, 282 aa, Oryza sativa
  unsure (1)..(282): unsure at all Xaa locations
  Clone ID: PAT_MRT4530_7755C.1.pep
TKLKRRARPPLSLTGGAHLSSPSSRRARRRVRALAPPPPRIPPLPSAPRAIXEGEIIPRVSLSRFPLFSLSLSLGFVRIVPAFIAGAINGGRDLRGRFPSSPAALSPSRCYIFVARAPLFRFRRSPLALAVGIVLAPCSSLSAVAVDLRFAAAVAPVFLPARRHLPRHRRIAVDPVRRSVSLADRRSTVALVFPNRAAVFLRSGRRFRRLRRLGVSRGPSFXFPLPSSLSGATPPRRWSPAATIGARVRXSPVGRAGEAALGRALAAAKWARPSAARARGCG

SEQ ID NO: 180170 - protein, 987 aa, Oryza sativa
  Clone ID: PAT_MRT4530_77560C.1.pep
MASPRSAGGVGGGGGGGGGSGGAAAGDDAIWSKLREAGFDEESLKRRDKAALIAYISRLESEIYQYQHNLGLVLMERKELTSKHEQLRAASESAEIMHKRERAAQQSALAEARKKEENLKKSLGIQKECVANLEKALHDMRGETAETKVSYESKLAEALQLMEAAHKKFDEAEEKLLLAKSLEAESIRTHNAALRSLHDIDDREDQLRRDRISCELENEAKEKEISLQRKSLNDMKKILHEKEEVLLKEQALLNQRDENILERLAYVTHSEKRVEEEKNILEAERKVLLEEKYKLELKMEAIVSREEALIQKESLLDKRESELLILQETIASKERAEIERLNQEQAIALERRKHDFESEMANKQMSFDAAMEVTRNALHQRECALSEQESVVVQRSQNLDLQLAELASKEKALAGRSDELKEEEEKLLLHREAIHNELQKEREEIQRIKSDLEKEKAFFEEEKREAIQAQQDLAITQADRDELLTLQMKLKEEIDSLRAQKRELMADADRLQAEKERFEIEWELIDEKKEELQKEAIRIAEERRAITEYLKNESDIIKQEKDNLRVQFKSNSETLSREHKEFMSKMQQEHASWLSKIQQERQDLKRDIDIQRVELLNSAKARQMEIDSYLREREEEFEQKKAKELEHINSQKEMINTKLEHVAVELQKLKDERKEATLERERREQELSEIKGTIEALNNQREKLQEQRKLLHSDREAITVQIQQLNVLEELKIDSENKQLSLLQHDKSKLGSDINVKDNHHDNSHSSPKQRFGRKLDLSPVSTPISWVRKCAQVIFKRSPEKSASHDQFAQNGVPKKVGDSVDVEDVNLDFAKVGQKRLNHLVSCDQTEVLEPKRKHRRSTIQKVNGGEITSNCLSALEEKCSKNEHDEAPLGLSNTCKEHEYGDKGPENLTKPGEPASSVDVPYVNGIVDNSDSVQEEPSVEATVSATETSNVDGPEDNNDSDEEDEEEEEEKTSSAKKLWRFLIT

SEQ ID NO: 180171 - protein, 77 aa, Oryza sativa
  Clone ID: PAT_MRT4530_77561C.1.pep
MEAVPQVHGRPRLGELPQLSACKGLLHLDAREICRLARLIRAIRGADGADLLGEAKLPENYSDFLDFGYGAIDGFGR

SEQ ID NO: 180172 - protein, 104 aa, Oryza sativa
  Clone ID: PAT_MRT4530_77562C.1.pep
MSKGKKDNGGWGGGDNKEVHGGARPRCAPLHESRGSPVRHGAIHGGDVRDAKTASDATTADVARLFALYPPALTYGIHTNLLLRLPFSRVAAADLILSRLAPTS

SEQ ID NO: 180173 - protein, 205 aa, Oryza sativa
  unsure (1)..(205): unsure at all Xaa locations
  Clone ID: PAT_MRT4530_77563C.1.pep
PAKGNWEXYLNGDVSFCRDIAISQHKDSIKYLEMEIVSPRTVTTTIPTSTSADPTSYLEWVRRSREPQPTRRRSVFHPGSWRITTWSMPIPVTSWDDWRRDCTAESREVHLDTNPSHHYELLHSLMLSNSGDEHREEAXRGAKTGGMMVAVDVRNKELRGVAKLDPEKNTLYSMRCYLATGISKRLNTTTDTRVGRPEEDAEAAE

SEQ ID NO: 180174 - protein, 488 aa, Oryza sativa
  Clone ID: PAT_MRT4530_77564C.1.pep
MAATGGAAGEKTASSLLLGVRGYTSTLKNASTASCRLSAGHPIEVTLWEASPPALSHFSVHCPDLPSFNGNLLGAPKAIAAAVDDADGQLLLLLRVPIDQLGAPHDNDYLVYHPDPPSPKLDLLPNPPPPTLGDHQLAILSCGDDRYVVAALHVWSEFTSTLRLYRSSCSSGSWTSEEVSVEEPVRDRLCPIPDSAKRQLYHVTTKTITLGGAKGTVGWVDLWRGILLCDVLDEMSPRKLRDMPLPWPAKGNWRMYLNGDVSFCRDIAISQHKDSIKYLEMEIVSPRTVTTTIPTSTSADPTSYLEWVRRSREPQPTRRRSVFHPGSWRITTWSMPIPVTSWDDWRRDCTAESREVHLDTNPSHHYELLHSLMLSNSGDEHREEAQGQGATSSLSLGRLRLCYPALSCIDDDVVYLLGNAAGRGAKTGGMMVAVDVRNKELRGVAKLDPEKNTLYSMRCYLATGISKRLNTTTDTRVGRPEEDAEAAE

SEQ ID NO: 180175 - protein, 393 aa, Oryza sativa
  Clone ID: PAT_MRT4530_77565C.1.pep
MELPRGALLLVLLAVAAAASSAGATLAVKAPVPVPVPAPAPAHAPPQPKDAEGLLINGNFETAPRKVNKTLIVGRHSLPGWTLRGHVEYVSGGPQPGGMFFAVPHGVHALRLGGRASASQNVSVRPGALYALTFAATRTCAQDEALRVAVAPSLSPPADVAVRTLYSADTADTWAWGFRASSAAAQVTFSNPGVQEDASCGPLLDAVAIKELPTPYPTKDNLIKNEGFEIGPQVFKNSTVGVLLPPKQKDATSPLPGWIIESLKAVRFIDAAHFSVPAGQYAVELVAGRESAIAQVIRTVANRAYNLSFVVGDAKNGCHGSMLVEAFAGNVTQKVPFESVGNGGFKPASFRFVAAGVRTRVTFYSSYYHTKVSDGVSLCGPVLDQVKVQPLKA

SEQ ID NO: 180176 - protein, 52 aa, Oryza sativa
  unsure (1)..(52): unsure at all Xaa locations
  Clone ID: PAT_MRT4530_77566C.1.pep
SLPLRTARFILFFFFLYCFFFFFFFFFFFFXKKGSLLMPEIKPSTFSYYYPX

SEQ ID NO: 180177 - protein, 157 aa, Oryza sativa
  unsure (1)..(157): unsure at all Xaa locations
  Clone ID: PAT_MRT4530_77567C.1.pep
XXSADXXXXIXXSRXYPPLXXXLRLXVRRTGPVDAAAPPARLAPPSSSLRXCSYHXQSXLLLPPRRPPSTQAGWDTVCHLLPGAATPFRFPLHPLPPCAATAAGVHGDAVDEGGETLGTAFSCLLALVNLVYGYSVPDLWPSCLLFLFYPPYNRFMF

SEQ ID NO: 180178 - protein, 111 aa, Oryza sativa
  Clone ID: PAT_MRT4530_77568C.1.pep
SAIFAHGKQEDGVASEVKAGRGEAGGRCGQRGRGTTVATYCYRLSTAYPPLPPFRRRVGELELAGRSASLPPYPSPPVPLPPISYPPPFSLPTVAGHAHRLLTSGVHWKEM

SEQ ID NO: 180179 - protein, 41 aa, Oryza sativa
  Clone ID: PAT_MRT4530_77569C.1.pep
MSAARGRAAYCQTVGSSSVLIGSDADVMLSLQGGVLGLKAT

SEQ ID NO: 180180 - protein, 142 aa, Oryza sativa
  unsure (1)..(142): unsure at all Xaa locations
  Clone ID: PAT_MRT4530_7756C.1.pep
FARRPPELRRPRDPEPRRRLPALRSPLPSPPSTRGEPKAVXFASLFSPLSRAPLRRAGSPAXPSGRGCAASRRPCRRGRLRARPAAARWGPAVSRPRPRVRLTRGTHGADRRQPRAPGPPWTERLTRGPRSRGPGPRALSLG

SEQ ID NO: 180181 - protein, 74 aa, Oryza sativa
  Clone ID: PAT_MRT4530_77570C.1.pep
SNHSNFARGKKNNNWLSIWGVKFTAVANTKPFTVCRSRKGFYDLQTFLKFFEFETGNRGCRLKESNYLLFQHRP

SEQ ID NO: 180182 - protein, 80 aa, Oryza sativa
  Clone ID: PAT_MRT4530_77571C.1.pep
EVEQEINHRLKKTKPKQEWRVKKQASVTDEAVADEAKRLAKEKSIVIASEVRQKRRRSHQNKHGNPSETKGVLDVELTVG

SEQ ID NO: 180183 - protein, 124 aa, Oryza sativa
  unsure (1)..(124): unsure at all Xaa locations
  Clone ID: PAT_MRT4530_77572C.1.pep
MEDTAAAVETPVTVSTFGVSRHPDTARLVLSSPKPPGVREEFVGVVRKAFRPRASGGGGAGRTPRRGXGWALTALQTVFPVLQWXRTYNFKLFRXDVMAGLTLASLGIPQSIGFANLAKLDPQY

SEQ ID NO: 180184 - protein, 1339 aa, Oryza sativa
  Clone ID: PAT_MRT4530_77573C.1.pep
MLFRPGTAVWVEHPDHAWAEAVVTSPASSSPSSVTVTLAGGAKAVVDGKKVLPRDTEADLGGVDDMTKLVYLHEPGVLCNLARRYGFNEIYNSTGKPSIPGVLLCSIAKIASVISFSEKGATYTGRILIAVNPFAKLPHLYDMHMMEQYRGVQFGELSPHVFAVTDASYRAMVSEDRSQSILVSGESGAGKTETTKLIMRYLTFVGGRSTGDIRSVEQQVLESNPLLEAFGNARTVRNDNSSRFGKFVEIQFDKSGRISGAAVRTYLLERSRVVQISESERNYHCFYQLCASGQDADKYKLAHPRNFNYLNQSHTYELEGVNEAEEYLKTRRAMDIVGISFSHQEAIFRTVAAILHLGNIEFSPGKEFDSSAIKDEKSKFHLQMAADLLMVDGSLLLSTLCYRTIKTPEGNIVKAVDSSAAAISRDALAKTVYAQLFDWLVDNINMSIGQDMESRALIGVLDIYGFECFKYNSFEQLCINFANEKLQQHFNKHVFKMEQEEYKTEEINWSYIEFVDNQDILDLIEKKPIGIVSLLDEAWLFALQQDDPSKSSYKFSSIASRFKQQLQALMETLSSTEPHYIRCVKPNSLNYPQKFENGSVLQQLRSGGVLEAIRISLAGYPTRRTYTEFIDRFGLLLPEHMDERFDEKSLTEKILRQLHLENFQLGRTKVFLRAGQIAVLDSKRTEILEKAARIVQGRFRTFVACKEFHSTKKASVSLQAYCRGCLARNLLDAKRQIAAAVSVEKYARRWFCRCEYLHLRSSALVIQSGVRYMLAIQKLLQLKNNKAATIIQVQSMHQNIYSHVAYTVKTMFYIGALSPYCLVENFSRTELIFKAAYETGALREAKGKLERSLEDLTLRFTLERRQRVAAEESKALEVSKLLKIVESLKCELEAANEEKINGCKEVASMQQQLGLSIKDQELLHSNLAQIEELKRENTLLKGKNAEMEQELLKAQKCSHDNMDKLHGVERNYLHLRDNLKNLEDKISNLEDENHLLRQKALSLSPRHSRTMSHPIGSSPCSPKSLIESSPVKIVPLPHNPTELRRSRMNSERHEEYHELLQRCIKDDMGFKKGKPVAACVIYKCLLHWGVFEAERTTIFDFIIQNINTVLKALRPPLKAFGQRNSMSHIDAKYPAMLFKQQLTASLEKIFGLIRDNLKKEISPLLSLCIQVPSFFIRKLVTQVFSFINVQLFNSLLLRRECCTFSNGEYVKTGLCVLEKWILDATEEHAGAAWDELKYIREAVEFLIIAQKSSGTREPVMSSMCPVVAKMRDMVSSDAQNPVSNSFLLDDDLSIPFTTEEIAEEVPDIDMSNIEMPSSLRHVHSAQFLMQHLQTTYPLK

SEQ ID NO: 180185 - protein, 190 aa, Oryza sativa
  unsure (1)..(190): unsure at all Xaa locations
  Clone ID: PAT_MRT4530_77574C.1.pep
PNKPSAARRLKEKGPAGINPSKRTGSSSPAQRKVSLVPNPVTGQNRPSNFAGKAKXRGPPCRPLCPKISPRVMRETSPLSDRRRRHPSIYICSGSITHHLSTGDXPHRKPFRLRVHLNDNDDASSPGGGSAGGGGIPTVSLLGVGWKLCSCAGSSCPSHVTASRASPNNCGSFFLFFXFFTFTVSPRTRV

SEQ ID NO: 180186 - protein, 325 aa, Oryza sativa
  Clone ID: PAT_MRT4530_77575C.1.pep
MAQVTATANGRVLGFPAASRHGGPVGSRAGPAFLNLRAPALRHDSKKHPLRVGAASSLFTKYDPIKGIKPLLSIDKLRPRTQVGCRASLSSFSFPELETKPRWWWRTLACVPYLLPLHNMWSFADAVYQLHPYLQQFGLFYAFIDTMALVPGWLFLMIFMTVYFFVVRRKWLPHFLRYHVILAILLDTGSQALATMCNWNPSIVYQGKPMVFFWMTIAFIQISTVLECMRTEWNNPERREHPTLSEIRCRRSAQGEKVGSRRIARGRKRECVRTEPPRCCGGGLVRWRGHPPGGLPSRFRDDVAFAVDGLESKVITPVGPVVEQI

SEQ ID NO: 180187 - protein, 78 aa, Oryza sativa
  Clone ID: PAT_MRT4530_77576C.1.pep
MAVAGMVGVLMTNTHAATAYAPIHAVDIHQIPNLRKKKPRIQAPTCIAGIGIKVVSALHINSQAGIQNILPPALTEKA

SEQ ID NO: 180188 - protein, 800 aa, Oryza sativa
  Clone ID: PAT_MRT4530_77577C.1.pep
MQMQVLTAASSLPRATLLRPAAAEPWRQSFLQLQARPIQRPGIMLHCKAQLQGQETRERRQLDDDEHARPPQGGDDDVAASTSELPYMIESIKSKLRAARNSLGETTVSAYDTAWIALVNRLDGGGERSPQFPEAIDWIARNQLPDGSWGDAGMFIVQDRLINTLGCVVALATWGVHEEQRARGLAYIQDNLWRLGEDDEEWMMVGFEITFPVLLEKAKNLGLDINYDDPALQDIYAKRQLKLAKIPREALHARPTTLLHSLEGMENLGTRRLLQFKCPAGSLHSSPAASAYALSETGDKELLEYLETAINNFDGGAPCTYPVDNFDRLWSVDRLRRLGISRYFTSEIEEYLEYAYRHLSPDGMSYGGLCPVKDIDDTAMAFRLLRLHGYNVSSSVFNHFEKDGEYFCFAGQSSQSLTAMYNSYRASQIVFPGDDDGLEQLRAYCRAFLEERRATGNLMDKWVIANGLPSEVEYALDFPWKASLPRVETRVYLEQYGASEDAWIGKGLYRMTLVNNDLYLEAAKADFTNFQRLSRLEWLSLKRWYIRNNLQAHGVTEQSVLRAYFLAAANIFEPNRAAERLGWARTAILAEAIASHLRQYSANGAADGMTERLISGLASHDWDWRESKDSAARSLLYALDELIDLHAFGNASDSLREAWKQWLMSWTNESQGSTGGDTALLLVRTIEICSGRHGSAEQSLKNSADYARLEQIASSMCSKLATKILAQNGGSMDNVEGIDQEVDVEMKELIQRVYGSSSNDVSSVTRQTFLDVVKSFCYVAHCSPETIDGHISKVLFEDVN

SEQ ID NO: 180189 - protein, 592 aa, Oryza sativa
  Clone ID: PAT_MRT4530_77578C.1.pep
MDLGKSSSTSASLKKLQEDGALPGRGTMEREAGGTEPQPVLGRMVAIEDYILCGFLPPPSKFLLLVLSFYGLSLLHLNPNSIAFLSIFSHLCEAYIGVEPFLDLFRFYYELHWMESNRVSGCVGFRLRDGLKSRYIPFQCASSRSKWRTRWFYLQIEDSDPVFVVPEEQPDKISYWTAKPPLTPSLQSFIDVVDDLQVRGLSSEAMGRRVGQVMISGPTTAGNVPVPLCEKGVAERDAAINALPLTDIIGPLADHQVAASLKEKVAKEASDAATAAATISGGNVPTKGRKFSSVSGHRRKASTPSEELQVEMGRLLEAGARGIGREIAEARSAAVSTNERADRLAHELAEAREDLKKMGELVAGNERQRQGLEHRMSELGNNLSEIRGSLRVTYTGLHQLAGECGIKSTIPANPDEFSLRSSLAELAAAMEEIPSKHVARIEEETSNGIYTGACHVLACVRLAHPELDLREILDQGAASGTHLESALAGQDRRIQYWKTKFEVAELERTMLAVKKEQAVEMLRGREVWFNSYFKSCCTSMAKVCRELRVPRGDPEESAAGYISWLNGACAQLEGVGKGIDEALKQECHRSSR

SEQ ID NO: 180190 - protein, 83 aa, Oryza sativa
  Clone ID: PAT_MRT4530_77579C.1.pep
LSTIDNLCKYGSIQQTELLNWTMFSRAHNFVLFVPHDKLARLKCNMHMNFMPGSMSCTGMNVQPCQHGQQRRCTVCPMAIQKS

SEQ ID NO: 180191 - protein, 75 aa, Oryza sativa
  unsure (1)..(75): unsure at all Xaa locations
  Clone ID: PAT_MRT4530_7757C.1.pep
PPTXKFTFTGXGXXXYXTVNPEDSXXDLLQXANEXXRXHHXXXSLKAVXCXGRXXGXXWXXXLSXRXXXVGDLVP

SEQ ID NO: 180192 - protein, 669 aa, Oryza sativa
  Clone ID: PAT_MRT4530_77580C.1.pep
MDLGKSSSTNASLKKLQEDGALPSRGTMEREAGGTEPQPVLGRMVAIEDYILCGFLPPPSEFLLLVLNFYGLSLLYLNPNSIAFLSIFSHLCEAYIGVEPFLDLFRFYYELRWMESNRIEDLDPVFIVPKEQPDKILSWTAKPPLTPSLQSFIDIVDDLRVRGLNNETVGRRVGQVMISGPTTASNIPVPLCEKGAAEHDAAINALPLTDIVGPLVDHQVAASLKEKVAKEASDAAAATAATTSGGNVPTKGRKFSSVSGHRRKASTPSASDASPPPPRRQQLVTHGENREATPSGPASDLAAGRGPSAAVLTWEELQVEMGRLLEAGARGIGCKIAEARLAAASATERADRLAHELAEAREDLKKMRELVAGNERQRQGLEHRMSKLGNNLSEIRGSLRVTYTGLHQLAGECGINSTIPANPDEFSLTSSFAELAAAMEEIPSKHAARIGEETSNGIYTGACHVLACVRLAHPELDLREILDQGAASDTRKGVLEEVGDLGESVLPLFEEDVDDENVQQRGQPESPAIILALAFEPHASPDNVDQILATGTGMATTSLDLEIALAGQDRRIQYWKTKFEVVELERTMLAVKKEQAVETLRGREVWFNSYLKSCCTSMAKVCRELRVPRGDPKESAAGYISWLNGACAQFDGVGKRIDEALKQECRRSS

SEQ ID NO: 180193 - protein, 588 aa, Oryza sativa
  unsure (1)..(588): unsure at all Xaa locations
  Clone ID: PAT_MRT4530_77581C.1.pep
MDLGKSSSTSVSLKKLQEDGALPGRGTMEREAGGTEPQPILGRMVVIEDYILCGFLPPPSEFLLLXSGCVGFRLRDGLKSRYIPFQCPSSRSKWQTRXFYLQIEDSDPVFVVPEEQPDKISSWTAKPPLTPSLQSFIDVVDDLRVRGLSGYEVAVDFISRRIQPLQAQAHLAFDYSGPEDATRVSPRGLSNEAVGRRVGQVMISGPATASNVPVPLCEKGAAERDAAINALPLTDIIGPLADHQVVASLKEKVAKEASDAAAAATTSGGNVPAKGRKFSSVSGHRRKASAPSLSHRAARAKAVQDESGGTSGASPAVASTDVVLAPGSREVTPSGPASDPAAGRGPPAVVLTWEELQVEMWCLLEAGARGIGREIAEARSAAASANERADRLAYELAEAREDLKKMRELVAGNERQWQGLEHRMSKLGNNLSEIRGSLRVTYTGLHQLAGDVDDEDVQQRGQPESLAIIPALAFEPHASPDNVDQILPTGIEMATTSLAYLESALAGQDRRIQYWKTKFEVAELERTMLAVKKEQAVETLRGREVWFNSYLKSCCTSMAKVCRELRVPRGDPEESAARYISWLNGAYA

SEQ ID NO: 180194 - protein, 79 aa, Oryza sativa
  Clone ID: PAT_MRT4530_77582C.1.pep
TDQHSILLRYIREAIHRLQTSQAQALQVKPKQSSSMIRPCALLSLLELATTKHAQPMLDMLELDMVAQLAMLELACTVT

SEQ ID NO: 180195 - protein, 604 aa, Oryza sativa
  unsure (1)..(604): unsure at all Xaa locations
  Clone ID: PAT_MRT4530_77583C.1.pep
MDLGKSSSTSASLKKLQEDGALPGRGTMEREAGGTEPQPVLGRMVAIEDYVLCGFLPPPSEFLLLVLNFYGLSLLHLNPDSIAFLSIFLHLCEAYIGGIRMRWIPTSGWPEVALYPLPVSLLSQQMADEALPLTDIIGLLVDHQVEASLKEKVAKEASDAAALXATTSGGNVPTKERKFSSXAARVKAVQDESRGTSGASPAVASTDVVLAPGSREVTPSGPASDPAAGRGPPAAVLTWEELQVEMGRLLKAGARGIGREISEARSAAASANERADRLAHELAEAREDLKKMRELVAGNERQRQRLEHRMSELGNNLSEIRGSLRVTYTGLHQLVGECGIKSTIPANLDDFLLTSSLAELAAAMEEIPSKHAVKIGEETSNGIYTGACHVLACVRLAHPELDLREILDQGAASDTRKEVMEEVNDLGESVLPDLEGALAGQDRRIQYWKTKFEVAELERTMLAVKKEQAVETLRGREVWFNSYLKSCYTSMAKVCRELRVPRGDPEELAAGYISWLNGACAQLEGVGKRIDEALKQECRRSSRYAGGHVLACIRDHRPRLDLDFLREGFARSRRTPAEIDHLAKSMVSLAEKVLQSMDWRWPSW

SEQ ID NO: 180196 - protein, 109 aa, Oryza sativa
  Clone ID: PAT_MRT4530_77584C.1.pep
MRPRRPPPTISYSRAGSGAALGRHLVSGDGPSEDGGGEEGRRSRLRRERGWWWARGGSWSGTPSPTVMDAVGVGSIGLSCAGRRWLLTRRGGEGYERRQWEEPKGKRHG

SEQ ID NO: 180197 - protein, 53 aa, Oryza sativa
  Clone ID: PAT_MRT4530_77585C.1.pep
FFYGRSCIGEFSNYPYYSGAVTPKCKTSLTAVSNLEQSFRNHITTNTTIYPIA

SEQ ID NO: 180198 - protein, 525 aa, Oryza sativa
  Clone ID: PAT_MRT4530_77586C.1.pep
MARKKRLNIVHSSCHHGNGEGSSSGQSLPQVEPPLPYEDEVIHVEQQDDEPLNMPVQDEEVKKRKGTTLRYVWDLPPGKRIVVKCNRLGQPIGDEGGLLGQFLGTLARNGAYCPLDKMTWRKIKADEGDLTILQFVQTKFLYPPSCVQWILKSIGRDWRRYKAALKDKYFNPKKKRSALYKLCPDDVEKDQWIPLIKYWKSKKGKALSAKNKRSRSMLQNPHSAGTKSYARWSEDLVTLENLIDEQPELAQNDQGRVAWEGDALNKVLGKEKPGQVHGMGLLPVPKQVYGRTSHHLKNINITTVNDSSSDEETHVRGEVGELKKLVKTLGQRIEELENKGTSNGNSEPTMATSQRTFDDGIEEGVVRTNRKNKRRCEEQQNMHHDNILDLCGKKHQEADNNIGSPCQDDSSSQPHLAHDLRWEMNKKKHRNLEKFAKTTEKQDTQKKTAHHMAQNRVHSSSVKVGTTIILVTAKYPNKETVAYATYLSSNPRDKVDGVEIGNEFTKVVVNHPLKEDEELVQKING

SEQ ID NO: 180199 - protein, 614 aa, Oryza sativa
  unsure (1)..(614): unsure at all Xaa locations
  Clone ID: PAT_MRT4530_77587C.1.pep
MDLGKSSSTSVSLKKLQEDGALPGRGTMEREAGGTEPQPILGRMVVIEDYILCXPSSRSKWQTRXFYLQIEDSDPVFVVPEEQPDKISSWTAKPPLTPSLQSFIDVVDDLRVRGLSGYEVAVDFISLSNEAVGRRVGQVMISGPATASNVPVPLCEKGAAERDAAINALPLTDIIGPLADHQVVASLKEKVAKEASDAAAAATTSGGNVPAKGRKFSSVSGHRRKASAPSASDASPPPPRQQRLVTLGEKAARAKAVQDESGGTSGASPAVASTDVVLAPGSREVTPSGPASDPAAGRGPPAVVLTWEELQVEMWCLLEAGARGIGREIAEARSAAASANERADRLAYELAEAREDLKKMRELVAGNERQWQGLEHRMSKLGNNLSEIRGSLRVTYTAELAAAMEEIPSKHAARIGEETSNGIYTEACHVLACVRLAHPKLDLREILDQGAASGTRKEVMEEVGDLGESVLPLFEEDVDDEDVQQRGQPESLAIIPALAFEPHASPDNVDQILPTGIEMATTSLAYLESALAGQDRRIQYWKTKFEVAELERTMLAVKKEQAVETLRGREVWFNSYLKSCCTSMAKVCRELRVPRGDPEESAARYISWLNGAYA

SEQ ID NO: 180200 - protein, 50 aa, Oryza sativa
  Clone ID: PAT_MRT4530_77588C.1.pep
MVDLSRTEAIEETRISFCGQEHRVLTRYGSESDSEFGDEDKPELISYPDA

SEQ ID NO: 180201 - protein, 1437 aa, Oryza sativa
  unsure (1)..(1437): unsure at all Xaa locations
  Clone ID: PAT_MRT4530_77589C.1.pep
MAGKKRLNIVHSSCHHGNGEGSSSGQSLPQVEPPLPYEDEVIHVEQQDDEPLNMPVQDEEVKKRKGTTLRYVWDLPPGKRIVVKCNRLGQPIGDEGGLLGQFLGTLARNGAYCPLDKMTWRKIKADEGDLTILQFVQTNFLYPPSCVQWILKSIGRDWRRYKAALKDKYFNPKKKRSALYKLCPDDVEKDQWIPLIKYWKSKKGKALSAKNKRSRSMLQNPHSAGTKSYARWSEDLRQDDPNKKQPHRAMVYLATHKKKDKDKNQHVVTLENLIDEQPELAQNDQGRVAWEGDALNKVLGKEKPGQVHGMGLLPVPKQVYGRTSHHLKNINITTVNDSSSNEETHVRGEVGELKKLVKTLGQRIEELENKGTSNGNSEPTMATSQRTFDDGIEEGVVRTNRKNKRRCEEQQNMHHDNILDLCGKKHQEADNNIGSPCQDDSSSQPHLAHDLRWEIREAARRLTDAVEASSQGTFRPDRDRDELTLALQTPEHPGRTRGKGVIPWKIGFKEDIHTYRSRMRSKRDTEAKIADLEFRVSSYELNMQEEVARKVDERMAAHRSHDPQPTIPPAMVSPSGNRSSCASTGQVASGMAIPTDPSGTYHCRPIPAGYSKVEVELVEGAYEDLELDYPGGDGXYIILPGRQAASXDPAPTPPRAPTPTPPQAPLPAPSKSRAPPAPPPAHTRATKKAKVDAAKNKDPGYDCTQEELDAYVASEVKRQFKPRSPEKKIPIDPSVRNFFRGMSASVKEAIKLSDYERTLKKASSGKSKPVPQLGEQPNQEIEPLVTGKEMTIEQFITDTGLTTDQLLGVAPIEKAEVKYMYELGKPLVKPELLQSLPTQMYKFHQLYMEMSATGREMIGARIRDTDFLQGDDILWINFRGIYELYQLDALDVSIMSCWILMEIQRARRRRVFDTGFIDPRKVNVAMLDQYPQETEDNLVHLLKAQHYKTFILLPYNTEFHWVLLLFDLEACTVNCAKQKQGTNLCGYYVCEYCHCLADQIITTRELDFIRMRDNLTTHKEFIAAVQEQLMGFINEEILDPKVDDAASRRSDGMARPRHGAMAVRPSRDAKVEVLGAEALGSFFFPTTNGLQPAGLQVPGWEHHDHVPVYESGTEVFQKLQEKWNSTKHKRYRAMYSSVVGGIILDPSMMVIPIDDHMVHRGHGVFDTAMLSDGYLYELDSHLDRLLLSASKAKISSPFSRETLRAILVQMTAASKCRNGSIKYWLSAGPGDFLLSPKGCTAPAFYAVVIASAAAAAAGGHPRLREGVRAITSTVPMKDPFFAAMKSVNYLANALAMAEAEERGAYASVWVDGDGGVAEGPMMNVAFVTGGGDLVVPAFDRVLSGCTARRLLALAPRLVDAGVLRSVGAARISAADARRCAEMMFVGSGLPLLPIVEWDGQPVGDGQVGKIALALSDMLCEDIKAGLDRVLVPYDQAS

SEQ ID NO: 180202 - protein, 419 aa, Oryza sativa
  unsure (1)..(419): unsure at all Xaa locations
  Clone ID: PAT_MRT4530_7758C.1.pep
ISTPSNQALSSQRSPSVRIEIQGVPFLANLILLESKDLDVILGMDWLAKYKGVIDCANRKVTLTSNDGQIVTVHALPSEPLRSSLNQITLEEIPIVREYPDVFPDDLPGMPPKRDIKFRIDLIPGTTLIHKRPYRMVANELAEVKRQVDDLLQKGCIRPSSSPWGAPVIFVEKKDHTXRMCVDYRALNDVTIKNKYPLPRIDDLFDQLKGATVFSKIDLRSGYHQLRIKEEDIPKTAFTTRYGLFECTVMSFRRTNAPAFFMNLMNKVFMEYLDKFVVVFIDDILIYSXTIEEHEEHLRPALEKLREHQLYAKFSKCEFWLSEVKFLGHVISTGGVAVDPSNVESVTNWKHPRTVSEIRSFLGLAGYNWRFIENFSKIAKPLTRLLQKDMKYKWSEECEQSFQELKSRLISAPILILPD

SEQ ID NO: 180203 - protein, 744 aa, Oryza sativa
  Clone ID: PAT_MRT4530_77590C.1.pep
MDLGKSSSTSASLKKLQEDGALPGRGTMEREVGEPFLDLFRFYYELCWMESNRVSGCVGFRLRDCLKSRYIPFQCPSSHSKWRTRWFYLQIEDSDPVFVVPEEQPDKISSWTAKPPLTPSLQSFIDIVDDLRVRGCSGYEVAADFVGRRIQPLQARVHPAFDYSGPEDATRVSPRGLNSETVGRRVGQVMISGPTTASNIHVPLCEKEAAERDTAINALPLTDIIGPLADHQVVASLKEKVAKEASDAAAAAATTSGGNVPTKGRKFSSVSGHRRKASTPSASDASPPPPRRQRLVTLGEKAAWVKAAQDESGGTSGASPAVASTDVVLAPGSREATPSGPASDPAAGRGPPAAVLTWEELQVEMGRLLEAGARGIGREIAEARSAAASANERANWLVHELAEAREDLKKMRELVAGNERQRQGLEHRMSELGNNLSKIRGSLRVTYTGMHQLAGECGIKSTIPANPDEFSLTSSLAKLAAAMEEIPSKHAARIGEETSNGIYTGTCHVLACVKLAHPELDLREILDQGAASDARKEVMEEVGDLGESVLPLFEEDVDDEDVQQRGQPESPAIISALAFEPHASPDNVDQILATGTGMATTSLVKKKKAVETLRGREVWFNSYLKSCCTSMAKVCRELRVPRGDPKESAAGYISWLNGACAQLDGVGKRIDEALKQECRRSSRYAGGHVLACLRDHRPRLDLDFLREGFARSRRTPTEIDQLAKSMAPLAEKVFQSMDWRWPSW

SEQ ID NO: 180204 - protein, 180 aa, Oryza sativa
  unsure (1)..(180): unsure at all Xaa locations
  Clone ID: PAT_MRT4530_77591C.1.pep
MVAIEDYVLCGFLPPPSEFLLLVLNFYGLSLLHLNPNSIAFLSIFSHLCEAYIGVEPFLDLFLFYYELHWMESNRVSGCVGFRLRDGLKSRYIPFQCPYSRSKWRTRXFYLQIENSDPVFVVPEEQPDKISSWTAKPTLTPSLQSFIDVINDLRVRDLSGYEIAADFIGRWIQPLQARAH

SEQ ID NO: 180205 - protein, 60 aa, Oryza sativa
  Clone ID: PAT_MRT4530_77592C.1.pep
MEWTGGGAGARRRREPRGGLATGLGTAVLCSRGLEGRMRCELKGPMGWAGPAPVGLREQA

SEQ ID NO: 180206 - protein, 186 aa, Oryza sativa
  unsure (1)..(186): unsure at all Xaa locations
  Clone ID: PAT_MRT4530_77593C.1.pep
IFSHLCEAYIGVEPFLDLFRFYYELXIEWNPIGFRLRDGLKSRYIPFQCPSSRSKWRTRWFYLQIEDSDPVFVVPEEQPDKISSWTAKPPLTPSLQSFIDIVDDLRVRGLSGYEVAADFVSRRIQPLQARVHLAFDYSGPKDVTRVSPRGLNSETVGRRVGQVMISGPTTASNIPVPLCEKGPAAR

SEQ ID NO: 180207 - protein, 78 aa, Oryza sativa
  Clone ID: PAT_MRT4530_77594C.1.pep
MCPNKSVIMLHAIWTEPFFFFFFFPFFFFFFFFFFFFFFFFLNGTRPQINTKPCTPMLTYYCLNTSVNNCTQQYTAAT

SEQ ID NO: 180208 - protein, 90 aa, Oryza sativa
  Clone ID: PAT_MRT4530_77595C.1.pep
MPAPSRRPRRPRLPIDTLQPDAGEVLKVDVEVTEGLDKGGEVDGVIQGRKERLVSRVLALDFLRPRRLPPCFPIFGCLFLFIGLSPPPPS

SEQ ID NO: 180209 - protein, 107 aa, Oryza sativa
  unsure (1)..(107): unsure at all Xaa locations
  Clone ID: PAT_MRT4530_77596C.1.pep
CLFPFEGTRSEPNDILNFCGRCLTIGIAMQNRSFWPNHRVCKVFGPVFPKSSPMACVLALGYSVFNKAGGATDFPVGLVRRKHKAKKCKKDQIERPKLIPLXGLILA

SEQ ID NO: 180210 - protein, 62 aa, Oryza sativa
  Clone ID: PAT_MRT4530_77597C.1.pep
SLGSSVNKVREGANTGTQERVRQNEVDQHVLRNAGPNRVVLGQRSSYHSRCSSISASGCPDS

SEQ ID NO: 180211 - protein, 149 aa, Oryza sativa
  Clone ID: PAT_MRT4530_77598C.1.pep
MRHLSRALSASRQTCARHWRASYSIMTRTKAATSAALYMPYYAPTSNPVVLADWTNYAASTRVMQLLPCAIVALATYPVVTLVAHTIEHRMRAKHRPPHEFRHTLKEHDSVALPEYNAPEEDEIPKNAKVYLILSRGLEKNNGTRTSAP

SEQ ID NO: 180212 - protein, 136 aa, Oryza sativa
  unsure (1)..(136): unsure at all Xaa locations
  Clone ID: PAT_MRT4530_77599C.1.pep
MAKRLALMLMIFLVLGASCKGHTHGGPGPSPSGHGSEPTHLHFYFYEKDFXPSPSAVTMVNPPDNTSNTLFGMVVVLDDLLTVGPNSRSKPVGRAQGMYVSSDQTWIGLLMATNIMLTTCHTPKFSSQPKFIYKRP

SEQ ID NO: 180213 - protein, 1034 aa, Oryza sativa
  Clone ID: PAT_MRT4530_7759C.1.pep
MTTDPEEFLQVYSTVLYAAGADDNALANYLPTALKGSARSWLMHLPPFSISSWADLWQQFVANFQGTYKRHAIEDDLELRNTIPDIANASVIRAFKSGVRDRYTTQELVTRPITTTRRLFEIVERCAHVDDALRRKNDKPKTGGEKKSATDAYESSKKKNHKNGKRKAQAEVLAAEYANPPKCPDPQGSDTKKSWCPIHKTDRHSLEDCLVFKKSLEKHMAFEKGKRGAAPKMKWSEEKIEFSEEDHPKTAVIPGRYPIVVEPTIRNIKVARVLIDGGSSINLLFASTLDAMGIPQNELTPTDQPFHGITPQSSSRPLGKITLPVTFGQANNFRTEQITFDIAEFDTAYNAIIGRTALAKFMAASHYAYQVLKMPGPKGTITIQGNAKLAVQCDKRSLDMVEQMTSPPATTEPPKKPSDMPGVPREVIEHKLMVRPDAKPVKQRLRRFAPDRKQAIREELDKLLKAGFIREVLHPEWLANPVMVRKANGKWRMCVDFTDLNKACPKDHFPLPRIDQLVDSTAGYELLSFLDAYSGYHQISMAKEDEEKIAFITPFGVFCYVKMPFGLITAGNTFQRMVQGALSNQLGNNVEAYVDDIIVKTKTSDSLIDDLRETFDNLRRYRLMLNPEKCTFGVPSGKLLGFLVSGRGIEANPEKIKAIENMKSPTRLKEIQKMLYAVIMTSRKLRHYFQVHRVTVVSSFPLGEVVRNKDVVGRIAKWVVELSQFDVHFVPRTAIKSQVLADFVADWTMPDHKLDNQIDNETWTMAFDGALNSQGAGAGFILTSPSGDQFKHAIHLNFGATNNTAEYEGLLAGIRAAAALGAKRLIVKGDSELVANQVHKDYKCSNLELSKYLTEVRKLEKRFDGIEGGYRFLFVAIDKFTKWIEAVPTGEIRADNAIKFMKWIICRYGLPHRIITDNGSQFISADFQDYCIGLGVKICFASVSHPQCNGQVERANGIVLQEIKTRIYDRLMSQDKKWVEELPSILWAVRSTPITSNKETPFFLVYGSEAMLHCELQHQSTRVQKYSDENQEEQ

SEQ ID NO: 180214 - protein, 73 aa, Oryza sativa
  Clone ID: PAT_MRT4530_775C.1.pep
VVYDRMCTQLRFDDVTITAGWSLARATNGFHQAGHRRRGSSGHTPYNCVTPSRCRHLSSALCMWESLKTTTWT

SEQ ID NO: 180215 - protein, 174 aa, Oryza sativa
  unsure (1)..(174): unsure at all Xaa locations
  Clone ID: PAT_MRT4530_77600C.1.pep
MASRRSRRLGSLVPFAAAVVLLLLIASAAAAAAGSPDRAGPARPPLVLPLTLAYPNATRLPASSARRGLGDGHNPNARMRLHDDLLTNGYYTTRLYIGTPSQEFALIVDSGSTVTYVPCATCEQCGNHQSEPPNLIEAHVNVQVKCNVDCXLCDNERSSCTYERQYAEMSSSSG

SEQ ID NO: 180216 - protein, 1562 aa, Oryza sativa
  unsure (1)..(1562): unsure at all Xaa locations
  Clone ID: PAT_MRT4530_77601C.1.pep
MAAASRARRWSLAGKTALVTGGTKGIGRAIVEELAGFGVRVHTCSRHDADLQDCLRRWNAAGEGGGAAALVTGSVCDVSVRGDREALVAAARAALGGRLDMLVNNAGQVVVGPAAETAPEEYARLMATNLESCFHLAQLAHHLLRDAAAGGGAAASVVNISSTAAFYAAPHLAVYSATKGGMNQLTRCLAAEWARDGVRVNAVAPGATRTDICDTSGVALGEKTRRRLADAGAMDRVPIRRIGEPEEVAAAVVFLCMPAASYITGQAQGLWGAVEPEGDDLVDYRQDRQALAAILRAVPAEMLATLAVKETAQEAWEAIKTRRIGVQRVREANAQQLAENSVISSSRTVVPEHLQQIAISIETLLDVNELSLEEVTGRLRSVEQRKQRKTAAASSRVDANGRLLFTEEEWLAKFRKAASLQDAAHSSGGNGDRRGRGRGKKDDGAPKEAQPKPANPGGRNLGNCKNCGKRGHWAKDCRSKPKAQQAYVAQEEDEEPALLLAKVQLDPPRPRVAAPTNVVSPPSAPRALSPMGELAVVEAKVFAQLDGGGEHDPAMWILDTGATNHMTGSRSAFAELDTAVTGTVRFGDGSVVRIEGRGTILFSCRFGEHRGIAGVYYIPRLTANIVSLGQLDRSGSKVLIHHGVLRVWDPRGHLLVRVRRSDDCLYTIKLDIDRPVCLAARSAEPAWRWHARYDHLNFPTLRKLAQQEMVRGLPLLQQVTQVCDGCLLRKQRRAAFPTQSKYRADEHLELVHGDLCGPIEPATPAGNRYFLLLVDDMSRYMWLTLIRSKDESANAIKHFQARAEVESGRKLRALRTDRGGEFTSIEFGEYCANLGVGRQLTAPYSPQQNGVVERRNQTIIATARSMMKAKGVPGRFWGEAMSTAVFLLNRSPTKSLDNQTPYEAWYGQRPAVHFLRTFGCVGHVKITKPGLKKLDDRSAPMVLLGYEQGSKAYRLYDPVSERVHVSRDVVFDEDAAWDWGPVVTTTIGTAPASSPTPPSPPSPAPSAPTTPAPPSPPSPEAVEFVTPPTQDSILDVDADDDVVPRYRLVDNLLGNASPPGHAPRVLEQLELHVVSANEPASLAEAEADPNWRGAMQDELNAIVDNDTWSLTDLPHGHRAIGLKWVYKLKRDEQGAIVRYKARLVAKGYVQRQGVDFDEVFAPVARLESVRLLLVVAVHQGWQVHHMDVKSAFLNGELLEEVYVSQPPGFVDDNHKNKVYRLHKALYGLRQAPRAWNAKFDSSLLSLGFHRSSSEHGVYTRTRGGRRLTVGVYVDDLIITGDHDDEIRSFKGEMMKLFKMSDLGALRYYLGIEVTQDSDGITLGQAAYASKILEKAGLKDCNPCQTPMELXVGSLRYLVNTRPDLAFSVGYVSRFMESPREDHLAVVRRILRYVVXRCALPMLVGYSESDLAGDPDERKSTSGQIFFINGGPVTWQSSKQKVVALSSCEAEYIAAAAATCQGVWLARLLAEVLGDEIATPLLKVDNQSTISLIKNPVHHDRSKHIDVKYHYIRECAEKKLIEMMFVGTAEQLGDIFTKSLGRTRFQELRSKIGVCSLDKSSQT

SEQ ID NO: 180217 - protein, 1479 aa, Oryza sativa
  Clone ID: PAT_MRT4530_77602C.1.pep
MATRLRPKMTAAAAARKRSTAAAAARMRSVAAAAARIRPTAAAAVRMRSMAAVAAARLRPTAAAAARMRSVAAAAARMRPTTAAAARMRPVAAAAARMRPKVAAAARMRPAAVVAALMLPTAALLLSLAAMTALLWPTSASVAQGLWGAVEPEGDDLVDYRQDRQALAAILRAVPAEMLATLAVKETAQEAWEAIKTRRIGVQCVREANAQQLRREFGDILFEDGETVDNFSMRIGGLANNLRTLGDNITEAEVVQKLLQVVPEHLQQIAISIETLLDVNELSLEEVTGRLRSVEQRKQRKTAAASSRVDANGRLLFTEEEWLAKFRKAASLQDAAHSSGSNGDRRGRGHGKKDDGAPKEAQPKPANPGGRNPGNCKNCGKRGHWAKDYRSEPKAQQAYVAQEEDEEPALLLAKLDDGGEHDPAMWILDTSATNHMTGSRSAFAELDTAVTGTVRFGDGSVVRIEGRGTVLFSCRFGEHRGIAGVYYIPRLTANIVSLGQLDRSGSKVLIHHGVLRVWDPRGHLLVRLRCSDDCLYTIKLDIDRPVCLAARSAEPAWRWHARYGHLNFPALRKLVQQEMVRGLPLLQQVTQVCDGCLLGKQRRAAFPTQSKYRADEHLELVHGDLCGPIEPATPAGNRYFLLLVDDMSRYMWLTLIRSKDEAANAMKHFQARAEVESGRKLRALRTDRGGEFTSIEFGEYCANLGVGRQLTAPYSPQQNGVVERRNQTIVTTARSMMKAKGVPGRFWGEAMSTATPYEAWYGQQPAVHFLRTFGCVGHVKITKPGLKKLDDRSAPMVLLGYEQGSKAYRLYDPVSERVHVSRDVVFDEDAAWDWGPVTPDGAPQLEPFTVEQVVTTTIGTAPASSLTPPSPPSPAPSAPTTPAPPSPPSPEAVEFVTPPTQDSILDADTDDDVVPRYRLVDNLLGNASPPGHAPRVLEQLELHVVSADEPASLAEAEADPNWRGAMQDELNAIVDNDTWSLTDLPHGHCAIGLKWVYKLKRDEQGAIVRYKACLVAKRSSEHGVYTRTRGGRRLTVGVYVDDLIITGEHDDEIRSFKGEMMKLFKMSDLGALRYYLGIEVTQDSDGITLGQAAYAGKILEKAGLNDCNPCQTPMEVRLKLRKGSNFPLVDATLYRSLVGSLRYLVNTRPDLAFSVGYVSRFMESPREDHLAAVRRILRYVAGTRCWGIRFGPGARCALPMLVGYSDSDLAGDPDERKSTSGQIFFINGGPVTWQSSKQKVVALSSCEAEYIAAAAATCQGVWLARLLAEVLGDEITAPLLKVDNQSTISLIKNPVHHDRSKHIDVKYHYIRECAEKKLIEMMFVGTAEQLGDIFTKSLGRTRVAGSGTLLSLCLRAVASTLGVPFGLSSSSSDSMVNSVFLWRRPTGINGSSSGLHAKGDLRLTEEDGANSLHTAVQGSETHKRTWNCNARVKKRFYPSSPHHCEFVIIDNSNRVLAWGLGKKAAASMMIREICMEELV

SEQ ID NO: 180218 - protein, 1283 aa, Oryza sativa
  Clone ID: PAT_MRT4530_77603C.1.pep
MPMTRRSPHIPRLLFLHELESESFDSAATTLEWVVLEAIMVLLLTLPVLDRLPVRDDLRGAERAEDDDVDGALLPLPADGHLLERVDWPDRDPPTADLHPRQTTQGERKRGELGKRRVSYVWFQVQGEPADAQPSTDASCALKEEEGGVAMGAGEELKEGGGKAQGLWGAVEPEGDDLVDYRQDRQALAAILRAVPAEMLATLAVKETAQEAWEAIKTRRIGVQRVREVNAQQLRREFGDILFKDGETVDDFSMRIGGLANNLRTLGDNITEAEVVQKLLQVVPEHLQQIAISIETLLDVNEVSLEEVTGRLRSVEQRKQRKTAAASSQVDANGRLLFTEEEWLAKFRKAASLQDAAHSSGGNGDHRGRGRGKKDGGAPKEAQPKPANPGGRNPGNCKNCGKRGHWAKDCRSKPKAQQAYVAQEEDEEPALLLAKVQLDPPRPRVAAPTNVVSPPSAPRAPSPMGELAVVEARVFAQLDDGGEHDPAMWILDTGATNHMTGSRSAFAELDTVVTGTVRFGDGSVVRIEGRGTVLFSCRFGEHRGIAGVYYIPRLMANIVSLGQLDRSGSKVLIHHGVLRVWDPRGHLLVRVRRSDDCLYTINLYIDRPVCLAARSAEPAWRWHARSKDEAANAIKHFQARAEVESGRKLRALRTDRGGEFTSIEFGEYCANLGVGRQLTAPYSPQQNGVVEHRNQTIVATARSMLKAKGVPGRFWGEAMSTAVFLLNRSPTKSLDNQTPYEAWYGQRPAMHFRRTFGCRGHVKITKPGLKKLDDRSAPMVLLGYVQGSKAYRLYDPLELHVVSADEPASLAEADPNWRGAMQDELNAIVDNDTWSLTDLPHGHRAIGLKWVYKLKRDEQGAIGVDFDEVFAPVARLESVRLLLAVAAHQGWQVHHMDVKSAFLNGELLEEVYVSQPLGFVDDNHKNKVYRLHKALYGLRQAPRAWNAKLDSSLLSLGFHRSSSEHGVYTRTRGGRRLTVGVYVDDLIITGDHDDEIRSFKGEMMKLFKMSDLGHSDTTSASRLPRTVMGSRWGKPHMPARFLRRQDSRTAIPVRLPWSLVGSLRYLVNTRPDLAFSVGYVSRFMESPREDHLAAVRRILRYVAGTRCWGIRFGPGARCALPMLVGYSDSDLAGDPDERKSTSGQIFFVNGGPITWQSSKQKVVALSSCEAEYIAAAAATCQGVWLARLLAEVLGDEIAAPLLKVDNQSTISLIKNPVHHDRSKHIDVKYHYIRECAEKKLIEMMFVGTAEQLGDIFTKSLGRTRFQELRLKIGVCSLDKSGQT

SEQ ID NO: 180219 - protein, 681 aa, Oryza sativa
  Clone ID: PAT_MRT4530_77604C.1.pep
MALVCAECRLVDIVRVHANLMVPEMEIQLGEEVGVAKFIKQFVENQNGKHVLGSHRVEGSVVHVEAPWLVDQQNRRREWRRVGADGELVSALFLQFVVLKLWVAIRSNHYRGLAGLEVDVMIDGSGRWEAGWSAKRSSNSASKDGRRSSACSAAQLRSRAKQSTSNTSVATYRRSPCTTPAPRMRSLSATTTRRPWRTGWRGRPMRWASLVVMKLCVEAGVNKGHHLLGRDTRHEAHRASAIDTENRVERDVWFIGVVCVVPFAEISRGVVVLKRPCLQRSGNSAGERQRNWCPGTSQGHGLLEILGLLELDIDADVVGEPRCEELNLLAVGEEVGRAATQRQKALLVRRHRANLSEMLEFTQGIVADRRSILTVTELLERIPIRRTHVLLIMEVPFLCSSSEMTRKRPSTDFMETIQKDVNPSMRAILIDWLVEVAEEYRLVPDTLYLTVNYIDRYLSGNEINRQRLQLLGVACMLIAAKYEEICAPHVEEFCYITDNTYFRDECWNESNSNNSLIAYNRRFVRVAQVSDELFIVQDPALHLEFLANYVAELSLLEYNLLSYPPSLVAASAIFLAKFILQPTKHPWNSTLAHYTQYKSSELSDCVKALHRLFSVGPGSNLPAIREKYTQHKILHAADVIDLNMANAFKNVKILCQCPCQCNLLEEVMLKLFPYWKLSTAV

SEQ ID NO: 180220 - protein, 1274 aa, Oryza sativa
  unsure (1)..(1274): unsure at all Xaa locations
  Clone ID: PAT_MRT4530_77605C.1.pep
MAQGKMIGLAGKLRRVSAKTEKPNWQISSTERINTKIGTPPSYSSIGVDMWPMEFSETTINKIVGLTHAAFVRSLLEPCASLRRSPGFLMSLPTPRVSHSPPCHRWRLPSPRRGRHGGRGQVVVHRVVREVTTSSVVYPTLTRTNYQDWVLVMRVNMQAQGLWGAVEPEGDDLVDYRQDRQALTAILRAVPAEMLATLAVKETVQEAWEAIKTRRIGVQHVREANAQQLRREFGDIIFKDGETVDDFSMRIGVLANNLRTLGDNITDAEVVQKLLQVVPEHLQQIAISIETLLDVNELSLEEVTGSLRSVEQRKQRKAVAASSRVDAYGCLLFTEEEWLAKFRKAASLQDAAHSSSGGNSDRQGQGRGNKDDGASKETQPKPANLGGRNPGNCKNCGKRGHWAKDCRSKPKAQQAYVAQEEDDEPALLLAKVELDPPRPRVVAPANPVSPPSAPRTPSPTSELAVVKAKVFTQLDDGGEHYPATWILDTGATNYMTGSRSAFAELDTAVSGTVKFGDGSVVHIEGHGTVLFSCRSREHRGITGIYYIPWLTVNIVSLGQLDHSGSNLDIDRPVCLAARSAEPAWRWHARSKDEAANAIKHFQARAVVETGRKLHALRTDRGGEFTSIEFGEYYANLGVGRKLTVPYSPQQNGVVERRNQTIVATARSMMKAKGVPGRFWGEAMSTTVFLLNRSPKKSLDNQTPYEAWYGQRPAVHFLRTFGCMGHVKITKPGLKKLNDRSVPMVLLGYEEGSKAYRLYDPDSILDADTDDDLELYAVSADEPASLAEAEADPNWRGAMQDELDAIVDNDTWSLTDLPHGHRAIGLKWVYKLKRDEQGAIGVDFDEVFTPVARLESXWQVHHMDVKSAFLNGKLLEEVYVSQPPGFVDDNHKNKVYRLHKALYGLRQAPRAWNAKLDSSLLSFGFHRSSSEHGVYTRTRGGRRLTVGVYVNDLIITGDHDDEIRSFKGEMMKLFKMSDLGHSDTTSASRLPWTVMGSRWGKLHMPARFLRGQDSRTTIPVRLPWXGTRCWGIRFGPGAQGTSRKLLXYSDSDLAGDLDEQKSTSGQIFFVNGGPVTWQSSKQKVVALSSCEAEYIAVAAATCQSVWLAWLLAEVMGDEVAAPLLKVDNQSTISLIKNPVHHDRSKHIDVKYHYIRECAEKKLIEVMSVGTAEQLGDIFTKSLGRTRFQELRSKIESVGVVRCMLQCRDRENFLFPNASVLIPVPGKAGTEPQTKPYPLDMWKYGSALQQRPEDRSLYGRGATIKTMHPEPSLKPF

SEQ ID NO: 180221 - protein, 96 aa, Oryza sativa
  unsure (1)..(96): unsure at all Xaa locations
  Clone ID: PAT_MRT4530_77606C.1.pep
MADVLSSISLLASKSDLADLSRSVXVATSHITALEQSSTTLSAPRLGGSGILPXPPPPPPPSTGTGSVHDTNSGNIRRTRIVSGWPHTISLELHRN

SEQ ID NO: 180222 - protein, 109 aa, Oryza sativa
  unsure (1)..(109): unsure at all Xaa locations
  Clone ID: PAT_MRT4530_77607C.1.pep
AFYAAPXLAVYSATKGGMNQXTRCLAAEWARDGVRVNAVAPGATRTDICDTSGVALGEKTRXRLADAGAMDRVPIRRIGEPEEVAAAVVFLCMPAASYITGQVICVDGG

SEQ ID NO: 180223 - protein, 51 aa, Oryza sativa
  Clone ID: PAT_MRT4530_77609C.1.pep
LPGLRVADPPLPRAAPPDSLPSSSSLWLDLAFTTPSPTRCPRTPPPPLPPS

SEQ ID NO: 180224 - protein, 630 aa, Oryza sativa
  Clone ID: PAT_MRT4530_7760C.1.pep
MDISHLLLRFFLLLLLLLLAFSLDDAPHHHCTEAAATTLPPPPPPPFSFKFDFSNTYTYRLEDLRFEGTAAVHGATVDLTCNVAQCTTGRMSYGRAVPLWDRATNEVASFATEFAFKIVTPDNVARGDGMAFFLSSYPSRVPPNPSGQSFGLIAGDADHAGDGPDRFIAVEFDTYDDTFERPRPAGDHIGIDVSSVADSINTTSLNFSRNGAMRASITFDNVTRMLVATVQFTDQTTASRAAPVQVSAKLGDPRALLPSEVAVGFSTANGATFQLDQILSWSFNSTLASPHPVTKGHHKKKGAAGKFAIVGAPIFLLLVWSILSWWKWRSSSRDIDKRTGGVRQFKYNELAAATNQFSSENRLIGAGPFGEGYKGFFKEMGRHVAIKKISKESRSEGSNKDFYDEVKTISSAKHKNLVELVGWEKAHTIFLVYEFVDNSNLRVHLHEKEAVLPWTTRYKIVKDICAALVHLHHERRPFVLHRNIKPNNILLDKEFNAKLADFGLSRTADKVGKARYLDPECKKTGKFKRSSDVYSFGIVLLEIACKKDENSFAKVWSRYLEKSLMQVADDRLRGEFDERQMERVIILGLWCCQPNIDMRPTVQQAMDFLESDGPLPELAEPETSSSKIGN

SEQ ID NO: 180225 - protein, 1597 aa, Oryza sativa
  Clone ID: PAT_MRT4530_77610C.1.pep
SRLGDGDAITTEDDGGGGGSEAVHGGGGCSDAVRGGGGGSDTAHGGGGCSDAVHGGGGGGSVAAHGGGGCSDAVRGGGGGSDAAHDGGGCSDAARGGGGCSDAAQGGGGGSNAARGGGGCSDAAHGCAVAVSGGDDCAVVAYVSIGGVSLVLLLHVSHSPPRRRWRSPSPRRGRHGGRGQVVVERVVREATTSSVVYPTLTRTNYQDWALVMRVNMQAQCLWGAVEPEGDDLVDYRQDQQALAAILRAVPAEMLATLAVKETAQEAWEAIKTRRIGVQRVREANAQQLRREFGDILFKDDETVDDFSMRIGGLANNLRTLGDNITEAEVVQKLLQVVPEHLQQIAISIETLLDVNELSLEEVTGRLRSVEQRKQCKTAAASSRVDANGRLLFTEEEWLAKFRKAASLQDAAHSSSGNGDRRGRGRGKKDDGAPKEAQPKPANPGGRNPGNCKNCGKRGHWAKDCRSKPKAQQAYVAQEEDEEPALLLAKVQLDPPRPRVAAPTNVVSPPSAPRAPSPIGELAVVEAKVFAQLDDGGEHDPAMWILDTGATNHMTGSRSAFAELDTAVTGTVRFGDGSVVRIEGRVTVLFSCRFGEHRGIAGVYYIPRLTANIVSLGQLDRSGSKVLIHHGILHVWDPRGHLLVRVRRSDDCLYTIKLDIDRPVCLAARSAEPAWRWHARYGHLNFPALRKLAQQEMVRGLPLLQQVTQVCDGCLLGKQRRAAFPTQSKYRADEHLELVHGDLCGPIEPATPAGNRYFLLLVDDMSRYMWLTMIRSKDEAANAIKHFQARAEVESGRKLRALRMDRGSEFTSIEFGEYCANLGVGRQLTAPYSPQQNGVVERRNQTIVATARSMMKAKGVPGRFWGEAMSTAVFLLNRSPTKSLDNQTPYEAWYGQWPAVHFLRTFGCVGHVKITKPGLKKLDDRSAPMVLLGYEQGSKAYRLYDPVSERVHVSRDVVFDEDIAWDWGPVTPDGAPQLEPFTVEQVVTTTIGTAPASSPTPPSPPSPAPSAPTTPAPPSPPSPEAVEFVTPPTQDSILDADADDDVVPRYRLVDNLLGNASPPGHAPRVLEQLELHVVSADEPASLAEAEADPSWRGAMQDELNAIVDNDTWSLTDLPHGHRAIGLKWVYKLKRDEQGAIVRYKARLVAKGYVQRQGVDFDEVFALVARLESVRLLLAVAAHQGWQVHHMDVKSAFLNGELLEEVYVSQPPGFVDDNHKNKVYRLHKALYGLRQAPRAWNAKLDSSLLSLGFHRSSSEHGVYTRTRGGRRLMVGVYVDDLIITGDHDDEIRSFKGEMMKLFKMSDLGALRYYLGIEVTQDSDGITLGQAAYAGKILEKAGLKDCNPCQTPMEVRLKLRKGSDFPLVDATLYRSLVGSLRYLVNTRPDLAFSVGYVSRFMESPREDHLAAVRRILRYVAGTRCWGIRFGPGARCALPMLVGYSDSDLAGDPDERKSTSGQIFFINGGPVTWQSSKQKVVALSSCEAEYIAAAAATCQGVWLARLLAEVLGDEITAPLLKVDNQSTISLIKNPVHHDRSKHIDVKYHYIRECAEKKLIEMMFVGTAEQLGDIFTKSLGRTRFQELRSKIGVCSLDKSSQT

SEQ ID NO: 180226 - protein, 49 aa, Oryza sativa
  Clone ID: PAT_MRT4530_77612C.1.pep
MGPRAARLAPMPMTRRSPHIPRLLFLHELESESFDSAATTLEWVVLEAI

SEQ ID NO: 180227 - protein, 1426 aa, Oryza sativa
  unsure (1)..(1426): unsure at all Xaa locations
  Clone ID: PAT_MRT4530_77614C.1.pep
MADVLSSISLLASKSDLADLSRSVAWPLRTSRPSSSPPPPCPRLAWAAAASCLPPPPPPPPSTGTGSVHDTNSGGAVPPFHKLEFPKFDRTDDPLNWINHCEQFFXRQHTPDTDRVWMATYHLTXAAQEWYFHYEQHMGPPDWDTFKQLCYGQYGPPIRNNSLGELKHLTQVGTVTTYQQRLLALGSRTSDLLTDRQQVQLFTAGLTDDICIDVELQQPEDFQEAMALARAYERKGQQNASRAPAPASTPMTGATSSPTTAADTPGHQFRCLSPAELPERCKQGLCYKCDEKFIRSXCTRLIYLEYDDTTANFSEWDDTDDTDEPHISLNAIFGVNGTSTMCLVARIAAEQVMALVDSGXSTHNFITTKLAQRIGLPLQPVRQGLRVVVADNDRIRGAGVVHGLRLXVATEVFDVDCFALDLSCVDIILGTQWLXYWDQSCGTSSTCAWRSGAVAGSHSMVSSTTDSXSTCAALHADDLLPSLLAEFDDLFAXPTGLPPTRSINHHIHLKPGKPPVVVRPYRYPQLQNDELEKXCADKLSICPNTSPFSSSVLLVHKPWRFYVDYRALNTVTAKDMFPILVLDELLDELCDAHFFSKLDLHFGYHQVRMHPDDVNKTAFRTHQGHFKFLFMPFGLTNAPATFQALMNMVLAPFLRRFVLVFFNDILIYSGTWAXHLQHIRAVLSVVRANHLILKRSKCHFGEQQINYLGHVVFANRVAMDVQKVCAMAYWSQPXSVGAVRSFLSLAGXNRDSIIHQPRRRPGWQLISNKMFKALLQDSDVQSTENHGSSXVHGIVDRRKHIRTIDVTNHTWSXIFVHSAKPPETXQAFFRGGQAACLASSLSERHAAIPVIGAFRGWLQXLRVRTSFFSPVHYSVKFLKNXRLFKVSQHRWXVSYVLSFDFIIEYRPGRTTVDEHRKAGAMXKRSRLTLQTCIVXVSKGGIPRVLCCLQYEFGQENXPMPLLVKEGKKVDCTPAVIAQQHNWLGTQDAMLDPHQILVQHGQISSKSIXCRCSHFKLQVIQDRSFHFQNLISEVXSCQRYSRILLHEVHISPRILQQSAYKELIAIEVIDDLSHCQEDNTIFTEVYRLSXHAQVNLLRPPSTVKIVARVFFNKVVRLHAIPLSAIADRDPVHQHVXTELLHLADIKLNLSSAFHPQCDGQSKAANRVISMYLRCLTGDHPRHWLXWLPWAEYCFNTVFQSSLRTTPFQVCVYDHGTARVRAVNQALVERDEFLEEIREHLLQAQDYWKLYYEEKHCDVTFXVCDWVXVRLLHHQAASLPGFCRNKLAPCYYGPYQVVTRVGDVACRLKLPAGAKIHDVFHVELLKVFKDTPLDQLPALSALSNERVLPLPATAVHGQLTRXGVCHVLIQWAGKPAVDATWEDEDEFCRTYPTFQLEDELFAKEGRHVMVGITYSRKRHDKESEEATD

SEQ ID NO: 180228 - protein, 315 aa, Oryza sativa
  Clone ID: PAT_MRT4530_77615C.1.pep
MQDKDHKSMWTVMEMELSLMYDILYTKAYVIHTSLGYIIRIMAPITIIASLLLFHFSGKALLSNLEIPDKVKTTLQDMHERFAPNDLNTMGLLRHNWGMLAMGEDMGSGTRPEQFKNLKRFHGVDFHESILIWHIATDLFLAKIGKEGPTVEAIRAMSNYMMFLFVDRPEMLPGLPHKWLYEMTKKNIIESCRASNGFTNEVKHGGQRSLRLKQTEQVAGKLLNIDKREVQPGPKVPRLRYARIVADTLYKWKDEDPIDVLFDLWIDFLMYAANRCNRESHAKKLNAGGEFLTIVWLMIEHFQQLAKAKKEHGNE

SEQ ID NO: 180229 - protein, 138 aa, Oryza sativa
  unsure (1)..(138): unsure at all Xaa locations
  Clone ID: PAT_MRT4530_77616C.1.pep
MASSALRRSLRRLLPSSPPPPSPASAADAATFRRSFLIRADDLLLESVEEFQNRMLTGLDDVLENLRGRSDWNTRHVYPNRQNSSSVLVDXTTNFDYLEDWMDEKEYDARHTCHVHDEYXDDDYAYKPDVTFTRGSTY

SEQ ID NO: 180230 - protein, 84 aa, Oryza sativa
  Clone ID: PAT_MRT4530_77617C.1.pep
MGKRRVALVVGDRGDGAASCHRAPAVPCYRATDLAVPRYRARPRRWWAVNVELHARGTSRHVTTHACACGNRRWNGSISCGVNA

SEQ ID NO: 180231 - protein, 214 aa, Oryza sativa
  Clone ID: PAT_MRT4530_77618C.1.pep
MEKTAAPLLLAAALFLVVAGDGSEPTPTPTPWPAQFHAKLLMEFHGNLSLADLWYDWPGGRNLHVIRYQLAADEPFYDNEWNNGTSFFYTPARRACRSAAVGVGILPPNWLVPGSVYLGRHPADGFDCHVWAKADFITYYEDTLTKRPVKWVFYTGRTSHVMSFEEGAVLEDAEWQAPEYCFGKGDETETSNDNALISEPVAGHDKGFFPRREF

SEQ ID NO: 180232 - protein, 494 aa, Oryza sativa
  Clone ID: PAT_MRT4530_77619C.1.pep
MADRLTDEQIEDVLALFGRNDRRTAAASATATVTKVIIMEAPETGPRAVAAAVVAAARRSTRPIISYLRFLLNRLRDTSDEQVINRSNDAWNLYHRLTGSSRRPAIAGHGAFPTGDTLDCLLRPRYFIPRRPLFQNCSLYRVLCQVRRASPSWKELAIGLGLAAAVVGATLLVRYYGEEAKRRLVADLYTTAYLKGEFDRFDRNDDGFITSEELGELLSCLGLNHTEAELQAMIEEAAPDGNGAIDFHEFLTIAHNWVIRSMQQYFSDEQLHHRLSLLLLRGRSPRHPWPPAAADVFLVVLLFRRRHGGPGEELEEDVGVAYLLGVAAAMVGASYAPSRSTAASARPPATAAAPFPYRNNRGSTAAPACLALPFLSKITSNYTCNLPVLLVAELTDEGVWVGQLADLLHLYASLIRLSSNGVRSVWRKFSSDTFALRSPHSPPGLLFRSLMVGGAAAIGVPGDCLVSPSPPSELRRALFNDVDAWLAVGEVDPV

SEQ ID NO: 180233 - protein, 137 aa, Oryza sativa
  unsure (1)..(137): unsure at all Xaa locations
  Clone ID: PAT_MRT4530_7761C.1.pep
FAVTTGNNPTGIPYVRALILVPGGKTEPQTKPYPLDMWKYGSALQQRPEDRSLCGRGATIKTMHPEPSLKPFXGILNRGGDDVTCLARFPNRRLRLPRRADLPKLQRLHNQRKRKXFYSNKLHITAETKHKNGFLTS

SEQ ID NO: 180234 - protein, 108 aa, Oryza sativa
  Clone ID: PAT_MRT4530_77620C.1.pep
KTGQKPQTPGGFLKHQWKNYNIGPPEYGEKPQPKTTPGKVKTSTKGNTLKGKRKKHDIVRRGWPGGKNQKKGPPPAKKKEQRGRAHKIKTGRVRGWKISHTFIREYPG

SEQ ID NO: 180235 - protein, 67 aa, Oryza sativa
  Clone ID: PAT_MRT4530_77621C.1.pep
VFSREAEAATTSTNHDILSHMLGHDKLLVIDHHPTLAKEYVVGSTGEPYAPHALAGASVSQRCTPDP

SEQ ID NO: 180236 - protein, 115 aa, Oryza sativa
  Clone ID: PAT_MRT4530_77622C.1.pep
MDVRRVMATVAGRRACPKLAFGYASVPVDLILQSTRNKGKETAVKSINDSRLARTLSTRGNHLEAYRPNPISYTKSYCRNRLHHQTKSDSNLADPIVADPDSSRFLLCFRDNPYL

SEQ ID NO: 180237 - protein, 188 aa, Oryza sativa
  unsure (1)..(188): unsure at all Xaa locations
  Clone ID: PAT_MRT4530_77623C.1.pep
KLSIQSFARGLSLPSPMRTWSSGGGSXLRDGGLSKNGSGVKRALSRSEAWGGASASSESESSSDDALLARXTPRSVLPAEISRRELEAVLRRLGPGEPDDEELDAVVGIAAVAVAVGGEDELLEAFLVFDADGDGRITVEELRGVLVALLGGDGDGCSLDYCRRLIGGVXRSSVAVFVGLRDFGRLMM

SEQ ID NO: 180238 - protein, 54 aa, Oryza sativa
  Clone ID: PAT_MRT4530_77624C.1.pep
FFFGFARANGPPLGLVPGSPRAKKKKKKKKKNKKKKKKNKKKKKKKKKKKKKKK

SEQ ID NO: 180239 - protein, 1116 aa, Oryza sativa
  Clone ID: PAT_MRT4530_77625C.1.pep
MTMADGAGRDRSGLGPGKRKERVRPESTSRVLARAGSSDTTGLQCPYGQYEAPNCAVAVSCRLSSGHRAGRTTTRFSPASYNRKKGWLDNVLKKEDDTRSAVVVVRAVAGPELGGARQERLRELKTWFSGPLHAESAPGCGRSAAGESGDGRAAGKLQVAPCESRHRGRGDWWVWAAALLRLCPLLLAHHLLPEAGRRGLGGDDDDSPSSSPRLPPASSPTSPAGEEGDRREEGRRARKKAVTRSVKAGLQFPVGRIGRYLKKSRPVDLLSAAPSPSAAPTLFPTASVTPPTLFPTASVTPPTLFPTHAPQDIPLYPSSADMARKEGEGLDLVAMEEELDLYSWEPVVTLAISLLDRAISYLGEDTSWAEGRNKNRFGGFSSQMFYYLQPARGRFQDFRLRLINWPKSYCCGYEEIWKFRIAVELLEDLIEEIEHRRLEEDGRIPALFMNAKAKIAFKFATNDYFREEWDRLFQEFTTFRLEDLITDIEHLRLEESGKKISNKKFARSPDQYKQQARLFFLLERGVSRLRDQLPAVVEHVVSQDRELVDLEKEELHAELVGRDREKKQIVQCLIISTAGAEIKRVASAGHIQEYLSVRISRHCHNGKTPVIANEPGSAGADTAAGAAASIARAELPLPEPERVSDPAVPLPPPALVSEPPPTTATVAKVEDEEKPTAVAHQEAAPRDYAFQRALKTAENKSDPCGGRYIYVHELPPRFNDDMLRECERLSLWTNMCKFMSNEGLGPPLGNEEGVFSNTGWYATNQFMVDVIFRNRMKQYECLTKDSSIAAAVFVPFYAGFDVARYLWGHNISTRDAASLDLIDWLRKRPEWNVMGGRDHFLVGGRIAWDFRRLTDEESDWGNKLLFMPAAKNMSMLVVESSPWNANDFAIPYPTYFHPAKDADVLLWQDRMRSLERPWLFSFAGAPRPDDPKSIRSQLIDQCRTSSVCKLLECDLGESKCHSPSAIMNMFQNSLFCLQPQDGVRKGNVSIEDRLKSIHPDMVKKMREEVISLIPRVIYADPRSKLETLKDAFDVSVEAIINKVTQLRRDIIEDHEDKDFVEENSWKYDLLEEGQRTIGPHEWDPFFSKPKDKGGDSTNPSTNAAKNSWKNEQRGQN

SEQ ID NO: 180240 - protein, 67 aa, Oryza sativa
  unsure (1)..(67): unsure at all Xaa locations
  Clone ID: PAT_MRT4530_77626C.1.pep
QLKDKALKRAGLTEELLQEQIEQRTXXRKNKQFDVSDQIRKQLGSKGIALMDEPTGTVWRPCEPESE

SEQ ID NO: 180241 - protein, 579 aa, Oryza sativa
  Clone ID: PAT_MRT4530_77627C.1.pep
MRPHAKSPIASQVLPLLWLLLLPPPPPPVLGLARRRPALSLFPSALTMAESAKPTPQLELFNSMTKKKELFEPLVEGKVRMYVCGVTPYDFSHIGHARAYVAFDVLYRYLKFLGYEVEYVRNFTDIDDKIIKRANEAGETVTSLSSRFINEFLLDMAQLQCLPPTCEPRVTDHIEHIIELITKIMENGKAYAMEGDVYFSVDTFPEYLSLSGRKLDHNLAGSRVAVDTRKRNPADFALWKAAKEGEPFWDSPWGRGRPGWHIECSAMSAHYLGHLFDIHGGGKDLIFPHHENELAQSRAAYPESEVNYWMHNGFVNVNSQKMSKSLGNFVTIRNIMELYHPIALRLFLIGTHYRGDVNHYTIELNVASDRVYYIYQTLHDCEEMLSQQRQSKAGENISVPLPVNTTNCIQKHHSEFLESMADDLRTTDVLDGFTDLLKAINSNLNDFKKLQQKLEQQKKKQQQQKQQKQKQQQAQKQPEEYIQAMFALETEIKNKISILGLMPPSSLAEALKQLKDKALKRAGLTEELLQEQIEQRTAARKNKQFDVSDQIRKQLGSKGIALMDEPTGTVWRPCEPESE

SEQ ID NO: 180242 - protein, 99 aa, Oryza sativa
  Clone ID: PAT_MRT4530_77628C.1.pep
FSSPSSRAVGSSPLDPERISDSRKLARQSTSSSSSSSPQPQPQSSPSSRPGSSSSRTRSSSRPEASSCPSAMFFGHRLDLDVVVSIEIAAPPLTLMVEK

SEQ ID NO: 180243 - protein, 458 aa, Oryza sativa
  Clone ID: PAT_MRT4530_77629C.1.pep
MMSVQMAASLRVIVVLVCVTAGAALADAAAGGVRVGLTRIHSEPGVTASQFVRDALRRDMHRRARFGRELASSSSSSSPAGTVSAPTRKDLPNGGEYIMTLAIGTPPQSYPAIADTGSDLVWTQCAPCGERCFKQPSPLYNPSSSPTFRVLPCSSALNLCAAEARLAGATPPPGCACRYNQTYGTGWTSGLQGSETFTFGSSPADQVRVPGIAFGCSNASSDDWNGSAGLVGLGRGGLSLVSQLAAGMFSYCLTPFQDTKSKSTLLLGPAAAAAALNGTGVRSTPFVPSPSKPPMSTYYYLNLTGISVGPAALPIPPGAFALRADGTGGLIIDSGTTITSLVDAAYKRVRAAVRSLVKLPVTDGSNATGLDLCFALPSSSAPPATLPSMTLHFGGGADMVLPVENYMILDGGMWCLAMRSQTDGELSTLGNYQQQNLHILYDVQKETLSFAPAKCSTL

SEQ ID NO: 180244 - protein, 1536 aa, Oryza sativa
  Clone ID: PAT_MRT4530_7762C.1.pep
MSFVISLTLLTIVNDAITGNNLISSWFGMMPRYKPEYLFGVEGFVQELRTMSFVIGFGTAPFYAQIPHDRHEEKCRVKVTLNSNSEDIPSVMFEAGGRNYIHACQEVARIAIGELRDRYSDQLADTEYRYHPRQPQGSDRGNYLETEGIENDATTRHLVEMLWAMDESRAETVLAAQDREDRNRGKICKLEDKVDRLEKELAALKGEAPPQKARIRLTAMKRALFVPRYQLAPKMVNTRSNGNGPNNNNNNNNNSGENPTLAQVLAQQTQLMNMMMQQLQNQQNQGNNHAPPQNKLAEFLRLHGPASEWWDHFRLNRITAEPITWLEFTAAFRKTHIPSGVVSLKKKEFRSLTQGSRSVTEYLHEFNRLARYAPEDVRNDEERQEKFLEGLNDELSYPLMTGDYPDFQKLVDKAIRQEDKYNRMEQKKRRIAQFKTQQGNNQRPRLTLGPQSVPQGGSSSIVRPQRQFFNNNAGNNIRNQVPRPVAAPTQQQPAKREQGSKPVVCFNCGDPGHYADKCPKPRRVKVVPTQSNSTAPASKARVNHVAAAEAQDAPDVILGTFLVNLVPATVLFDSGATHSFLSMSFAGNHGMEVEDLRHPLMVSTPSNQALSLQRSPSVRIEIKGVPFLANLILLESKDLDVILGMDWLARHKGVIDCANRKVTLTSNDGRVVTVHALSSESLRSRLNQITLEEIPIVQEYPDVFPDDLPGMPPKRDIEFRIDLVPGTTPIHKRPYRMAANELAEVKRQVDDLLQKGYIRPSSSPWGAPVIFVEKKDHTQRMCVDYRALNDVTIKNKYPLPRIDDLFDQLKGATVFSKIDLRSGYHQLRIKEEDIPKTAFTTRYGLFECTVMSFGLTNAPAFFMNLMNKVCMEYLDKFVVVFIDDILIYSRTKEEHKEHLRLALEKLREHQLYAKFSKCEFWLSEVKFLGHVISAGGVAVDPSNVESVTNWKQPKTVSEIRSFLGLAGYYRRFIENFSKIAKPMTRLLQKDVKYKWSEECEQSFQELKNRLISAPILILPDPKKGFQDGKVVAYASRQLRPHEKNYPTHDLELAAVVHALKIWRHYLFGTRTEANVVADALSRKGYCNATEGRQLPLELCQEFERLNLGIVSRGFVAALEAKPTLIDQVREAQINDPDIQEIKKNMRRGKAIGFLEDEQGTVWLGERICVPDNKDLKDVILKEAHDTLYSIHPGSTKMYQDLKERFWWASMKREIAEYVAVCDVCQRVKAEHQKPAGLLQPLKIPEWKWEEIGMDFITGLPRTSSGHDSIWVIVDRLTKVAHFIPVKTTYSGSRLAELYMARIVCSHGVPKKIVSDRGSQFTSNFWKKLQEEMGSKLNFSTAYHPQTDGQTERVNQILEDMLRACALDFGGSWDKNLPYAEFSYNNSYQASIQMAPYEALYGRKCRTPLLWDQTGERQVFGTDILREAEEKVKIIQERLRVAQSRHKSYADNRRRDLSFEEGDYVYLRVTPFRGVHRFHTKGKLAPRFVGPYKIVSRRGEVAYQLELPQSLAGVHNVFHVSQLKKCLRVPTEEANLE

SEQ ID NO: 180245 - protein, 183 aa, Oryza sativa
  Clone ID: PAT_MRT4530_77630C.1.pep
GSPGCRLRYPLRRGRSRRAPPSRLPPPSCRAAARRLRRSSSPFVPSILLRLSSTEAPPHHEGNFTVRTLGSMSYFQATRYKPHNGIIVDKVAIGLGSTCKLLHERAKCSYSNRFIKLQEQVYPRLLLVAACHNRIGPVYASSGKGNSERVNDPYSMESLNKAIAGTKKQWPIQDMLIDQISKD

SEQ ID NO: 180246 - protein, 77 aa, Oryza sativa
  Clone ID: PAT_MRT4530_77631C.1.pep
KCVASEGDHQIYHLNPNSLLHIGIFIHFCEAFLGIWPHFNLFHSMFYLKAQLIKENPCHQLLRMKARRIPTPKFRLT

SEQ ID NO: 180247 - protein, 195 aa, Oryza sativa
  unsure (1)..(195): unsure at all Xaa locations
  Clone ID: PAT_MRT4530_77632C.1.pep
MPTPGPRPRPSAPPRRRRAPRVLPHPVQARAVAWPPPVPPPXPPPPTPSLSRSVLMPLRPSPPPPPSLPPLWRRLPLPHPHQHLLPPPPPPPPPPPPPPPPPPPPPPPPPPPLLPPPPXVSAPAPPPSIAPRXPPLLPPPPPPPPPPSFRPATLVALYDVPLPPPPPPTXAPSSAPEPXPSPPSAPXPAPPPSPP

SEQ ID NO: 180248 - protein, 43 aa, Oryza sativa
  Clone ID: PAT_MRT4530_77633C.1.pep
LLQAHHSVFPIIPLYHITSYIPFIDIENERSPILQNEKKKKKK

SEQ ID NO: 180249 - protein, 56 aa, Oryza sativa
  Clone ID: PAT_MRT4530_77634C.1.pep
MIRYSKKKTGKNLWDLAKAKTRDIGSVQMLCSAKTEQEEMVGWEQWLAVAREGQRV

SEQ ID NO: 180250 - protein, 121 aa, Oryza sativa
  Clone ID: PAT_MRT4530_77635C.1.pep
FGLILAKEHPLPVPDVVFRPLVDVLYRHDARLLPAGDGAAAAMVAAGSRRSPWCWSFWRVVTFAGAVHRRLCQDVEDEVQLVHLLNPHLAVGGCGGGHGGAAKHRRRRRLNFCVFELNWLA

SEQ ID NO: 180251 - protein, 89 aa, Oryza sativa
  Clone ID: PAT_MRT4530_77636C.1.pep
KGPRSLPKLQTPLLPFYPPKKPQKNSGGGFLKQNKKPPPIWSPNKNDRDQKTTTTNARLRCTKVVPIPNDRTIYPRLWGFTREGLNATP

SEQ ID NO: 180252 - protein, 238 aa, Oryza sativa
  unsure (1)..(238): unsure at all Xaa locations
  Clone ID: PAT_MRT4530_77637C.1.pep
DGDGGARRRRTARRLRGDGAAASKVAARRHDNGGAAARRRRRVEKGKREKRREWSGVEKGGIGXSLYREEGKKERGRRRKGETTAARRRGAQGGXARGARRRDGTRRGSGDGTRAATGRXWRRRQRWRAARGGMRWAATRRHGATATMGRRGAARCGLDGDGXRRGDGTAARGSRRRGNGTAARAAXRVGDVGAGSGRLGDVGAAAGGTRGDGDGDGRGEVERRAARGARGQRGRGGL

SEQ ID NO: 180253 - protein, 310 aa, Oryza sativa
  unsure (1)..(310): unsure at all Xaa locations
  Clone ID: PAT_MRT4530_77638C.1.pep
GRLHSTGILDGSDETNLFETSSTEKDFNSGVGEKXRKTEYYPLGTRREGRGWWLGSASKPAGQAWRATAARAVAGDGNWRRGRRRQTARKAAAVAEDDGARAEDGGAHEREGKXGGGGGTKWEGLEGEGWXXTAGGNHGRRRRQWWYSPARGEKRAPTVDLXGRMVDATAHGMVNAAASTRRGSDRGHERERWKEEKGGRECGEALLGLGSGGRGRGAPDFAGYVGGGEREGGGIQTVPRPCGARARAGGAERGRRRGRGTEWGGVGAGRTGXAAARAVSAVAGVGGWRKRKGLTGGPHLSAPEREREAG

SEQ ID NO: 180254 - protein, 238 aa, Oryza sativa
  unsure (1)..(238): unsure at all Xaa locations
  Clone ID: PAT_MRT4530_77639C.1.pep
AASGVVREAAAGEGGEGGSEGGGEGAPAREAARVGGGAGRGALGGPRGGGAADAARAGGAARGARRPRAAPPRGPWRRCGAGPSGSFCGPSWFPASRASSCPVFPFWVVFSSFFSLVCWFVLAFCCPLFPCFLVSFLFVYLPCPPPSXFRPPPPPLCXPFSPPPPPLPPPSPSSPPXXSPSXPPPAXPXXXXXPLPPAXPXXPPPPPPXPPXPPXXPPXXPPLXXPPXPPPPAPPPXP

SEQ ID NO: 180255 - protein, 112 aa, Oryza sativa
  unsure (1)..(112): unsure at all Xaa locations
  Clone ID: PAT_MRT4530_7763C.1.pep
FQALYSLWTRTDFQARCDNELVNSLGNFINXVLSFIGKXRELRYGSDVPHCGDVERDALTQTLVETRGKXIDQDMDVMDRVKLKQGLKNAMVISSEGNGYLQESQFLKLYNK

SEQ ID NO: 180256 - protein, 156 aa, Oryza sativa
  Clone ID: PAT_MRT4530_77640C.1.pep
MASKALLVFALVLAGAFLVNCAQQPQPYADPSNDDPNAGYGSSGYGYPSQQGQNPAQQGPNPAQQGPNPAQQGQNPAQQGPNPAQQGPYQAQQGQNGGDGGGGYGGAGGNGGGAGGGSGGAAGGGGGGYGDPWWNHPRRCRYGCCECGYYRCNRCC

SEQ ID NO: 180257 - protein, 269 aa, Oryza sativa
  unsure (1)..(269): unsure at all Xaa locations
  Clone ID: PAT_MRT4530_77641C.1.pep
GSSEASSPASAAATTATAAQGGDARRGSSGATARRLRRWRRGGATTAVRGEGEEGEEEGIEWGGEGGLGRGXFYRGQGKKERGRRGKGETTAARRRACGARRXDGARRDSGDGTRAATGHRWRRRQRWRAARGGMRWAATRRHGATATIGRRGAARRGLDGDGRRRGEGMAARGLRRHGNGTAARVARGWRCRRGLGAARRRWRGGRRRWRRAGGEATAARAVMATATAEGRRSGARCAGHEGNAAEEGLGPNSSHLPDSPVSHCAAAA

SEQ ID NO: 180258 - protein, 530 aa, Oryza sativa
  Clone ID: PAT_MRT4530_77642C.1.pep
MVTRSQSGSLRPVDRLTYTATQAAASPVPANYHSALADPNWRAAMADEYKELVDNGTWRLVSRPPRANIATGKWIFKHKFHSDGSLARYKARWVVRGYSQQHGIDYDETFSPVVKLATIRVVLSIAASRAWPIHQLDVKNAFLHGHLKETVYCQQPSGFVDPTAPDAVCLLQKSLYGLKQAPRAWYQRFATYIRQMGFMPSASDTSLFVYKDGDRIAYLLLYVDDIILTASTTTLLQQLTARLHSEFAMTDLGDLHFFLGISVKRSPDGLFLSQRQYAVDLLQRAGMAECHSTSTPVDTHAKLSATDGLPVADPSAYRSIAGALQYLTLTRPDLAYAVQQVCLFMHDPREPHLALVKRILRYVKGSLSIGLHIGSGPIQSLTAYSDADWAGCPNSRRSTSGYCVYLGDNLVSWSSKRQTTVSRSSAEAEYRAVAHAVAECCWLRQLLQELHVPIASATIVYCDNVSAVYMTANPVHHRRTKHIEIDIHFVREKVALGQSLRSCSSRCDCGQAADPQKRMGMQEQCFSGSA

SEQ ID NO: 180259 - protein, 234 aa, Oryza sativa
  unsure (1)..(234): unsure at all Xaa locations
  Clone ID: PAT_MRT4530_77643C.1.pep
RERGRRGSFSPRLASASGDDGERRRRATGGRRRRADDLRDIXGTKWEGLEGEGWSTAGGNHGRRRRQWWYSPARGEKRAPTVDLAGRMADAPAHGMVNAAASTRRWSDGGHGRERRKEEKGGGECGEALLGLGSGGRGRGAPDFAGDVGGGERXEGGGIQTEPRPCGARARAGGAERGRQRGRGTEWGGVGAGRAGXAAACAVSAVAGVGGWRKGKGLTGGPHLSAPEREREAG

SEQ ID NO: 180260 - protein, 286 aa, Oryza sativa
  Clone ID: PAT_MRT4530_77644C.1.pep
TDSWQSYQWRHRCRARLSALPQQLSHRSAPAVVVAATMATAAQGGDAGAAASKAAARQRRRGGATTAARGEGEEGEEEGMEWGGEGGLGRGFYRGEGKKERGRRGKGETTAARGARRRDGARHGSGDGTRAATGRRWRRRQRWRAARGGMRWAATRWHGATATIGRRGAGRRGLDGDGRRRGDGMAARGSRRRGNGTAARAARGWRCRRRLGAARRRRRGGRRRWRRAGGEATAARVVMATATAEVRRGGTRRAGRDCNAAEEGRRRRRHSPPPLESALRRRCRRI

SEQ ID NO: 180261 - protein, 170 aa, Oryza sativa
  Clone ID: PAT_MRT4530_77645C.1.pep
MLASPALAGARAFAATVSGSLGIPIPAISAPSPSQARRRASLVVVAKVKVSTPQADRIARHVRLRKKVSGTTERPRLSVFRSNKHLYAQVIDDTKSCTLVSASTMHKSLSKDLEYSAGPTVEVAQKIGEVIAKSCLEKGITKVVFDRGGFLYHGRIKALADAARENGLDF

SEQ ID NO: 180262 - protein, 57 aa, Oryza sativa
  Clone ID: PAT_MRT4530_77646C.1.pep
EGPVFEWSAPSRSERPLWGRGLGPGGDCPWGGPGKTVPGFFCPDTVPAGSLLRSCEI

SEQ ID NO: 180263 - protein, 399 aa, Oryza sativa
  unsure (1)..(399): unsure at all Xaa locations
  Clone ID: PAT_MRT4530_77647C.1.pep
HPASLSLSGADRWGPPVSPFPNLRPPTPAPTTAETTTHAAAYPAAPAPTPRPVPTSPRRRPRPRLPTRAASPQGVDSSFESPPTLSPPPTSPAKSGAPRPHSATAAAVAATTAKAAQGGDARRGGSGATASKVAXAAARQRRRGGATTAARGEGEEGEEEGMEWGGEGGDWAGVFIGERGRRGRGETTAARRRGARGGGLXGARRRDCARRGSGDGTRAATGRRWRRRQRWRAARGGMRWAATRRHGATATIGRRGMARRGLDGDGRRRGEGTAARGSRRRGNGTTARVARGWRCRRGLGATRXRRRGGRRRWRRAGGEATAARAVMATATAEGRRSGARRAGREGNAAEEGLGLPRPSLPSPNKASPHSPPPFSSFRRSLPCPPSLPRHFDAAAFTIP

SEQ ID NO: 180264 - protein, 122 aa, Oryza sativa
  Clone ID: PAT_MRT4530_77648C.1.pep
MMWALEYDPDIFSTYEHIDAATGVTPGHRQKVKSIRQFGKYERDNMKNGATSDNDGPVPISVFLVASVLKENSAKLLQEARGIDDVIRILNDVNGNLDAKKACAVALKLHRKYLKKIQGKKP

SEQ ID NO: 180265 - protein, 85 aa, Oryza sativa
  Clone ID: PAT_MRT4530_77649C.1.pep
MPLGPSRCPAPRTSPDCHVAGGASGEGTQAEPLSMRAAPQLPLTAFNARSGGLSPVLGRGRRWVPLKDGPLLSFRVKAQIVARSR

SEQ ID NO: 180266 - protein, 2073 aa, Oryza sativa
  unsure (1)..(2073): unsure at all Xaa locations
  Clone ID: PAT_MRT4530_7764C.1.pep
GLISPSSTWRPPDLRYKRDPPGRVXGIESQSQHNLHSLRDPCTNVLQYPLYPVYGYHPSTVARQVGSLGTQGSTTTSSSFVDNNVSTSLSQVLPASTMLVWTQVGEIVFPVYTTTLISTGPPRTGDENAVATNQGDSMSKNPPVETENGTSTTSKLGKDFDTAKPCPSDMNHEPTKMTSEATRSWCPIHKTKKHTLQDCWVFLNVRAEIRAYKERGIRRTSPTREVYCPIHKTKNHDLSSCKVFLGAMKAPSPKLYVPIRDNGKEQGATPTSDRFVGVIDPHEPSVLHLLEDYGSSTTSAPREVLAIDDVGTSVHANAEAGNQSTTPAQHIRAVQAILRETPYDPVLNDDLDRWTERLRESVTNLSNTFEEAATAAHKEQPPTGDANGEDPERRESPQRATPPPRGTSDLRDQINGRREARRTRDNVNRSRRHVSSQRHDNGNRGDRSNEDRDHDNHHDHNDRERWVPDNTGHGCRRNDDDDGDRCRDNSGRRRQDSRDPGRHPRNRTPEPSDPSSSSSSASSSSSDRHPRRTHDRRQPTAPNAGCRAFGRSLRDVRWPERFRPGAIEKYDGSTDPEEFLQVYSTVLYAAGADDNALANYLPTALKGSARSWLMHLPPYSISSWADLWQQFIANFQGTYKRHAIEDDLHVLTQNSGESLREYVRRFNECRNTIPEITDASVIHAFKSGVRDRYTTQELAIRRITTTRRXFEIIERCAHADDALRRKNDKPKTGGEKKPATDTSESSKKKNRKNGKRKAQAEVLAAEYANPPKSPDPQSSDTKKSWCPIHKTDKHSLEDCLVFKKSLEKHMAFEKGKRVRIVEKNEETAPHESDSAYSDSDLHVSHIXAVPQRRYPIVIEPTIRNIKVARVLIDGGSSINLLFASTLDAMGIPQSELTPTDQPFHGITPQSSSRPLGKITLPVTFGQANNFRTEQITFDVAEFDTAYNAIIGRTALAKFMAASHYAYXVLKMPRPKGTFTIQGNAKLAVQCDKRSLDMVEQTPSPPATTEPPRKMTKTNKTPKPDGAIKIVPLSSANPDKTELALITFLRDNADVFAWQPSDMPGVPREVIEHKLMVQPDAKPVKQRLRRFAPDRKQAIREELDKLLKAGFIREVLHPEWLANPVMVRKANGKWRMCVDFTDLNKACPKDHFPLPRIDQLVDSTVGCELLSFLDAYSGYHQISMAKEDEEKTAFITPFGVFCFVKMPFGLITAGNTFQRTVQGALSNQLGNNVEAYVDDIVVKTKTGDSLIDDLRETFDNLRRYRLMLNPEKCTFGVPSGKLLGFLVSGRGIEADLEKIKAIENMKSPTRLKEVQKLTGCMATLSRFVARMGKRGQPFFALLKKQDKFVWTQEAEEAFIALKRYLSNPPVLVAPQPNEELFLYIAATPYSVSTVIVVXEREKVHRPVYYVSEALHDAKTRYPXIQKLLYAVIMTSRKLRHYFQAHRVTVVSSFPLGEVVTNKDVVGRIAKWVVELSQFDVHFVPRTAIKSQVLADFIADWTMPDNKSDNQGDNETWTMAFNGALNSQGARAGFILTSPSGDQFKHAIHLNFRATNNTAEYEGLLAGIRAAATLEAKRLIVKGDSELVTNQVHKDYKCSNSELSKYLAEVRKLEKRFDGIEVRHVYRKDNVEPDDLARRVSRRESLEPGTFLDILMKPSVKEVSGEVSPNTPDISSEVTEAERAIADIETTDDWRIPLIKFISSEELPEDDPEAEKITRKAKIYCMVDNDLYKKVPNGVLLKCVSTDDGRHLLLDIHEGICGSHAAGRTLVGKAFRQGFFWPTALKDSCDMXTHKATRASAPDYSSDLAILVLGARYTWAIPTRTGRLQIPIXVAIDKFTKWIEAIPTGEIKADNAIKFIKGIFCRYGLPHHIITDNGSQFISADFQDYCIGLGVKICFASVSHPQSNGQVERGNDIVLQGMKTLLXAVRTTPTTSNKETPFFLVYGSEAMLPGELQHQSTRVQKYSDENQEEQRDIDVNLLEEHRERVAVRAASYQQILRRYHEKRIRARILSIGDYVLRRVQSQAGRNKLSPKWEGPYTITQVLRPGAFKIADGDGRELANSWNIDQLRKFYV

SEQ ID NO: 180267 - protein, 133 aa, Oryza sativa
  unsure (1)..(133): unsure at all Xaa locations
  Clone ID: PAT_MRT4530_77650C.1.pep
MADSAGRDRSGLGPGKRKERVRPESTASRRRAHGRGVKRHGRRLARRGCSSASRRWNRARERREGEASVRERKAGNGRGEMRCAPCQFGEGEGWEREXLSPGFGRTRAARLGHARWLAGPSGSAATGAAEPQG

SEQ ID NO: 180268 - protein, 53 aa, Oryza sativa
  unsure (1)..(53): unsure at all Xaa locations
  Clone ID: PAT_MRT4530_77651C.1.pep
FFFFFFFFFFFFFFXFXXILMLSQCMLYDVXGCTFSSLNRLMKGLVVRXXXLX

SEQ ID NO: 180269 - protein, 217 aa, Oryza sativa
  Clone ID: PAT_MRT4530_77652C.1.pep
MSYCDNNAEISYINEDGDRRLLAKPIKYFYEMQELFSGSNANGSLAIDQQTCYNIDRKFDSSDHEGLNDMSTYAHPINIAKEDSDTLPSPTCPDNFSPGTSRVSKKRPRDVKSPSKRQPKPKSRFTDVTEKIGNTMDRLVNQLASPPPPPMPQLRDPYATMWKRMDALPIGSKDKVVVGNYLGRQEKEGVRGFLAASCDTTLETGVPFHVRPRWCVG

SEQ ID NO: 180270 - protein, 87 aa, Oryza sativa
  Clone ID: PAT_MRT4530_77653C.1.pep
VKSGLEERGCAHLMRSREDHAKSVDVADLGVGLQLQSPDIPKDKHADSTLADTLKNYFASCELSMACSYIAMSDDDELPEAMLSWSC

SEQ ID NO: 180271 - protein, 550 aa, Oryza sativa
  unsure (1)..(550): unsure at all Xaa locations
  Clone ID: PAT_MRT4530_77654C.1.pep
MHRVLAWISRAALRFRRRHCLLVLPFHSIPHTSERAGKVLEGSVRVFWSAMASTVTTPSRPVSAGCHRRSPRRSAPVVLSLGGGPRRRTPSSTSCSALASPAKQGTAKLPPPQPTASRTAAADAERERERTDYNEVAAALESIYKLSPAVVEEKDADEEDEKSKQTKRKRKGRVGRSRNATVTGEEQPEKEAGXRMDLGKRVEMRRREEEEAGGGAGKVEDEERGFEEMLLREHAVSTDMGSLDWKRMKIPPVLTSAQSIRLFRIMQPMKAIMEMKENLENEVQSEPNDAQLAEAMNMSVLQMRRHLEVGRAARNKLIKHNLRLVLYTINKYYPDMSNDERFDDICQAGANGLITAIDRFEPKRGFRISTYALFWIRHSIVRAITLSNFTRFPFAMESERQEIHRAREELAFELGRAPTEEEVMKKVGLSPARYRDVVRMTRPTYSLHARNRVTQEELINEVTDDDAIGVDTSSHNTLNRFAIDDLLDSLKPKESVVIRQRFGLDGRGKRTLSEIAGNLNISREMVRKYELKALMKLKHPTRVEYLRRYM

SEQ ID NO: 180272 - protein, 75 aa, Oryza sativa
  Clone ID: PAT_MRT4530_77655C.1.pep
LIRKKYHSCPYSFDLVSFFFFLTLFVSLYSYKICDENLTKICDKTDSLTYFFRSIWSCSFSKCSALCCGTTTGYD

SEQ ID NO: 180273 - protein, 26 aa, Oryza sativa
  Clone ID: PAT_MRT4530_77656C.1.pep
MTYSNTRRGTFKRQGDTKLRSQIHTY

SEQ ID NO: 180274 - protein, 85 aa, Oryza sativa
  unsure (1)..(85): unsure at all Xaa locations
  Clone ID: PAT_MRT4530_77657C.1.pep
TRDDCPSPSPSPRRXRRPSLPVGLFVSIGDGTLSTLKIQRRXTATTPAASCGGSNGDVDIADPASPTAPAASRGWIRFYFLPRHM

SEQ ID NO: 180275 - protein, 232 aa, Oryza sativa
  Clone ID: PAT_MRT4530_77658C.1.pep
MPKKMGVNTKAEAARERRSAAEADRRDRDARAKEEAYWQAAEGPKSRSARRREEDAEKRAEAAARRAENRRLAELEQQQLAAAARRPDRKAARVGGPVVPKVTEAELLRRREEERIRLEREAEAAKKRQARTAEEEEYERVVLVANTNRDDSIIEARSVEDAIVKMSIAAEPALPPDRHPERRLKVSYKAFEEAELAKLKEEKPGLTLHQYKDMIWKLWKKSPDNPLNQVQP

SEQ ID NO: 180276 - protein, 132 aa, Oryza sativa
  Clone ID: PAT_MRT4530_77659C.1.pep
MAAAPDLAAGFFLLLPPSSRMIDVPPAAVDALPSPCRDGEGPPAAGRRSSRRKLGRGEPSAGGPGEGRPDTDVLGRGVSRHATRFPRWLGGAMVLSGGVCWWWSMSASVGGPQQLHDDNVRYGGCDGGCRIW

SEQ ID NO: 180277 - protein, 469 aa, Oryza sativa
  Clone ID: PAT_MRT4530_7765C.1.pep
MNDAVPGHRHHHPLSVFLRDARLAFRWDELGREIMGIAVPGALALMADPVASLVDTAFIGHIGPVELAAVGVSIAVFNQVSRIAIFPLVSVTTSFVAEEDATSSDREKYEINGENEFNVSDSEMEELVSHEEASAAPSKSSFETDSSDVKIEHKRKNIPSVSTALLLGGVLGLLQALLLVICAKPLLGYMGVKQGSAMLMPALKYLVVRSLGAPAVLLSLAMQGVFRGLKDTKTPLYATVAGDATNIVLDPIFMFVFQYGVSGAAIAHVISQYFIASILLWRLRLHVDLLPPSFKHMQFSRFLKNGFLLLARVIAATCCVTLSASMAARLGSVPMAAFQICLQIWLASSLLADGLAFAGQAILASAFARQDHSKAAATASRILQLGLVLGLLLSIFLGIGLRLGSRLFTDDQDVLHHIYLGIPILVAIVSIIFIVTLASYNGFVGIWIALTVYMSLRMLAGFLRINTTL

SEQ ID NO: 180278 - protein, 56 aa, Oryza sativa
  Clone ID: PAT_MRT4530_77660C.1.pep
MEKTDLKGGGLDDLLSLLCNFKRQQQFDSTKISYVLLTAGDSCSMCDGRSKSSSLH

SEQ ID NO: 180279 - protein, 63 aa, Oryza sativa
  Clone ID: PAT_MRT4530_77661C.1.pep
WPWRRRRRWPRRLWRAERSSSSPCSGTPRPMPLVYSNDTRLRGRYNRRGDLYKLGDRMMEAAT

SEQ ID NO: 180280 - protein, 115 aa, Oryza sativa
  unsure (1)..(115): unsure at all Xaa locations
  Clone ID: PAT_MRT4530_77662C.1.pep
QGSRAISDLNEFIFEXXDYPLVDYVLVNKEQYRLQPIGXRAITYQIRGPNLYKNPCLHLFYHNLAYTLVPTISIPCKYHSRNLKRRHLSFFPTSSAGGGRGQRGARRRRPRPTPG

SEQ ID NO: 180281 - protein, 236 aa, Oryza sativa
  Clone ID: PAT_MRT4530_77663C.1.pep
MKGEFVPPWLELLLSTQFFNTCTSHHNSPRNECNLFCIDCQAPEAAFCYYCRSCHHSSHRVIQIRRSSYHDVVKVSELEDILDISDVQTYVINSARVVFLNERPQLRGCGVLAIKSSPSSLSSYNCETCSRVLLDAFRFCSLGCNLIGIKNDVETVVANDGIAHNDKDIEIDGSNGTANTNGTGKGIEICGNNGTIANTGNEDEICSDASKNKEILSSTRVVRHRRKGIPRRAPFF

SEQ ID NO: 180282 - protein, 55 aa, Oryza sativa
  Clone ID: PAT_MRT4530_77664C.1.pep
SAVAEQGWVNAACPAFFRSYRLDTSYICRPDRRWLWIAALMNLMSFLPRTQTSPF

SEQ ID NO: 180283 - protein, 110 aa, Oryza sativa
  Clone ID: PAT_MRT4530_77665C.1.pep
MVVMIFTLPVPSVELISEELVDGFHFDVTLGMKRYVLCCLPPSGFSQRDAQTALGRRRGHHGFVFVEGRSHLVVGYGFKYKVQQHDYRNNIVPWGDEHYDLLPPYEGWSD

SEQ ID NO: 180284 - protein, 319 aa, Oryza sativa
  Clone ID: PAT_MRT4530_77666C.1.pep
WRPPRPQGQQQQWPPRRWPRAAPPSRRWRGEGSSRSARNACGARSRAVRSGGFSGVQTHVAAVEQALVQDATKLEAPVVIVTGASRGIGKATALALGKAGCKVLVNYARSSKEAEEVSKEIEACGGQAITFGGDVSKEADVDSMMKAALDKWGTIDVLVNNAGITRDTLLMRMKKSQWQDVIDLNLTGVFLCTQAATKIMMKKKKGKIINIASVVGLVGNIGQANYSAAKAGVIGLTKTVAREYASRNINVNAIAPGFIASDMTAELGEDLEKKILSTIPLGRYGKPEEVAGLVEFLALNPAANYITGQVLTIDGGMVM

SEQ ID NO: 180285 - protein, 66 aa, Oryza sativa
  Clone ID: PAT_MRT4530_77667C.1.pep
YCPAGGRCYSGRPDASAYRASTDANKPLPRREKYGWTAFCGPVGPSSQAVGGKCLLVTNTVTWAHI

SEQ ID NO: 180286 - protein, 199 aa, Oryza sativa
  Clone ID: PAT_MRT4530_77668C.1.pep
MARRRIAAHGESAATGYRRSASRVLGLPRSKRRQKAGGAWDWEGSGPSRQLGLPRLGAQCSAFLYPVCDQSQTGQITGNCSADLGSEVVNMKRVLMPFGVNAFDQLYKSSSSPTNSIAWKLSLQLPPSAVLPPLPSTILLLLRLHHPMTVIVLHGVFHTRLLLTRFTTLLILDILPQVPQVPHDNPNPASARLGQRIKT

SEQ ID NO: 180287 - protein, 609 aa, Oryza sativa
  Clone ID: PAT_MRT4530_77669C.1.pep
MVERRASPAAAAAGGRRRCGVRVGPTRLEGMPAAWPAVAAVKAKWPVSGGALSQMILGRCWGRGVTAVEPVGGDGVVRWDGAGDANRFRFDLDQPSAAAARAARPERGVSFSILYCGVEEKEKGFQEQGRGKDVVKLEEIGTAMISLEECCWEMQLQQQQKRGATQQQLVVVPIRVRKDGWASDAMLYVNVELVDANTPSENIGRTVSFRESRARTTTPAPTMRDNRKSLEAGTYHEVLDLKQLLDLADREHKVAVYSRSKRNSDSSSVSSMSSVSSSSTISISSASSSGGASPEPGLSSKRRLLPWRRKSRDFDKRSSESLSQELPMKYMDDDLAGSWETREFTSRDSETKLRTPVFFASIDQRDDSAGGESACTALVAVLAAALHANHPTMPTRPELDALIRDGSSEWRRLCDDEAHMAAFPNRHFDLETVLAARARPIAVQHDRAFVGFFQPESFASLSGAMSFDDIWREIAAAAGGEPGRADVYIVSWNDHFFVLKVEGDCYHVVDTLGERLFEGCDKAYMLRFDATSEMRSVSPPPSSPSPEEEVIVTGKECCREFIKRFLAAIPLREELEMERKGCADAPHRRLQIEFHFTVLKEEEQDQARR

SEQ ID NO: 180288 - protein, 1010 aa, Oryza sativa
  Clone ID: PAT_MRT4530_7766C.1.pep
MARRAPLRCLFLSLVALFALLPFPPAAAAPCHPEDLLALRAFAGNLSAGGGGAGLRAAWSGDACCAWDGVACDAAARVTALRLPGRGLEGPIPPSLAALARLQDLDLSHNALTGGISALLAAVSLRTANLSSNLLNDTLLDLAALPHLSAFNASNNSLSGALAPDLCAGAPALRVLDLSANLLAGTLSPSPSPPPCAATLQELYLASNSFHGALPPTLFGLAALQKLSLASNGLTGQVSSRLRGLTNLTSLDLSVNRFTGHLPDVFADLTSLQHLTAHSNGFSGLLPRSLSSLSSLRDLNLRNNSFSGPIARVNFSSMPFLVSIDLATNHLNGSLPLSLADCGDLKSLSIAKNSLTGQLPEEYGRLGSLSVLSLSNNTMRNISGALTVLRACKNLTTLILTKNFVGEDLPDDGIAGFDNLEVLALGDCALRGRVPEWLHQCKRLEVLDLSWNQLVGTIPEWIGQLDNLTYLDLSNNSLVGEIPKSLTQLKSLVTARRSPGMAFTNMPLYVKHNKSTSGRQYNQLSNFPPSLFLNDNGLNGTIWPEFGNLKELHVLDLSNNAISGSIPDVLSRMENLEVLDLSSNNLSGSIPSSLTDLTFLSKFSVAHNHLVGPIPNGGQFFTFSNSSFEGNPGLCRSSSCDQNQPGETPTDNDIQRSGRNRKNKILGVAICIGLVLVVLLAVILVNISKREVSIIDDEEINGSCHDSYDYWKPVLFFQDSAKELTVSDLIKSTNNFDQANIIGCGGFGLVYKAYLPDGTKAAVKRLSGDCGQMEREFRAEVEALSQAQHKNLVSLRGYCRYGNDRLLIYSYMENNSLDYWLHERSDGGYMLKWESRLKIAQGSARGLAYLHKDCEPNIIHRDVKSSNILLNENFEAHLADFGLARLIQPYDTHVTTDLVGTLGYIPPEYSQSVIATPKGDVYSFGVVLLELLTGRRPMDVSKAKGSRDLVSYVLQMKSEKKEEQIFDTLIWSKTHEKQLFSVLEAACRCISTDPRQRPSIEQVVAWLDSV

SEQ ID NO: 180289 - protein, 155 aa, Oryza sativa
  Clone ID: PAT_MRT4530_77670C.1.pep
MGWLTASGGGALEADPMEVGGGDPGSVKSGASWVDLTAARHHRLSLPSPPTESDARDALAAASGVRGLSAGDEWRERRQIRSSPHFPILFPADSGSSTTSPPPALTKGGKGIRVWGAVSTSYGVPNAAPCSVSLPKIAEGRVPLEENARLSQEPA

SEQ ID NO: 180290 - protein, 196 aa, Oryza sativa
  Clone ID: PAT_MRT4530_77671C.1.pep
MAAAGRVLALLAVLMAVAAHGEAASVVVGLAKCGDCTRKNMKAKAAFKGLRVAIKCKNGADGEYETKAAGKLDGAGAFRVPLAADLRGADCVAQLHSAAHNNAACPGQEPSRVMQLSERTFVAVAGKTHYVSPVCASATICEPIKKHFFDHFHHNKPAPAAPSTKPAPKPHPDQPPHPKPTPTYGTPSPYHPPARN

SEQ ID NO: 180291 - protein, 564 aa, Oryza sativa
  Clone ID: PAT_MRT4530_77672C.1.pep
MEASDEDRPLIHHLPPQEQCSKYTCDGTVNSDKKPALKQSTGHWRACFFILGAQFAETLCFFMVSKNLVMYLTSALHESNIDAAQSVSIWIGTSFFTPLIGAFLADTYWGRYWTTVISLFIIIIGMLIVTVSSSPLFLNSSYYNWNICRATVYTGLYLTAVGSGCMKPCIPAFGADQFDSADPVERLAKGSFFNWYYFSMNVGSLLSTTLLVWGGANIGWSVGFAIPMLLSGFGLALFFAGRKVYRYKKQGGSPLTRVSQVVVAAVRNHRLKLPDDSSLLHEVSKVTEDDYRTQLTTQFRFFDKAAILSDEISPAQWSPWRLCTVSQVEELKILLRMFPVWVSMVVFFVVTAQITSTLIEQGMAMDGRVGPFTLPAASIATFDVISVLVWVPVYDTVLVPLARRVTGKDRGISHLQRIGVGLALAAVAMAYSAVVEARRLGTAPAPVSIMWQAPSYLVLGVAEAFSVIGMMEFFYEQSPESMKSLCTALGQLAIAVANYLNSGVLVVVAAATTRGGGAGWIPDNLDEGHLDYFFWMMAVVSVLNLLHFLHCSIRYRANNNTLSS

SEQ ID NO: 180292 - protein, 50 aa, Oryza sativa
  Clone ID: PAT_MRT4530_77673C.1.pep
LYCVFCEQKDGDVARWAGMKRAQLSIKYPQFHSFYTGIIKRDIVCQKFRT

SEQ ID NO: 180293 - protein, 41 aa, Oryza sativa
  Clone ID: PAT_MRT4530_77674C.1.pep
SILFAGADDLQTLQLKRICYLKANENQTDTETEPLLKLIHP

SEQ ID NO: 180294 - protein, 946 aa, Oryza sativa
  unsure (1)..(946): unsure at all Xaa locations
  Clone ID: PAT_MRT4530_77675C.1.pep
MGSVDLIAACLDSIRQIGDEIADALVYLDAGTLEAFQFIGAFPLLLELGARAICSLENASPLDAAAEWHSSFAHPARKIVVITSRLLSDAHRYILRCLGNHGTISHCTVLTAISEVGHSAYXDSPFGPDAFREYETLLTQDHEELLKKYEKSDEHKDTTFYTGKDFTSDGGRYSNWESGVHYGSNSESSPTKKDLFADESSQLETKGKRLSVTVTHFPMIFSPISSRTFVLPSEGTMAESCLSNHHEDSLSPGLPPISTGRSFDGDEIPPGVTLTAQFLYHLASKMDLKLDIFSLGDTSKVIGKLMMDMSSLYDVGRNKRSAGLLIVDRTLDLLTPCFHGDSFLDRMLSSLTRKEGTSSYFVSKNPQTPSKHSEATVKRIPLDIKVPFEKVFSKEEPKSRTSMLPESIMSFVSGWNSAEVESEVTWLPDYADKAHDDKLSSQHGSLNGSFLSNYAGVCYLESLLDRGAKDGLMLIKKWLMEALQHEKLSFPSKGRQGAASVSELHSMVQMLSRDQLSLVRNRGVIQLALAAEMALQEPQSSRWDAFTSAERILSVTSAETTQSLAIESHKQANKTESSQGLLSFQDVLLLTIIGYILAGENFPTSIAGGPFSWEDERSLKDIVVDSILDRPSSVKLRFLVGLENELEAKARPKDGDKSNDSIEASKSTDDFDDQWDSWGDDDDNTDDQKDEAYGDMQLKLEVRDRVDQLFKFFHNLSSMRLRNQTLGEGLAALSRFETDIYSRKGLLYKLLLAVLARYDIPGLEYHSSAVGRLFKSGLGRFGLGQSKPSFGDQSILIVFVVGGINALECTGSVALSEPSVGTRFLSSKYQVREVMKAISDSSRPDVELILGGTTLLTPDDMFELMLGSSSFRVEATIEVAISELVSGFDLSVRCDLPMLEGHGEVQLFSGIIGEPCSLRRFVMAFSLDIVMHLKFIHGRSKGLQFC

SEQ ID NO: 180295 - protein, 958 aa, Oryza sativa
  Clone ID: PAT_MRT4530_77676C.1.pep
MGSVDLIAACLDSIRQIGDEIADALVYLDAGTLEAFQFIGAFPLLLELGARAICSLENASPLDAAAEWHSSFAHPARKIVVITSRLLSDAHRYILRCLGNHGTISHCTVLTAISEVGHSAYVDSPFGPDAFREYETLLTQDHEELLKKYEKSDEHKDTTFYTGKDFTSDGGRYSNWESGVHYGSNSESSPTKKDLFADESSQLETKGKRLSVTVTHFPMIFSPISSRTFVLPSEGTMAESCLSNHHEDSLSPGLPPISTGRSFDGDEIPPGVTLTAQFLYHLASKMDLKLDIFSLGDTSKVIGKLMMDMSSLYDVGRNKRSAGLLIVDRTLDLLTPCFHGDSFLDRMLSSLTRKEGTSSYFVSKNPQTPSKHSEATVKRIPLDIKVPFEKVFSKEEPKSRTSMLPESIMSFVSGWNSAEVESEVTWLPDYADKAHDDKLSSQHGSLNGSFLSNYAGVCYLESLLDRGAKDGLMLIKKWLMEALQHEKLSFPSKGRQGAASVSELHSMVQMLSRDQLSLVRNRGVIQLALAAEMALQEPQSSRWDAFTSAERILSVTSAETTQSLASELRDFINTSTSVESHKQANKTESSQGLLSFQDVLLLTIIGYILAGENFPTSIAGGPFSWEDERSLKDIVVDSILDRPSSVKLRFLVGLENELEAKARPKDGDKSNDSIEASKSTDDFDDQWDSWGDDDDNTDDQKDEAYGDMQLKLEVRDRVDQLFKFFHNLSSMRLRNQTLGEGLAALSRFETDIYSRKGLLYKLLLAVLARYDIPGLEYHSSAVGRLFKSGLGRFGLGQSKPSFGDQSILIVFVVGGINALECTGSVALSEPSVGTRFLSSKYQVREVMKAISDSSRPDVELILGGTTLLTPDDMFELMLGSSSFRVEATIEVAISELVSGFDLSVRCDLPMLEGHGEVQLFSGIIGEPCSLRRFVMAFSLDIVMHLKFIHGRSKGLQFC

SEQ ID NO: 180296 - protein, 86 aa, Oryza sativa
  Clone ID: PAT_MRT4530_77677C.1.pep
MGSFTDLVNLNLFDTTEKNIGEYIWIGGSGMDLKSQGWTFFGPGNGPKKVAKGDYQGFKTRPGPGEDRGGIPDPPGFFKGPFQEGN

SEQ ID NO: 180297 - protein, 470 aa, Oryza sativa
  unsure (1)..(470): unsure at all Xaa locations
  Clone ID: PAT_MRT4530_77678C.1.pep
MGLESSATFSGSSRRASAQPCAGLPAAAPAAPTACRLTAPLPASRHAAYTCKPLQQQQQQQQSGSLGFPLIGQSISLLRALRSNTDYQWYQDRIKKYGPVSKMSVFGSPTVLMAGPASNHFVFSNQDLIFTQTKAINVLIGCSIMTLSGDELKQVRSALQGYLSPEMVTKYVWKMDEEVRRHIDLNWVGHKTIKVAPLAKRLTFNIISSVMFGQGAAPFREALAIDFEKVVRAALSIPVNIPFTKFNKGLSASRRIRKLLRQIAHEREAAFQQGYCSSADDFFTYMLALRSEGKHSLTVEDIVDNAILLLIAGYETSSVLITFLIRQLANEPDILGKITDXQEEIARSKGPNKPLTWDDVSRMKYTWKVALETLRTVSPIFGSFRTATKDIEYRGYHIPKGWQVSIFLLTNSPFLLLDIFSIPVMTYVSLYFPFPSAIFIFLPSQSCDAGLPCSKYHTFGRESFQRSDQI

SEQ ID NO: 180298 - protein, 331 aa, Oryza sativa
  Clone ID: PAT_MRT4530_77679C.1.pep
MDAAGRRLARVTAHLLPSSLPLPLASAPTLAPSPAASPASDSYRRVHGDVPSEPPEWRAATDESGKGFVDILYDKAVGEGIAKITINRPDRRNAFRPLTVKELMRAFEDARDDSSIGVIILTGKGTQSFCSGGDQALRDADGYVDFDSFGRLNVLDLQVQIRRLPKPVIAMVAGYAVGGGHVLHMVCDLTIAADNAIFGQTGPKVGSFDAGYGTSIMSRLVGPKKAREMWFLSRFYTADEADRMGLVNVVVPLADLERETVKWCRKILRNSPTAIRVLKSALNAADDGHAGLQELGGNATLIFYGTEEAKEGKNAYMERRRPDFSKFPRKP

SEQ ID NO: 180299 - protein, 223 aa, Oryza sativa
  unsure (1)..(223): unsure at all Xaa locations
  Clone ID: PAT_MRT4530_7767C.1.pep
RKRKGFYSNFKRVYCVSRGEGARGPGPXPRGSLTVHGGLGAPGLTXDAVGPTRQPHLRARAADGRAPRGSNSARPRAAKPAQPAGGSARAPMVAGGGHRHGGAAAERGEGKGENRRRSTTHPRSTATTKKVAGAKEGGGAAWVDGVDGVPAVGDRNGGVDEVVEDAAKPKEAAPRWEVVRGDDGDGPELDGDGGERERRRELDSGEEEGRREAETDGGGAGRV

SEQ ID NO: 180300 - protein, 38 aa, Oryza sativa
  unsure (1)..(38): unsure at all Xaa locations
  Clone ID: PAT_MRT4530_77680C.1.pep
LERTRVKNGLLRFDQVXLMPADTYNVNGILLELLSMLL

SEQ ID NO: 180301 - protein, 58 aa, Oryza sativa
  unsure (1)..(58): unsure at all Xaa locations
  Clone ID: PAT_MRT4530_77681C.1.pep
SKMDMGGTEEWAKYNDXEAMPKAAFLFGXEMQDCRKTRKQNKDQKLTNDLHKINKILA

SEQ ID NO: 180302 - protein, 82 aa, Oryza sativa
  unsure (1)..(82): unsure at all Xaa locations
  Clone ID: PAT_MRT4530_77682C.1.pep
MAIWTVRHGTTQARPCLGXAXSGRHGPTDTPGHAVPAHGRHTRPNTTRAGPKAQWLIMFPHRKSLFLVPQLCGLKMYFLHPK

SEQ ID NO: 180303 - protein, 72 aa, Oryza sativa
  Clone ID: PAT_MRT4530_77683C.1.pep
MCCSAVAVMKWEALLPNDTFLIVASSDGVFEKVTMQDVCDLMLYVKLGVKQELGSFALTQQNLADYVVDLSL

SEQ ID NO: 180304 - protein, 229 aa, Oryza sativa
  Clone ID: PAT_MRT4530_77684C.1.pep
FDAWGLEVPQNGTYFEWLKIVSSLATPAYTSLSQVIGPILPNTFPALSFANTVPGSTFVQAPVGMIPTSLSITGFTFTFWINRAVDVSNQNIFSWQDTNLQNHIILQESGTDRFTFRISNSTFLSSFDLLSVGKNRWTHWTIMNTNVACVQTNTRPGVTVTWHEYDLQTTTLRPSVSACLERPTDFNRPNAIFGREGQFSLGDFRFYGRPISDAIRTCIYTTGHTCEVQ

SEQ ID NO: 180305 - protein, 53 aa, Oryza sativa
  Clone ID: PAT_MRT4530_77685C.1.pep
YRTYMDQIELFVHRYKKSVVGHCKDGLSKLFCAVGAWFEHLILHGETRATACR

SEQ ID NO: 180306 - protein, 148 aa, Oryza sativa
  Clone ID: PAT_MRT4530_77686C.1.pep
VVLKASGHVDRFTDFMVTDEKTGDCYRADHLLEAAIEAALEDAKNPLSPEARKEAEQLLAGVGELGLEALHEALTKFSVVAPDTKNPISRPFPFNLMFKTSIGPRGDLVGYLRPETAHGICDNFRDLLYFNGRKLPFAAAQIGNAYRN

SEQ ID NO: 180307 - protein, 725 aa, Oryza sativa
  Clone ID: PAT_MRT4530_77687C.1.pep
MATVPTPSEAHGGATPTAADVEMVEASELRRRGKPSGDRATGPSRDGAAAAAEEAAAPSVERVFADRPVPSWREQLTVRAFVVSFFLVIMFSVIVMKLNLTTGIIPSLNVSAGLLGFFFVRLWTAAIERVGLLRQPFTRQENTVIQTCVVAGYDIAFSGGFGNYILSMSERIAGLGTEANNAQNIKNPHLGWIIGFLFLVSFIGLFGLVPLRKVMIIDYKLTYPSGTATAFLINGFHTPHGAKIAAKQVKKLGIFFILSFFWGFFQWFYTATDDCGFHKFPSLGLQAFQHKFFFDFSPTYVGVGMICPHIVNVSVLLGGILSWGIMWPLIAKKRGDWFSADLPDGSLHGMQAYRVFIAIALILGDGLYNFLKVLIRTIAGFISMVQNNSKGMLPVSDNGMSMSTAEEVSFDDERRTEIFLKDQIPKSVAYGGYVVVAALSIGTLPEIFPQLKWYYILVAYIVAPVLAFCNAYGSGLTDWSLASTYGKLAIFVFGAWAGLSHGGVLVGLAACGVMMSIVSTASDLMQDFKTGYLTLASPRSMFISQVIGTGMGCVIAPCVFWLFYKAFDNIGISGSDYPAPNAVVFRSIAILGVDGFSSLPKNCLNLCYAFFAAAIVVNLIRDLVPHKVSRFIPIPMAMAIPFYIGSYFAIDMFIGRVIFFVWQRVDRAKADAYGPAVASGMICGDGIWVFPQSVLALAKVKPPICMKFLSRWTNDKVDAFLGENP

SEQ ID NO: 180308 - protein, 1180 aa, Oryza sativa
  Clone ID: PAT_MRT4530_77688C.1.pep
MASSSQSPAVGSLGGITVTEKLGKGNYLIWKVQVLAVIRGARLDGYLTGAIRAPSPTTIIKKSDKDVEVPNPAFDEWIANDQQVLGYLLTTMSRDVLSKVATCGSAAALWSVVEGMFSSATRARSINTKITLTNTKKGDLSVAEYVGKIRALADELATSDKLVDEEDLISFIIVGLDEDFEPIISSLVSKSEHVSLGEAYSQLLSFEQRMKLRQEHSANLAHRGRGRGQQQQGRGCGNQGNQQQQQCGRGGKNCGRGRGNTSYQRQGGNNTDNRPKCQLCYKRGHTVIDCWYRYDEDFVPDEKYAGTAASYGVDSNWYVDTGATDHITGELEKLTIRDKYKGQDQVQAANGADQAMKEILLRGRCRGRLFPLPSSSPSAHQDKEALAATTPSLERWHCRLGHPSYAIAEKVVRNHDLPVSAESNKMLLDDHVSYYPAIPANLSPAENLEQNATANTENDAAEDAADSGAAEHQAADNISDAAQEDSSPLSAAHHSAHEDAADESSAAPSPADQSCQPQAQGSSAPGGEPQRPATRPVTRLQKGIRKEKIYTDDTVKYGFLTTTGEPRDLAEALHDTNWKHAMDAEFTALLHNKTWHLVPPQKGKNVMDCKWVYKIKRKQDGSLDRYKVRLVAKGIKQRYGIDYEDTFSPVVKAATIRLVLSIAVSRGWTLRQLDVHNAFLHGILEEEVYMKQPPGYEDKANPGCICKLDKALYGLKQAPRAWYARLSQKLQQLGFQGSKADTSLFFYNKQGLTIFVLIYVDDIIVASSRQDAVLTLLQDLQKEFALKDLGDLHYFLGIEVNKISNGIILTQEKYANDLLKRVGMIDCKPVSASLSTSEKLTLHEGDLLGLNDASNYRSVVGALQYLTLTRPDIAFPVNKVCQFLHAPTTIHWATVKRILRYLKQCTKLGLKISKSKSMLVSGYSDTDWAGNVDDRRSTRGFAVFLGDNLVSWNARKQATVSRSSTESEYKVLANATAEIMWIQTLLAELGVSSPLMARLWCDNLGAKYLSSNPVFHARTKHIEVDYHFVRERVQRRLLEVDFVPTGDQVADGFTKALSEVTIASCPLTFFFSLLLANACTPPTLPETGRVVEVEGQITRFHAPSFPSCRAQATTLSCSAAGHATILRCRGPRRLLSPAAPPRVAAVVATVARSCSRHHHRKLLQALSSGVVIAVAMVGRG

SEQ ID NO: 180309 - protein, 94 aa, Oryza sativa
  Clone ID: PAT_MRT4530_77689C.1.pep
MDADWHFGPFSVFWNLGIADRLPESQWKFGVLCLSAIDFLKHAADLNTRWLKRLPSNFWATWVHPLTYKVHVKSLWILSCVGGSWGIAFVENRK

SEQ ID NO: 180310 - protein, 124 aa, Oryza sativa
  unsure (1)..(124): unsure at all Xaa locations
  Clone ID: PAT_MRT4530_7768C.1.pep
GIFIRPCPKSPLTIIRECFIGVLADKLSRHCIGLQGLHPIGFYWIILLLYXYYHQPITFILLFASSVGFYIRIIADSSXKPYCYRLDQTDWHARISSTFGPTLELSRSPRLVCVFRVNTSPPSP

SEQ ID NO: 180311 - protein, 106 aa, Oryza sativa
  Clone ID: PAT_MRT4530_77690C.1.pep
RTRGFFASFALGWAITTFSGACAYPFDTLRRRMMLTSGQPLKYKNAFHAAKQIVSTEGFFTLFRGVGANILSGMAGAGVLAGYDQLHRFAGQHGYNFESKMKGALK

SEQ ID NO: 180312 - protein, 76 aa, Oryza sativa
  Clone ID: PAT_MRT4530_77691C.1.pep
FTSPQQDYITHPMHPQGNTKQQALVRQQPAMLSKSATSHTMVQPHGLCHIQSLQLHQMPNIHQQLNSTLRATPVLA

SEQ ID NO: 180313 - protein, 428 aa, Oryza sativa
  Clone ID: PAT_MRT4530_77692C.1.pep
MKFPKRYAIVLLTFMCTNVCYIERVGFSIAYTVAADAVGTNQANKGMILSMFYYGYVLSQIPGGWAAQRLGGRLVLLLSFVLWSSICAVVPLDPNRVILLVLSRLLVGVAQGLIFPSIHTVLAQWVPPQERSRSVSLTTSGMYLGAACGMLLLPSLVKNMGPQSVFSVEAMLGVAWLLIWFKFASDPPRTDLPKVASKDKMKVQTGGIMAPRTVKIPWARILFSLPIWAIVVNNFTFHYALYVLMNWLPTYFKLGLQLSLQDMGFSKMLPYLNMFLFSNIGGVLADHLITRKILSVTKTRKLLNTVGFVVSAIALMALPLFRTPSGAIFCSSVSLGFLALGRAGFAVNHMDVAPKFAGIVMGISNTAGTLAGIVGVGLTGRILEAAKASNMDLTSSESWRTVFFVPGYLCIFSSFIFLIFSTGEKIFE

SEQ ID NO: 180314 - protein, 51 aa, Oryza sativa
  Clone ID: PAT_MRT4530_77693C.1.pep
LTGRILEAAKASNMDLTSSESWRTVFFVPGYLCIFSSFIFLIFSTGEKIFE

SEQ ID NO: 180315 - protein, 43 aa, Oryza sativa
  Clone ID: PAT_MRT4530_77694C.1.pep
MARLGCLGLGLRMMVASSAPLPSRRLRLGGPVSPPLPPWFLLV

SEQ ID NO: 180316 - protein, 297 aa, Oryza sativa
  Clone ID: PAT_MRT4530_77695C.1.pep
MPIPSPGGAPPPPMHRRPSSRRKDPLEYKEYIVLLRPWPDAATTGMDDDGATAGGKPQLVRSYKHIVDGFTAIAVSKKPDFRRCFQDGIACLHCWFKQEGGWQPCLIRPWVDDTVDKSGSYPVPTGSRCLAFMLRIYRQHQVLAILDSRLEILEDNDKEGLYSHSLARVASRTGDPGGNPSRRRCRPPPPTHPLPHRRLSEWLAKPTACKDSGSRARGCDHHSSSAGKSMVEAGRKDDSVEAGRGDGDRGPVALAATVAAAAVWRRGRQIWATTLTAARRSFTLSSGWSGASLLLYL

SEQ ID NO: 180317 - protein, 125 aa, Oryza sativa
  unsure (1)..(125): unsure at all Xaa locations
  Clone ID: PAT_MRT4530_77696C.1.pep
NXXGKLYXSNRVDTXYQASDHRXGXFXXTXKXTLMCGRGXXLLQSXXAIXFSCCLSRNGXQIAXRASVPVQLXXGLXLXXXFIQSXSXVRCVXKNFDCFHLLXSXGAXAYYXRXXXNXPISPXLX

SEQ ID NO: 180318 - protein, 42 aa, Oryza sativa
  Clone ID: PAT_MRT4530_77698C.1.pep
PTPTPSTLSTPTQTPDAFGKCPRDTLKLSVCANGLGLIKAKG

SEQ ID NO: 180319 - protein, 163 aa, Oryza sativa
  Clone ID: PAT_MRT4530_77699C.1.pep
SRRRCRPPPPTHPLPHRRLSEWLAKPTACKDSGSRARGCDHHSSSAGKSMVEAGRKDDSVEAGRGDGDRGPVALAATVAAAAVWRRGRQIWATTLTAAVSCGWWHQRGGVGDCGRRRQERRRRTKEQAPGRQQARRMCWPVGLAANTVKETRPAPARRRRCGR

SEQ ID NO: 180320 - protein, 106 aa, Oryza sativa
  Clone ID: PAT_MRT4530_7769C.1.pep
MASTSASPPISSSSSSSSTAAAASRYWEEEKLETELAKVHGLIAVEMATGWSMCPIGDARRHISAELAAVVPESLTEEAAAVDAAVEQRTAARSPPTSTPSCVASH

SEQ ID NO: 180321 - protein, 193 aa, Oryza sativa
  Clone ID: PAT_MRT4530_776C.1.pep
MAWDVGMKTMSSKGLVSGSPSCAMMPEGGGGRRISAREPLSCQYRGLVAMNRAGGRDLNVLPLSACDRISPLSIPAQGASRRGDGIVNVDFNFARGGGWAGGELALTLAGERTTSANERGRVGVAKARVTLVGDQVERAGVAETGGADCGQETAEMGAQTCDRRRSVGTVGWSTGGGGGEARCGISKKYVKWW

SEQ ID NO: 180322 - protein, 57 aa, Oryza sativa
  Clone ID: PAT_MRT4530_77700C.1.pep
YIYKVPSTMCQHNQKKPPNATTNVYTVIKGVITLSTYMKFYQIKYEVCSNCNPLLLT

SEQ ID NO: 180323 - protein, 89 aa, Oryza sativa
  Clone ID: PAT_MRT4530_77701C.1.pep
RGMMVEIFITCKYHIAKTSEIQLKDCFPGEMVVSKKFWRLEEVSTGEASCHFSESRELVNWCRMGLGVGVKRKIGVILLLLLLVCGADT

SEQ ID NO: 180324 - protein, 209 aa, Oryza sativa
  Clone ID: PAT_MRT4530_77702C.1.pep
MGGDQWGGRPTSGGRWREWAARMTTLAAPFLLPARTEGAAEDGEDVVAGALVRDDSGEMDKKVEVGPKYHKSTKLVKIGPWGGNGGGSVDISVPPNSLKNVTIRSGAAIDAIAFTYVGTDGNEHLAGPWGGGGGNPTTKTLGSQEFVKGISGTFTNVVTNLQIVTNVTTYNFGQGGGTAFSLPLQSGSVVGFFGRSGALVDSIGVYVHI

SEQ ID NO: 180325 - protein, 275 aa, Oryza sativa
  unsure (1)..(275): unsure at all Xaa locations
  Clone ID: PAT_MRT4530_77703C.1.pep
MSSKDVSLRLDSEWSRVEMQLVEYGTSSISAVSVLASECLDSCTSAPLCLEYGAISEPAAPTVGGVISELAAPTVGVEQPPIHYVDWDSLEIDGTLDDEGRIHEDQKVTLSYHTVWHGMEKAKKELYGCWEESFQLLYSWKEEKFRASYEREIPAIPDKSHWPKVKMPFDLGAPLEKRGVGRQRKLRIKGCLENGGKSSAKSDGKNKKIIRGLVTCKRCGEKGHRQASXYKCPLNXNKKRMKRKPRKSNQKNLPPEPSTPKRTTNEATIMQESPG

SEQ ID NO: 180326 - protein, 111 aa, Oryza sativa
  Clone ID: PAT_MRT4530_77704C.1.pep
ALKPASPPFSESPARSLRPPRAPGAARRLGLGAKSTPSGICDISWKEGHLAVVKLVLINRAPMRLTVGQVHRHVPCIWHLLGHAFRPLVNHLSIQNAFTSTSGKISPNRLA

SEQ ID NO: 180327 - protein, 157 aa, Oryza sativa
  unsure (1)..(157): unsure at all Xaa locations
  Clone ID: PAT_MRT4530_77705C.1.pep
SARWPFASPLPPPHLHPDRPXPAPENSATQLPAIRLCPSLPLGSVPSPSQPHSPLLPLAPPAFASTAPAPPPPPPRRRPAPPPSALGPLRRRRRRPRPTASASPPPALRLPXPSPPPPRRRRHFLSFPFLLFSLSQRWAGSVRALRHGSRATAGGGS

SEQ ID NO: 180328 - protein, 83 aa, Oryza sativa
  unsure (1)..(83): unsure at all Xaa locations
  Clone ID: PAT_MRT4530_77706C.1.pep
INYQNASXVSSFLLAAASPLNSYSLVPISCFLLSNLSSQTIPLFLLNFVSLNTYILEWIAIYRWHLCERFGVIVLVRDNMVSE

SEQ ID NO: 180329 - protein, 79 aa, Oryza sativa
  unsure (1)..(79): unsure at all Xaa locations
  Clone ID: PAT_MRT4530_77707C.1.pep
LSHMMSKPDRAQSGPSVHIIIRIKTRGFYLTGLKVMNVVRSFAQTLYAGPFDXPILPRWVENIIYGPIKAMVLEGKDVL

SEQ ID NO: 180330 - protein, 518 aa, Oryza sativa
  Clone ID: PAT_MRT4530_77708C.1.pep
MDELNLLRQHQHQHQHHLVVRGLGEEIDLEIGPGDDPSFPGAALVGVTPGAHDPADDHKSLLIPCSQPVAEGQPQPTPPQVEEHDGLLRLPGQTKKKKKVVKKWREEWADTYKWAYVAVHDNTSRIFCTVCKEYGRKHRRNPYGNEGSRNMQMSALEEHNNSLLHKEALRLQTASKENAQPPEIERPVYVKALSKTAASILESILKKDPHEAEFIQSIQEVVHSLEPVLVKNSQHVQILERLLEPERCFIFRVPWVDDRGEAHVNRGFRVQFSQALGPCRGGLRFHPSMTLSVAKFLAFEQTLKNALSQYKLGGAAGGSDFDPKGKSESEIMRFCQSFMDELYRYLGPDQDFPAEDVGVGPREMGYLFGQYRRLSGHFQGNFTGPKIFWSGSSFRTEATGYGLVFFARVVLADMNKELKGLRCVISGSGKIAMHVLEKLLSCEAIPVTVSDSKGYLLDTEGFDYMKYIQDAVKQTYDRSIKAAQDYGIMKENPESLVHGANICAFLNIAQAMTDQGCV

SEQ ID NO: 180331 - protein, 155 aa, Oryza sativa
  unsure (1)..(155): unsure at all Xaa locations
  Clone ID: PAT_MRT4530_77709C.1.pep
MAWRWLPXEGAXRXVXGXPLPLGXXRGPRVTRTXQLXXLXRXXAXPLVPXXSASGAGXXVXHAHXXXXARXLSFTXLXXLRVXXLXAVVXXXXXXRXEXXWXLXXQXPCPXVVVSXCWXXTLXXXXXALLLEXYXLXKGXPGXPYXPASCLEAIL

SEQ ID NO: 180332 - protein, 54 aa, Oryza sativa
  Clone ID: PAT_MRT4530_7770C.1.pep
AADKNFNYTEEAPSITKLIPAEQLSGNFSSFFVPSHLYCHRVHLLFEMLMLTRL

SEQ ID NO: 180333 - protein, 94 aa, Oryza sativa
  Clone ID: PAT_MRT4530_77710C.1.pep
MVVVGPNLSRWFIDSAVEEEVQHVSKRWCTRPGRPIQLDMVGVTIARSQLMRNSIGETIVVVAEEEDTLASQLCEGMAFLQEVVLACTIDPTKA

SEQ ID NO: 180334 - protein, 82 aa, Oryza sativa
  Clone ID: PAT_MRT4530_77711C.1.pep
MAADSVKGDLYICFNANEESVSAALPALAEGSVWLRLVDTSLAFPGFFATESNPKVQQVPGLSSYHVEAHTCVLFESKSALA

SEQ ID NO: 180335 - protein, 366 aa, Oryza sativa
  Clone ID: PAT_MRT4530_77712C.1.pep
CRRQRPAASQLQPSGESAVNARSPFTDDTSTDLDDSADKHHLHAPTGVGDGVDADNGHQLHGSAGHSNGRGGDAEVQRRPAQNHEAGRKSRIRKKGYIQLLESGRSKLMHLEQELPTGQEQGIFIATGGSGDHGHSIGSLWLARPRDARHGMAERASHRPRPRRHGQVRAAATAYELCELVDAVMMHYDQVFRLKSFATKSDVFHVLSGMWMSPAERFFMWLGGFRSSELLKVLASHLEPLTDQQLMGICNLQQSSQQAEDALSQGMEALQQTLGDTLVSAAATVVSGGGGADNVTNYMGQMAIAMAKLTTLENFLRQADLLRHQTLQQMHRILTTRQAARALLVISDYFSRLRALSSLWLARPRD

SEQ ID NO: 180336 - protein, 138 aa, Oryza sativa
  unsure (1)..(138): unsure at all Xaa locations
  Clone ID: PAT_MRT4530_77713C.1.pep
XKPTGXEPSCNRSPYCPRRPWQSNDHTRNITHNRNPLLAAAWKHTQPQSLAPRTPNSPNLSKPREIGVVIVGVERDELQLFFALKSCINDQVEEKHGCFAAATSSKLHLFSSRSPSRIHACARYLDGWEAWILEIVVV

SEQ ID NO: 180337 - protein, 403 aa, Oryza sativa
  unsure (1)..(403): unsure at all Xaa locations
  Clone ID: PAT_MRT4530_77714C.1.pep
MSSGGGRPPAAQHIVRSVRQRFVPLPPPLARAPFAAAPGDYHRFAAASRGGEIEEGIVIRRTPSCGIDAKVEGFVKCLSSGSPGNPSTPASSRYDNSLGLLTRKFINLLKQTQDGILDLNDAAKILDVWVRKRRIYDITNVLEGTGLIEKKLKNRIRWRGSDDSGTNLDSDISCLKTEVENLYIQEQALDRSISEIREKMEELTEDESNHRWLFVTEDDIKGLPCFQNEALIAIKGPRGTTVEVPDPDELLPQKKLSDEHPYYIISQYKKMEELGETATPPRHASVVEPPSIATEAGHSSKQTMPLNVQQDIQETPELNASRAFGRMKKITPSDVDTDADYWLLTDDDISITHMWTTASEMQWDQIDTNDFLAEEISXPHVHSTSRLLQPVNLQAWASTMDNQ

SEQ ID NO: 180338 - protein, 41 aa, Oryza sativa
  Clone ID: PAT_MRT4530_77715C.1.pep
TFHFPVAPGDVIIAGTDGLFDNLYSNEISAIVVEALRTGLE

SEQ ID NO: 180339 - protein, 73 aa, Oryza sativa
  unsure (1)..(73): unsure at all Xaa locations
  Clone ID: PAT_MRT4530_77716C.1.pep
TXEXPCGPISMDTXISPHFSTKKAIARRGGRRRERRKAAVSHCXALTQRVRLRERRTRTHPRTPRSIRRXLKK

SEQ ID NO: 180340 - protein, 53 aa, Oryza sativa
  Clone ID: PAT_MRT4530_77717C.1.pep
VKIELVFFFERNTAGRPKKIELVEYLNQHNAAIFKYETAVVHILGGLCVNDLI

SEQ ID NO: 180341 - protein, 251 aa, Oryza sativa
  unsure (1)..(251): unsure at all Xaa locations
  Clone ID: PAT_MRT4530_77718C.1.pep
NKKPKKKKKEKKNNKKKKKKKKHEKKIKAKKKTIKKTKKQKTKKNXKKKKKQKKKVKKKKKKKKKKKKKKKKLKNKKKKKKKKKKKKKDKKKKKKIKKKKKKKKKKKKKKKKKKKKKKKKRKKKKNKKRKKRKTKKKKKKKKKKKKKKKKKKKKKKXKKKKKNKKNKKXKKKKKKKKKKKKKKQKKKNTKQYRKKKNKKTKKTKKKKNKXKRKTKKKKQIKETKKRNNNXEKQKKKSKNKVKKIEKIKYTI

SEQ ID NO: 180342 - protein, 230 aa, Oryza sativa
  Clone ID: PAT_MRT4530_77719C.1.pep
MAIVGVYPTYNCHKPPIKGAQSLTCVTQDAIRLRLFLFSLLGRGKQWFYSKRGAIDTWERCSNAFLRDNNKRPQPTTEIVKLTEECSAAILNRLPKKKKDPGCPTINYTIGTQHFDHALCDLGASVNIPVRIRGCFIPMDFVVLDMDTDKDTTLILGRSFLSMTDACINVGAEEIRMHINGKLYTFETRPNKKVLGQNWRLEGPAQVRLDQGFDRTLAAASHPGLPCERP

SEQ ID NO: 180343 - protein, 37 aa, Oryza sativa
  Clone ID: PAT_MRT4530_7771C.1.pep
MNGESREEYGKSYAQRKRKMDLNTIDLRVIRFPQTSQ

SEQ ID NO: 180344 - protein, 507 aa, Oryza sativa
  Clone ID: PAT_MRT4530_77720C.1.pep
MAAGTEAARDYGGGVTASVVVTCLIAASCGLIFGYDIGVSGGVTQMQSFLTKFFPEVVKGMRGAKRDAYCRYDNQVLTAFTSSLYIAGAVASLVASRVTRMVGRQAIMLTGGALFLAGSAFNAGAVNIAMLIIGRILLGVGVGFTTQAAPLYLAETAPARWRGAFTAAYHIFLVIGTVAATAANYFTDRIPGWGWRVSLGLAAVPATVIVVGALFVPDTPASLVLRGHTEKARASLQRVRGADADVDAEFKDIIRAVEEARRNDEGAFRRLRGRGYRHYLVMVVAIPTFFDLTGMVVIAVFSPVLFRTLGFNSQRAILASIVLTLVNLCAVVVSSFTVDRVGRRFLFLAGGTAMLLCQVAVAWILAEHLGRSHAAATMAKSYAAGVVALMCVYTASLGLSWGPLKWVVPSEIYPVEVRSAGQALGLSVSLTLSFAQTQVFMSMLCAMKYAIFLFYAGWVLAMTAFIALFLPETKGVPLEAMRAVWAKHWYWKRFAMDAKLDAQVNCL

SEQ ID NO: 180345 - protein, 134 aa, Oryza sativa
  Clone ID: PAT_MRT4530_77721C.1.pep
MAWLEGFLQMLLMSQRFLDQVPSPFLHTEIVSVSAATFDRTGRYVITGSDDRLVKIWAMETAFCLASCRGHEGDITDLAVSSNNAVVASSSNDFIIRVWRIPDGLPISVLKGHTGVVTAIAFSPRPGAAFQLLS

SEQ ID NO: 180346 - protein, 65 aa, Oryza sativa
  Clone ID: PAT_MRT4530_77722C.1.pep
QQIQTSFVRYKINNGNEETLYLFFCYFVFHCFSISYLIDGEEFHLDILYDCLISPYPHVIFFKYF

SEQ ID NO: 180347 - protein, 95 aa, Oryza sativa
  Clone ID: PAT_MRT4530_77723C.1.pep
SDQEQQYRAQGLFSMYLFQIPWVSFGIHVSEEHATITRICHNDGALISWPSLNVLGKPFAARISQLVMLSPNCAGIPFLEYVYPPVSSRPPFPYI

SEQ ID NO: 180348 - protein, 96 aa, Oryza sativa
  Clone ID: PAT_MRT4530_77724C.1.pep
PARPTHAVLYCPRTPRWRGGLLLHVGGVHPNARLGYSQRVLLNIGYIGLEGQLPDELIGNNNTGAHIQTDPAHMGRGPLIGEVTRGRKTCSIRDCG

SEQ ID NO: 180349 - protein, 78 aa, Oryza sativa
  unsure (1)..(78): unsure at all Xaa locations
  Clone ID: PAT_MRT4530_77725C.1.pep
FYINPLHTNLVRGLLNHFTRTSHPPEISANKAYHXQPSLLEITISAFEPSFIMAKSDPRHSKVMACFLTYRCHHVPHG

SEQ ID NO: 180350 - protein, 531 aa, Oryza sativa
  Clone ID: PAT_MRT4530_77726C.1.pep
MHPLTLSSTALLRLIKSLSPAVRRAHLSASSIHCLLLKAGLLHVGAHLPTALLSAYAALGSPDHARRLFDEMPEQGLVPRTAMARAHVASGQAAQAIAVFGDMVADGVFPDNVALAVALGACHGAGSWTARRNPGKKIHALIVTSGIEPDVFVSTELIRVYGECGKLAVSRRVFDDMPSRSTITWNAMLHQYARHGKVDTAYELFLAMPRRDVVSWNTVLAGYCVAGRCREALGLFRQMVSPSSCAVHPNVPTMSTILGACAGAGCLETGIWVHAYIERNRMNDDGYLDRCLIDMYCKCGSIDNALQVFEKAPRKRDLFSWTTVICGLAMHGRATDALRMFDMMQDNGICPDDVTLVGVLNACAHGGLVDEGLGYFYSMEAKFRITPKIEHYGCMIDLLGRVGRLQEAYSMIRTMPMDPNTVIWGAFLSACKVHGNMELGKIAAEELTRLDPDDPWGRVMLSSMYAKAQDWIGLARERREMNSMQVKKTPGCSSIELKGEVHEFVAGGSQHPQYAEICSVLQDVEAQTNVG

SEQ ID NO: 180351 - protein, 149 aa, Oryza sativa
  Clone ID: PAT_MRT4530_77727C.1.pep
CGVQHLTLIATLYPRHFCTNTFSAPGQEMQTSPTCCVMASYTTKQLHRQHPGVLALRLIPSFCSGAFHPSVCVPRKSSAAKHSFTPSHNTISKVSTSHLHICGIQGCINATCNIQGKSRSCLRTECFAISVLVSIGPTGNFWTPFTVGL

SEQ ID NO: 180352 - protein, 55 aa, Oryza sativa
  Clone ID: PAT_MRT4530_77728C.1.pep
LYSKYKLVPDHKNKHLVLGYMILRKKKKKQSMKVIYADSKFPIDNALFNLHKQKK

SEQ ID NO: 180353 - protein, 94 aa, Oryza sativa
  Clone ID: PAT_MRT4530_77729C.1.pep
MGKVARVSAGKTKRRFSLRVVSDLSLHMVLEAGEHRGSSVTAKGRIDMDAGERESVVIGGTGRFRLARGYMVTKNYDYSLATGGVVQIDVCLQH

SEQ ID NO: 180354 - protein, 77 aa, Oryza sativa
  Clone ID: PAT_MRT4530_7772C.1.pep
SVSRSGRRLLFWCPSRCPATTVVVLPVAHTESSQSLDHRPSVKTSLELVTQAPRLLAAGAGRLPLARVRHALKTNET

SEQ ID NO: 180355 - protein, 69 aa, Oryza sativa
  Clone ID: PAT_MRT4530_77730C.1.pep
FFFFFFFSHKRPPQGHTLFIINKLLLLPSPGHPNRCYVVFQTHLVQYKTSRLKRILLEEAKGLIHLEID

SEQ ID NO: 180356 - protein, 156 aa, Oryza sativa
  Clone ID: PAT_MRT4530_77731C.1.pep
NWVEAVGHNKGPKGTGGGIFPNQAGPAGFFKEEKHKVLFYKKKKKKRYQRSPFWPKPQAAHREIREGPKAIFGKQKAGGSQLNQEKGGGTKGLTLKKAKEKKVLAGPHKLWKESSRPARNWWGKRAKREFNSLSEKKSLKKTHGRPVARAKGFFPK

SEQ ID NO: 180357 - protein, 98 aa, Oryza sativa
  Clone ID: PAT_MRT4530_77732C.1.pep
CGADVDDDVIADGGSAPRARRRMTARRCKRTARRRGRGGGDVRVDGDSGAPAIFGGNGGRDEDGNNLANPTATIPSDDDDQSGGGARLELRRRRRRTG

SEQ ID NO: 180358 - protein, 185 aa, Oryza sativa
  Clone ID: PAT_MRT4530_77733C.1.pep
MDTGNKGTATPVLLNVYDLTPANDYLYWLGFGVFHSGIEVHGMEYGFGAHDFPSSGVFEVESKSCPGFIYRKTVWLGTTDMSHGEYRSFIEKLAGKYHGNSYHLVSKNCNHFTDDVCSFFDCLLPESVQVSPVGRVPTLRPVADDDLDSISTVSDNNEEDKHLLPAPSNDLHSVDVPLKLAKDVL

SEQ ID NO: 180359 - protein, 40 aa, Oryza sativa
  Clone ID: PAT_MRT4530_77734C.1.pep
SPRLPALLRRPMRSAGLRGRVHVCARAAVIGASFLARRGR

SEQ ID NO: 180360 - protein, 298 aa, Oryza sativa
  unsure (1)..(298): unsure at all Xaa locations
  Clone ID: PAT_MRT4530_77735C.1.pep
LFLKRKKDLLRQRXLGFTVDRVHRSXSRNERLRSNLNKTKGRDXPIYHGSTADXGADVDDDVIADGGSAPRARRRMTARRCKRTAPTGRGRRGELTGRRGRGGGDVRVDGDSGAPAIFGGNGGRDEDGNNLANPTATXSRATTTTRAAVAHGWSCGGDGGARADAEAVLQATAGXGEGGGGGXEAAARPTATNGGDARFRVAGKKSNPNRTRIRXFPNEISXSFYRGKDRGDRRDHFPSINLIGSGKMRWAPPVSGRXGKRGGLGRLEPGVHRPGERERDLGXLSPKTKKRIFKPFSF

SEQ ID NO: 180361 - protein, 858 aa, Oryza sativa
  unsure (1)..(858): unsure at all Xaa locations
  Clone ID: PAT_MRT4530_77736C.1.pep
MDLEIVGRHALLFDDDPTAEVVNSGGSLVPWAAVGADDLLLDRHDVRHLLDRVPPRPRRSYSAALLSAPSLDGVSEAELDRERFLDLTADDFGGEGSQDAVSSGNGTDTGWADYNSVPFSYGSTAGSDDPNNLSTYYCPSFPVPDRLLNKLPPSEKVHQIIARTALFVSEHGGQSEIVLRVKQGSNPTFGFLMPDHHLHSYFRYLVDHPQLLKDGLDADSNKGCKTANSESGHDASSGGALSLLGAVYESGDEDEGMLPPSPKSTVPGKDVVVHEQGHESSVSAIHCNEETRDGQKATAAATVAAKDKSILTKKNPMITGSSLLAARLEKAKDAMMASSTSDVSDTKVVILEPPSFLKRTMEKIVEFIIRNGKEFEGKLIEQDRTTGRFPFLLPSNPYHPYYLKLLEETQESKSRGGSSEPKDRKSSSEHKDRRSSSEQKDRRSPSERKGSNHGKGESKSKKRSSTSKDASSPDRSSAEPSEKQLYDKHKQGKGKFHMIISGAKKEPPRNVTADEAAAIVMAATRGFGPANIQTNTLKDTSGIXDPDVPSKPVXNSEACTSLTSSGQPKNEGTGIIDDDWIANTIAKAAAVAASKEADSSEASMTKEQKLKAERLRRAKMFTSIIKSGGSKMADLSTSADQTNEAGRASPGDLNLSESDPQPSAKEREGSSVPFEREGSNLAKQEKDSDDERNRARKYRKKHHPESDEENYDSEESYKHSRKKHRSEDSRAHTSDVHKHKLKRHSKDLEPRHHRHRDSSSEDEHEHRSSKSRHRHRDDYHYHEDDEHRSSHRHQRDHRSSSKRKKDDDRDKSKQTIVLPEVSQNQEKPPGDTAQSSQATTEVPSELRAKIRAMLLETL

SEQ ID NO: 180362 - protein, 877 aa, Oryza sativa
  Clone ID: PAT_MRT4530_77737C.1.pep
MDLEIVGRHALLFDDDPTAEVVNSGGSLVPWAAVGADDLLLDRHDVRHLLDRVPPRPRRSYSAALLSAPSLDGVSEAELDRERFLDLTADDFGGEGSQDAVSSGNGTDTGWADYNSVPFSYGSTAGSDDPNNLSTYYCPSFPVPDRLLNKLPPSEKVHQIIARTALFVSEHGGQSEIVLRVKQGSNPTFGFLMPDHHLHSYFRYLVDHPQLLKDGLDADSNKGCKTANSESGHDASSGGALSLLGAVYESGDEDEGMLPPSPKSTVPGKDVVVHEQGHESSVSAIHCNEETRDGQKATAAATVAAKDKSILTKKNPMITGSSLLAARLEKAKDAMMASSTSDVSDTKVVILEPPSFLKRTMEKIVEFIIRNGKEFEGKLIEQDRTTGRFPFLLPSNPYHPYYLKLLEETQESKSRGGSSEPKDRKSSSEHKDRRSSSEQKDRRSPSERKGSNHGKGESKSKKRSSTSKDASSPDRSSAEPSEKQLYDKHKQGKGKFHMIISGAKKEPPRNVTADEAAAIVMAATRGFGPANIQTNTLKDTSGIGQTRGDNGHTSSFGSFSSLQDPDVPSKPVSNSEACTSLTSSGQPKNEGTGIIDDDWIANTIAKAAAVAASKEADSSEASMTKEQKLKAERLRRAKMFTSIIKSGGSKMADLSTSADQTNEAGRASPGDLNLSESDPQPSAKEREGSSVPFEREGSNLAKQEKDSDDERNRARKYRKKHHPESDEENYDSEESYKHSRKKHRSEDSRAHTSDVHKHKLKRHSKDLEPRHHRHRDSSSEDEHEHRSSKSRHRHRDDYHYHEDDEHRSSHRHQRDHRSSSKRKKDDDRDKSKQTIVLPEVSQNQEKPPGDTAQSSQATTEVPSELRAKIRAMLLETL

SEQ ID NO: 180363 - protein, 84 aa, Oryza sativa
  unsure (1)..(84): unsure at all Xaa locations
  Clone ID: PAT_MRT4530_77738C.1.pep
MGKAASMRVALVSVVLVGLILVSTTHAARPEKLPAVVSPSIAPAVAEVVDAAINAVDLLAGFQKPPGARLPPPGVTXVTGGNRG

SEQ ID NO: 180364 - protein, 68 aa, Oryza sativa
  Clone ID: PAT_MRT4530_77739C.1.pep
EKSNSPITLKYLTPRLANGHQIKVVNLWMKERMRNTTSIISVVPPRGPIRDRVDTYHIPPTNKVATSG

SEQ ID NO: 180365 - protein, 139 aa, Oryza sativa
  Clone ID: PAT_MRT4530_7773C.1.pep
CRGKKNGLRRTKKWWLPSPRVPDIGLSQFQRNRLVFQAKLVHQILKAAMSINEEVLLQIPIPPAVTDALPKSGRASLGEDLYHAITTEYIPIEEIFLSLSLKTEHTVLETRNRLEAAVFAWNQRISEEKSKKSPGRHSW

SEQ ID NO: 180366 - protein, 555 aa, Oryza sativa
  Clone ID: PAT_MRT4530_77740C.1.pep
MAAAILRFFFFFFFFILPASLTATASTSTSSCPDGWQITPALDKCFIYIPTPLSWDRSEALCRNNFTAHLAALSSLQDLNLAKSLCGPSPSGCWVGGHRNNTASAFAWKWSDDSSSWNDTAFPADPLRANCSTTGCALATTNDACTLVTNTHAALTAKRCSDSHGLICMINHEDRCYHDHCHKEYFIVLVVVSGFILLTTLAVVVWLLVYRRSKRRRRSREGSSTSATALVPPLWKVFTSEELRSITKNFSEGNRLPGNAKTGGTYSGILPDGSRVAIKRLKRSSLQRKKDFYSEIGRVAKLYHPNLVAVKGCCYDHGDRFIVYEFVANGPLDVWLHHVPRGGRCLDWPMRMRVATTLAQGIAFLHDKVKPQVVHRDIRASNVLLDEEFGSHLMGVGLSKFVPWEVMHERTVKAATYGYLAPEFIYRNELTTKSDVYSFGVLLLEIISGRRPTQSVESVGWQTIFEWATPLVQSHRYLELLDPLIQELPDVGVIQKVVDLVYACTQHVPSVRPRMSHVVHQLQQLELKSAASEQLSGTSTSATSPMLPLEVRTPR

SEQ ID NO: 180367 - protein, 103 aa, Oryza sativa
  unsure (1)..(103): unsure at all Xaa locations
  Clone ID: PAT_MRT4530_77741C.1.pep
MGSTLRSSSHPSSPSLADSTLSCGQPHGARCANVGCEVEGEYADANRSVISXYLLVLSTSPMWSSRRLLLLTQVNTSLPIKXAFASTAAGHRRQPPRCRHPRP

SEQ ID NO: 180368 - protein, 170 aa, Oryza sativa
  Clone ID: PAT_MRT4530_77742C.1.pep
MAAAAQAPAAAKVVVATSPRAGGGGGGGGDRKVVPVVVAAAAGDEAQSEMHVLAVDDSSVDRAVIAKILRSSKYRVTTVESATRALELLCLGLVPNVNMIITDYWMPGMTGYELLKRVKESSQLKEIPVVIMSSENVPNRISRCLEEGAEDFLLKPVRPSDVSRLCSRIR

SEQ ID NO: 180369 - protein, 362 aa, Oryza sativa
  Clone ID: PAT_MRT4530_77743C.1.pep
MAMVPSGSGGGPPVIAEVEMNGGATSGAATVRATVVQASTVFYDTPATLDKAERLIEEAAGYGSQLVVFPEAFVGGYPRGSTFGFGANISIGNPKDKGKEEFRKYHAAAIEVPGPEVTRLAAMAGKYKVFLVMGVIEREGYTLYCSVLFFDPLGRYLGKHRKLMPTALERIIWGFGDGSTIPVYDTPLGKIGALICWENKMPLLRTALYGKGIEIYCAPTADSRQVWQASMTHIALEGGCFVLSANQFCRRKDYPPPPEYVFSGLGEEPSPDTVVCPGGSVIISPSGEVLAGPNYEGEALITADLDLGEIVRAKFDFDVVGHYARPEVLSLVVNDQPHLPVSFTSAAEKTTAAKSDSTAKPY

SEQ ID NO: 180370 - protein, 165 aa, Oryza sativa
  unsure (1)..(165): unsure at all Xaa locations
  Clone ID: PAT_MRT4530_77744C.1.pep
FSFLVRTYESKNTFLSMRSWIVNNREQIRFWEDKWLGNLVFRNKYPSLYAIVRRRSSSIASVMGSVPLNVSFNIALVGQNLTYXYELCVSIVHIQLNNSSDYFRWSYHQSGXFSVRSMYLSLINNGYIDRNKIIXKLKLLLKIKIFMWYLLKGVVLTKDNLARRN

SEQ ID NO: 180371 - protein, 67 aa, Oryza sativa
  Clone ID: PAT_MRT4530_77745C.1.pep
MVKNDRSVTGLMPVTSDWTDNRAPTLHLLPAEWRDGIYGWKEFYSDKTGFFTYREGSDISESYLEIN

SEQ ID NO: 180372 - protein, 72 aa, Oryza sativa
  Clone ID: PAT_MRT4530_77746C.1.pep
IFRNYSRTKMAKILEEIEIENLAYPHLIARAVGVPLGRLVTYCQSAKSNQICSFSLVRKNGGIVNLSDFYRA

SEQ ID NO: 180373 - protein, 594 aa, Oryza sativa
  Clone ID: PAT_MRT4530_77747C.1.pep
MSSSGGGGVAEEVARLWGELPVRVVWAAVAAQWAAAAAAARAAVVVPAVRALVAVSLAMTVMILAEKLFVAAVCLAVRAFRLRPDRRYKWLPIGAAAAAASSEDDEESGLVAAAAAFPMVLVQIPMFNEREVYKLSIGAACSLDWPSDRVVIQVLDDSTDLVVKVFIVIYFTDISSRIIRSTSSLVIKDLVEKECQKWQGKGVNIKYEVRGNRKGYKAGALKEGLKHDYVKECEYIAMFDADFQPESDFLLRTVPFLVHNSEIALVQTRWKFVNANECLLTRFQEMSLDYHFKYEQEAGSSVYSFFGFNGTAGVWRIAAIDDAGGWKDRTTVEDMDLAVRATLQGWKFVYVGDVKVKSELPSTFKAYRFQQHRWSCGPANLFKKMMVEILENKKVSFWNKIHLWYDFFFVGKIAAHTVTFIYYCFVIPVSVWLPEIEIPLWGVVYVPTVITLCKAVGTPSSFHLVILWVLFENVMSLHRIKAAVTGILEAGRVNEWVVTEKLGDANKTKPDTNGSDAVKVIDVELTTPLIPKLKKRRTRFWDKYHYSEIFVGICIILSGFYDVLYAKKGYYIFLFIQGLAFLIVGFDYIGVCPP

SEQ ID NO: 180374 - protein, 51 aa, Oryza sativa
  Clone ID: PAT_MRT4530_77748C.1.pep
ESRLQYPKTNTEITVIGQNATYTSNIQIHITLHIMVYPPPSLPIPYKSCKM

SEQ ID NO: 180375 - protein, 95 aa, Oryza sativa
  Clone ID: PAT_MRT4530_77749C.1.pep
GHTTRVTRVHGMRPSRVSICIVRVRAQQKDVHEGVGETLTIAHNARSRAPNPCSIRVLSARCTPLAKDSLRHPPRRTGAPWLAEFSGPPLKKGGQ

SEQ ID NO: 180376 - protein, 98 aa, Oryza sativa
  Clone ID: PAT_MRT4530_7774C.1.pep
MGIHCHRSTAIIGIRRLRSQMRGRPVMLGPSTIAARKEDEGDKPEVEVKLRSRRSAAAAAKEEAASARWRKRSGAVGRKRRSGVVGGKRKRRRREKGM

SEQ ID NO: 180377 - protein, 409 aa, Oryza sativa
  Clone ID: PAT_MRT4530_77750C.1.pep
MAGRKENPVLTACQAPSGRITRAQAAANRGRFGFAPSVSLPARTERKQTAKGKTKRGALDEITSASTATSAPQPKRRTVLKDVTNIGCANSSKNCTTTSKLQQKSKPTQRVKQIPSKKQCAKKVPKLPPPAVAGTSFVIDSKSSEETQKVELLAKAEEPTNLFENEGLLSLQNIERNRDSNCHEAFFEARNAMDKHELADSKPGDSSGLGFIDIDNDNGNPQMCASYASEIYTNLMASEVSEEYKLVPDTLYLTINLIDRFLSQHYIERQKLQLLGITSMLIASKYEEICAPRVEEFCFITDNTYTKAEVLKMEGLVLNDMGFHLSVPTTKTFLRRFLRAAQASRNNHTLEHYTSYKSSDIQICVCALRELQHNTSNCPLNAIREKYRQQKFECVANLTSPELGQSLFS

SEQ ID NO: 180378 - protein, 355 aa, Oryza sativa
  Clone ID: PAT_MRT4530_77751C.1.pep
MAALAQLAGAAVRVALAALLALLLPAYRVYRLTASFLGALLAAAADDDVAGKVVLITGASSGIGEHLAYEYARRGAYLALVARREESLREVGDAALAAGSPGVLVVAGDVSSPDDCRKFVDDTIRYFGRLDHLVNNASIWQVGKFEELTDVNHFRKLMDINFWGHVYPTRHAIPHLKKTRGRIVGVTSNSSYIFMPRNTFYNASKAAAANLYETLRMELAGDGIAITEVIPGVVESEITKGKMLTKEGDMRVDQDERDAILGAAPVERAGEFARAAVRGVFGGERYVFEPRWYRAAYTLRVCFPEALEWCARLLTVWRLGPATTDTVGRWLLLGVPGQRWLSQPASLRSPEIKAR

SEQ ID NO: 180379 - protein, 757 aa, Oryza sativa
  Clone ID: PAT_MRT4530_77752C.1.pep
MEIQKSDHHEQNLTSPRGLIHKVLRRTSSRRSPTAADHNPSPVFLETSNSKFLKQKDIDDAIKDPEKAGTHDNRIEDEKSDLLGYEICSGKLTLDNKAKSASGEQSGSGSSSNCFDARLTTEALVWGSNILKLEDIVSVSYHSGLRHFTVHACPLEKRSSGLSCFMKPRKIQKDLRFLSTSPHEAFRWVNGFADQQCYVNLLPHPMASSKKHSSELIPFDNMFDPCVKCRSPPKILVILNPRSGHGRSSKVFHGKVEPIFKLAGFKMEVVKTTHAGHAKSLVSTIDFSTCPDGIVCVGGDGIVNEVLNGLLCRDDQNVAVSVPIGIIPAGSDNSLVWTVLGVKDPISAAMSIVRGGFTPIDVFAVEWIQSGTIHFGTTVSYFGFVSDVLELSERYQKRFGPLRYFVAGFLKFLCLPKYSFELEYLPISDGGGGEHKIVEGQDKVDASDLYDDVVRRSRVECLPRASSLSSIDSIMSTGIMSGGDLEVSSPHANNEPSELVRALDPKSKRLSLGRTSTFKEPEEVIHPQAHVSSTPNWRRSKSKSRTEKAWPGSGATNDANSSRGTTTHDKEDASSTISDPGPVWDSGPKWDDEPKWDNQPNWEPETPIDLPGPLDDIELGLTKELVPSLDERWTVRKGRYLGVLVCNHSCKTVQSLSSQVIAPKAEYDDNCLDLLLVGGSGRLRLLKFLVLLQFGKHISLPNVEYLKVKSVRLKAGPNTHDGCGIDGELLHVKGQVRCSLLPQQCRLIGRPAKNPVQ

SEQ ID NO: 180380 - protein, 56 aa, Oryza sativa
  Clone ID: PAT_MRT4530_77753C.1.pep
YLSLSAYHIIISCSLRLVNRRQFCTLGDLQPSTTMSMLSFFLPPFHFIRSSSHAST

SEQ ID NO: 180381 - protein, 220 aa, Oryza sativa
  Clone ID: PAT_MRT4530_77754C.1.pep
MAAWMKVQSSGGRQLLSVVYLVAAVVIILPATSSRWRPQCLWREDRGVATHLHLFMHDVLTGPDATAVDVVNGTGRAFDVAGGLRFGQVVVMDDVLTEGPSRSSPRVGRTQGFYVFSDMNVPALLFCMNVVLTAGPYAGSTVTILGRDHITQPLRELSVVGGTGAFRMATGYVLWRTASWQFRADAVLELDVFVHTRPEYLQSPPPPPHHRPPPPTVVVT

SEQ ID NO: 180382 - protein, 423 aa, Oryza sativa
  Clone ID: PAT_MRT4530_77755C.1.pep
MLGSSPARDRGGGDDAEASEQPQPQPQPPLSPRAGGGEARGLVLACADLVHRGDLDGARRVAEAVLAAADPRGEAGDRLAHHFARALLALRGGGKGGHGGGGGGVVPSSAAYLAYIKIAPFLRFAHLTANQAILEAAAADAGGAHRRVLHIVDLDAAHGVQWPPLLQAIADRADPAVGPPPEVRLTGAGTDRDVLLRTGDRLRAFSSSLNLPFRFHPLILPCTAELAADPTAALELHPDETLAVNCVLFLHKLGGDGELAAFLRWVKSMNPAVVTIAEREGVLGGDVDDDNVPDELPRRVAAAMDYYSSVFDALEATVPPASADRLAVEQEILSREIDAAVAAPGAGGGGRARDFDAWASAARAAGLAPRPLSAFAASQARLLLRLHYPSEGYKADDDGGRGACFLRWQQRPLMSVSSWQPQP

SEQ ID NO: 180383 - protein, 287 aa, Oryza sativa
  Clone ID: PAT_MRT4530_77756C.1.pep
MGTMASARGRSRRWRMRQGRRRWLLLPPAAAADVYVAVGKGGSSMEALSWALRRLASPRSFVYLVHVFPVVISIPTGFGKITIGSQQSLVGDWPAALLKSRSLRCRREQGEYFVTLPLKCEQTSTTGHSLAWPDRGAEKDDCLELRKTQGFLVNVDVYLIESDHVTNAILELIPVFHVQQLVLGVSKSKLRKFKRGNTIAGQVQKNAPLYCEVKIVCDGKEVTTVPTADPTPPISPSPVNNKSNSISPTPLSPAPDHNNRAVADDDKKETNPNERNKITKYLKCFSF

SEQ ID NO: 180384 - protein, 129 aa, Oryza sativa
  Clone ID: PAT_MRT4530_77757C.1.pep
RSWPFLTAFSPDFPGFPQAQRANSAGVWKISLFGKPKGKPPGEEERKGAKVKLSFGLRPKVRENFAPLGIALGKCVSCKAFPAGLGVQGNWAIPGGGGQNPQCWWGSRCGRGPAFCGLKPLVVFFPGPE

SEQ ID NO: 180385 - protein, 121 aa, Oryza sativa
  Clone ID: PAT_MRT4530_77758C.1.pep
ARGAHARRYAYRRPHEYLGAEYAFPGSGATRARPGAPHHRVGIAGERARPGRFLRAAVGRRLGAVGRSRLHRAAQHEGHPAPVHENGPGRTPVGAGIVPVGFTRGAVNPGRRHGVAGRATR

SEQ ID NO: 180386 - protein, 54 aa, Oryza sativa
  Clone ID: PAT_MRT4530_77759C.1.pep
IRAIKSYFFRILSKGEIGRLEQLFCLKHFFLKKICLYSVLHRNFICLLDTEPGC

SEQ ID NO: 180387 - protein, 90 aa, Oryza sativa
  Clone ID: PAT_MRT4530_7775C.1.pep
SFKQKLSITCTLLAKLVKIDALCCIIARLHGTQTNLACRYWSIHPNEPCWKLKSTLSSPMSSRWYCKNPFDRLPHHIYDAPPYVSITVIP

SEQ ID NO: 180388 - protein, 58 aa, Oryza sativa
  Clone ID: PAT_MRT4530_77760C.1.pep
LIHVHGNAIGACISVLHMELTLSGTHISSAYPAEFQYKFWLRKEVFLLYIQNPEISRC

SEQ ID NO: 180389 - protein, 62 aa, Oryza sativa
  unsure (1)..(62): unsure at all Xaa locations
  Clone ID: PAT_MRT4530_77761C.1.pep
IFPXLLFFQKHPKFLFIYKGKQTRLIFLKVQKKGPGRNRKSRSVPSIFTPYTLALPLTFGNP

SEQ ID NO: 180390 - protein, 46 aa, Oryza sativa
  Clone ID: PAT_MRT4530_77762C.1.pep
PRPSGTYMCERHFLFILLLKPHIQTAKTLVLKTHYFFWRTSLKVFR

SEQ ID NO: 180391 - protein, 381 aa, Oryza sativa
  Clone ID: PAT_MRT4530_77763C.1.pep
MRGGRVRAAALMWRMIGWMACKRPTPLRPGVVCMGCYGNNTEGREFRVDFGSHCARCYEEHLLLWLRFEMRTRGGMNVQQRRRRSSPPRTAAATSPTASSGGDALPHRMRQRCPRLPRATPAAAHFPTAYGGGGGNFPWKREKGRPAIRRGKRSFGSFPAFLESSSHSPVQGTESYYPQKPTTCYQVLLLGGYTKVGKKKKAPPPRTDYTTEKRVSFPYSINSNLVLVRSRKVMSREALRQQFVSLKQGSESSQSTFSGPRRISLDLAAIDSKGTDRLLQLGLSCLWSNLPPLGGRWGNTARPPQSPEERKIVSRLHRQPKCKAEHEAYHPQTDVPRVQKPLARRFMKDSSPLVGLFLEDVGQIPNLVNKTNIVYPVLPAA

SEQ ID NO: 180392 - protein, 73 aa, Oryza sativa
  Clone ID: PAT_MRT4530_77764C.1.pep
CILAAARTQGNVALGEKAAEELSKLDPSHGASKIALSNLYADAGHWSNVSVVRKELQNENLERLTGSSGILQL

SEQ ID NO: 180393 - protein, 93 aa, Oryza sativa
  Clone ID: PAT_MRT4530_77765C.1.pep
MALLLFDVICGCGKDTMIERPNPIAGYTTSMTTTMEMSEATTNVLSATYWMLSDPVQHQCHKPSLVEHPVSQTVTRQCGSPSHCGEQGEQETG

SEQ ID NO: 180394 - protein, 897 aa, Oryza sativa
  Clone ID: PAT_MRT4530_77766C.1.pep
MATFSCKSGVIRRSPDHRRTRHMAFPFLPDEFLVFVFPPAPAPSRSRARGDAAARAMQLVDDADGALDSWARFCDLSDELFGGAGDLSAGPRLAPVVADLCARGLAELLRDQFIRSLEGIFRSNAVKKFWQQFHPYCNSSAVERIKFCVQENWPEDILSKALEDICLEKNYQEKCVLALVHSLQSYEDRSPHRKSKALDCSSSLMPRYQLMVSSVLLTTLPLSFPEILNVYFKKKLEELNIMMAGLDGSDPFDNHDLFERNSTSAWHSEMDIDGQEPGISESRNLVKNIGKVVRDLRYLGFTSMTEDSYSSAIIWLLKSKVHELAGDDYRIPVLGCVKKWIQAVPLKFLHAQLTYLGDSLDNESGSSGLKSPLASRPSSFPGIGVPSEALVRWHMRLEYFAYETLQDLRIGKLFEIIVDYPESSPAIEDLKQCLEYTGQHSKLVDSFISSLRYRLLTAGASTNDILHQYVSTIKALRTIDPTGVFLEAVGEPIRDYLRGRKDTIKCIVTMLTDGSGGNANGTGNAGDNLLEELNRDAENQENVDYDDHTNIDEKQAWLNAESWEPDPVEADPLKGSRNRRKIDILGLIVSIIGSKDQLVNEYRVMLAEKLLNKSDFDIDSDIRTLELLKIHFGESSMQKCEIMLNDLIDSKRTNSNIKTSLSKTSQTVGTVQEETELSHEVLDATIISSNFWPPIQTEDLTVPASVDQLLSDYAKRFHQIKTPRKLLWKKNLGTVKLELQFEDRSMQFTVAPVHAAIIMQFQEKPSWTSKTLATAIGVPVDSLNRKISFWTSKGVLTESVGPDADDPTFTVVDSTSDFNKNSTVNQLSERFQITEEEGESSIASVEEQLRKEMTVYEMFCIAEPSYDKSLQQLQSFLSGLVSDEKLEMRDGSYLLRK

SEQ ID NO: 180395 - protein, 78 aa, Oryza sativa
  Clone ID: PAT_MRT4530_77767C.1.pep
EAESKHNGTSLMQEKSCMARMQKRGLRQIYSLISEDACCAAYCSLTVQSTSWMNLSTPDGTSTGMCALTWHSPQPVNH

SEQ ID NO: 180396 - protein, 105 aa, Oryza sativa
  Clone ID: PAT_MRT4530_77768C.1.pep
VAGGVRLQRESRPSPIARKGELGGRQAAAPAMPTSSATHWIENFMLSLSAPTQNQAMGQQIDPHTATPSISITVPPKLAPHGPLPLLEEKGLGQQIDPHAIAGNR

SEQ ID NO: 180397 - protein, 1637 aa, Oryza sativa
  Clone ID: PAT_MRT4530_77769C.1.pep
MGGRTVLSDEEDEIEEEEEEENPRPSRRGRDNMDRDDDDDEEDEEDEGQDEYEKDGFIVDDADEEEEEEDERESDDERRKKKRKKKKKRESEGFMLDEDDYELLQDNNITGIQRPKPGNKFKRLKKAGRESEMDERSGFSDDDGSGKRRTAEERVQYSLFGDHQDASIEEDIVEEDQQADEDEDGDPEDEMAGFIVDEDEIDANGQVVKRKKGKARPRRPAAGVSSSALQEAHDIFGDVDELLALRKQELERDAANSGELRGNRLEDEFEPFILAEKYMTPKDEQIRENDVPERIQLSEELTGYPPTDTTMIEEESVWIHSQLTGDGFLSFFNNEHVNKDIDQKDIASVLTMLHVNKFEIPFIAMYRKENCPSLLKDLDANEQTNEEHSDEEDQRKMMWHKMLWAVQTLDKKWLLLQKRKVALEMYYDKRFDDENRRIDDVTRQALNRQLYSSIIEALKDAKSEKEVEDVDAKFNLHFPPGEVEEEGQFKRPKRKSLYSICHKAGLWQVANQFGRSAEQLGHHLTLTKIPEAGELDSGKDSPEEVAANFTCAMFETPQDVLRGARHMAAVEIGCEPIVRKHIRSIFMNKAVVSTCPTAEGNLIIDPYHQLSGVKWLRDKPLNKFVDAQWLLIQKAEEEKLLKVTIKLPEDAKKELMSEARENYLSDCVSKSAQLWDEQRKMILDDAFFNFLLPSMEKEARSLLTAKAKNWLNMEYGKQLWNKVSVAPWKKKDADKKDSDIDLDDESELRVMACCWGPGKPATTFVMLDSSGELVDVLYAGSISIRSQGVAEQQRKKNDQQRVLKFMTDHQPHVVCVGASNYNCRQLKDDIYEVIFKIVEDHPRDVNPQMENFSIVYGDESVPRLYENSRISSDQLPGQSGIVKRAVALGRYLQNPLAMAATLCGPGKEILSWKLHPLEQFLTPDEKYEVVEQIMVDATNQIGFDVNLAASHEWHFSTLQFVAGLGPRKASALQKELLREGSIFSRKDLVKPLGRKVFMNASGFLRVRRSGGAAASAQIIDLLEDTRIHPESYALAKTLAKDVFAEEAPHEANEMDDDEQEMAIEHVREKPRYLKSLDIREYMKSMPEEFHNKEQTLKDIKWELLCGFPDWRTPYAEPTPDEEFWMLSGETEDTISDGRIVQVTVRSIQDNRIICTFDSGLKAIVMADNYSDEGFDLETLQLHEGDVLTGKIKNVNKNRFMVYLTCKASELRRRPLSRGNHDPYNHEQDMTSQNEQDKLRKQKELAKKHFKPRMIVHPHFQNLTAEEAMQFLSDKEPGEKVIRPSSRGPSFLTLTLKIFDGVLAHKEITEGGKDHKDITSLLRLGKTLTIDNETFEDLDEVIDRYVDPLVGHLKSMLLYRKFKKGSKSEVDEMLRAEKSENPMRIVYCFGISHEHPGTFILSYIRSTNPHHEYIGLYPKGFRFRKRDFDNIDRLVSYFQKHIDKPPPDAGPSMRNVAAMVPMKSSGWGNGGGTGGGNDGWRGDGNNDRDRPFSGRSGGRFDSRNSSGGRGRGRGRGRGNFGSDDGGGGGWSGGGGGGGNSGGWTDNIGSGGGGWGTGGGSSWAGGGDGGSGGGDSNRGGGGGWGTPAGGSDGGGGGWGAAPGGSNDAPGWGSGKKAVPAQDGGSGWGASAGGGSGGWN

SEQ ID NO: 180398 - protein, 129 aa, Oryza sativa
  unsure (1)..(129): unsure at all Xaa locations
  Clone ID: PAT_MRT4530_7776C.1.pep
LAVSALTVRILRRGLRHSVEPGSLFLVRQGLVSPYGYXNMFTRGHCNLSISRSIXLLSVHRHPFYRGFYLSSDGTWHLTRGCIGFRSPAKGXVLRSAGPGESVGYIGVVQGCIASISWIALVWLIYLPT

SEQ ID NO: 180399 - protein, 146 aa, Oryza sativa
  unsure (1)..(146): unsure at all Xaa locations
  Clone ID: PAT_MRT4530_77770C.1.pep
AIVVPVDSLNRKXSFWTSKGVLTESVGPDADDPTFTVVDSTSDFNKNSTVNQLSERFQITEEEGESSIASVEEQLRKEMTVYEKFIIGMLTNFGSMTLDRIHNTLKMFCIAEPSYDKSLQQLQSFLSGLVSDEKLEMRDGSYLLRK

SEQ ID NO: 180400 - protein, 478 aa, Oryza sativa
  unsure (1)..(478): unsure at all Xaa locations
  Clone ID: PAT_MRT4530_77771C.1.pep
MAASASASALQAERCLLVGVGAGPRRHRLPLRMPPPLHAPPALLLLPHRRRRRWPPAVRASPGEGGGGGGGGGGGGGLAGALEKRPVMGVVAEEEDGEERGAKVVEEGEGDVAAAAALEMRWPPWEGLAERYKLIGATSLAFVICNMDKVNLSVAIIPMSHQYGWNSSTAGLVQSSFFWGYALSQLPGGWLAKLFGGRRVLEIGVVAWSLATAIIPAVAGSIPVQERSRAVAVVFGGLSFGSVLGLLFAPPIIQNLGWESVFYIFGLLGIIWCLGFQSLKEQQLRGNEDIQVIQDLGQSPSGSSDLISSSVSPKSSESSLGELMNSLKVSVLPPLGSMIITSIAAPFADNLISNGVDTTKVRKICQTIAFLSPATFMMLSSVDLGVPPWEIVAFLTSGLALSSFALSGLYCTHQDISREYASILLGITNTVGAVPGIVGVALTGYLLDTTHXLEYITFRTFDIFLPDGYCCLASICQQ

SEQ ID NO: 180401 - protein, 164 aa, Oryza sativa
  unsure (1)..(164): unsure at all Xaa locations
  Clone ID: PAT_MRT4530_77772C.1.pep
MACNKVMFSAWLGIIVSVLDATATMADHHKDQVVYSLSERCQPRMGYPMYSLPRCRTVVKRHYVCHXTPCGDVDEQLPHHCCRQLAEVHDSXCSCWALNHMVXGIYRELNSTDREHPMTEAFPGCQRRDLDRAXASLPTFLNVDIPNATRGVCYWLGYSKTPDN

SEQ ID NO: 180402 - protein, 403 aa, Oryza sativa
  Clone ID: PAT_MRT4530_77773C.1.pep
MPRRRLPLLLLLPITLTLFLLFPSPPPPRPPPHQPQPQPLPCGAAPSDATAGRWVPTREPLPPPLYTSSCPFHRNAWNCPRNSRPPVAALSWAPARCGGGAVPRIDAAEFLAVARGRRIGLVGDSLSENLVVALLCALRSADGGASKWKRRGAWRGGYFPRDDVIVAYHRAVLLAKYTWQPVENSKELHKDGIKGTYRVDVDIPADEWVNVTRFYDVLIFNTGHWWGLDKFPKETPLVFYRGGKPIEPPLGIYDGLKVVLKSMASYIEREVPSKTLKLWRSQSPRHFYGGEWDHNGSCVSDRLLQEHELDLWFDPRFGGVNKEARLVNSAIQEALIGTDIQLLNLTYMSEFRADAHPAIWLGKKDAVAVWGQDCMHWCLPGVPDTWVDILAARILHHFKQANG

SEQ ID NO: 180403 - protein, 227 aa, Oryza sativa
  Clone ID: PAT_MRT4530_77774C.1.pep
WAAAGEEDGATGGEKGGTRWPTGTRGREKERRRQPMGTRRPAGRRMARAPRPRGALPASTAVRRASASAPLCFARTPPPLAASSRPHSPPRRDRVPPHPPVPPSTDSLLAATSSTESLTRPTGRRPTTSPSRWEMRRERERRSPRSVRRRRGHRPPRTARQGCGWPRGQRARRRRRGSSSKPWRTLPPSRPPPPRTAATTPRPPPLPLPPHLHGRRPPQPPRQHRRR

SEQ ID NO: 180404 - protein, 121 aa, Oryza sativa
  Clone ID: PAT_MRT4530_77775C.1.pep
TVFTRSSLSKPTSKPAAHGACLAIMWSPAKHPASSPGGGVWVQHSIPFSFSSHMVTIPGPPYSTPHHQAFPPYSSSWSTRTQPGGLGVPQPFGSPSIHHQQLGPHNAWSCWSGQRAHKKYP

SEQ ID NO: 180405 - protein, 80 aa, Oryza sativa
  Clone ID: PAT_MRT4530_77776C.1.pep
RETNMLPLNHGHQYPNITTPYGDRKTLPFHDFTTYASQHVINTWLYRAVKRQPARPNYKCTLANRKHKNYSLVSHYIYAL

SEQ ID NO: 180406 - protein, 123 aa, Oryza sativa
  unsure (1)..(123): unsure at all Xaa locations
  Clone ID: PAT_MRT4530_77777C.1.pep
AAAPSPPPTSSAPRPPTALQSPRCLPGPWTVRSPLGWWCHRGGGXAARVARGGGEPPSLAAAPLVAAPPSASAPSSRHRGLGAGDGDDGDHNGPSHGRRMWPPPPPLPPPDLAGGRGQQPQRR

SEQ ID NO: 180407 - protein, 56 aa, Oryza sativa
  Clone ID: PAT_MRT4530_77778C.1.pep
PAAGPPGSTPKPKKGGPPEAASGPPGAENPKPPGAPRARAVGWGVPGLAPVVGSPL

SEQ ID NO: 180408 - protein, 87 aa, Oryza sativa
  Clone ID: PAT_MRT4530_77779C.1.pep
FFFYFFFVFFDFVYSEEHEVHHLFTICSICFRGQMKALGYCSNGFGLRCGSFAASVAPSTKGDVFGHNSRALSDPIRQRVGSLFARR

SEQ ID NO: 180409 - protein, 168 aa, Oryza sativa
  unsure (1)..(168): unsure at all Xaa locations
  Clone ID: PAT_MRT4530_7777C.1.pep
GRVGSIKGNLSRRVRVQEGYGMAVESFFLVLQGLVSLHGYXNMYTRGHCKISXRSIQLLSAHRHPLXLRFYLSSGGIWHLTRGCIGFRSPVKGXVLRSAGPGESVGYVGVVQDCIVSISWIALVWLIYLPTXISQFYXNYIVFRDTSIGXVSTSAIIRYRLELLHRLV

SEQ ID NO: 180410 - protein, 269 aa, Oryza sativa
  Clone ID: PAT_MRT4530_77780C.1.pep
MEHLSPQKLILPLGILLSSLVLLHAIAVPSIDEQAAALIAWKTTLQTQQPLQSWDSKAWPCNNWRGIRCGTLQGQRVITKITLHGVRLRGSLEALNFSALTTLTSINLSHNRLTGMIPQSIMSLKELRALILHKNQIRGSLFQLGLTSLTKLRFLVLSNNFLSSSIPKEICSLKRLVSLNLSSNQLGGHIPSEIGFLSKLIRLDLSNNNIIGRLDSLFMTNKPGKYNNKSSLSNLKVLALSSNQLTGPIPHELGDLVLRPELIPTGTSP

SEQ ID NO: 180411 - protein, 65 aa, Oryza sativa
  Clone ID: PAT_MRT4530_77781C.1.pep
MGGEAAAAGGVLPSARSSRREGGCSDVRWWAVLYPLQRPSSIFFVFVLVLILVMLWDVFEFLDAD

SEQ ID NO: 180412 - protein, 1014 aa, Oryza sativa
  Clone ID: PAT_MRT4530_77782C.1.pep
MANYNRRKSFEETTNIIKATTSIFNSASSSTPPTSPTPVLAKCSWACSNSASAYTTTSASHNIDVPTPTVAMGLQVSLNHGIGTTTVTPTKCLVNCFDNDTGVNHAILEESFASTTAAATMETVVSEDKACSIFINTTDLTKVMHSRCTTISLKDNIGTIQAEVAFPFPFHTLNMIAAPTEPMLVMAEKLDSIFCIKLVMPNGCLMKCLKSEKRLLAGLPKRKPWPLPWSGGVVRGGNVWHVPWSAFDSVWTSVCLIPPWPPPIRLKQCRSWKIGVAISLFAWKAQWDFVSYRSCTVVEISRMHELALLVLLTEDPSDDKRDDLLPASKNPFTSYMMAQYFEVIESRLISDISHLDGNNVQDTWDCKGILVILEDGTSKWRMQGIKPSASKNIISAWKNVFIPTIKSVLEGDKQFCIYKPNISTYLLCHVAMPTILGRLKTRGTIVKLVVKYEHCEEGILSWSGILSLLITRKGNSDGNDLIILIIQELQVPWDPGGLHFQNFNCHRLADKSNFKKRGLLGIEWAANGPVQPFIQAGPSKPKYPKAFLFSWPDYVQGQLQATSLFCIATMGGGDVCTMADERDDGTGTAASMAATRLAELCAMIDDHAAAGTMSEKRVATICAMIEECNDDVEEASRRRSSRRRSGRWRRRVGGTSSTRCYRQIGRISSGGFGVVVKAEHRDTGQTVAMKTLFRRRRSADDDAADLLREASFMAACRGNPYLVGLHGVARNPRTKQYSLVMEYVGPSLSAALAEHVERHGGEGYAEATVRRIMRQLLTGAAAMHERRIIHRDIKARNILVGGDGDVVKICDFGLAMSPAEAAAPYRPVGTDGYMAPEVLLGMPDYDGRVDTWSLGCVMAKLLSGEAPFRGEGTSDQLYQIFDMLGVPGNKTREAFKSKSELLAYEVRRWQALRRPQPEQEARGWLPELFPEKLLSRDGFDVLRGLLTFDPGERLTAAAALRHRWFAGADADESGVAALLRKTASIVAGAVISAGAFVGTWMIPWCDCRTAGTEA

SEQ ID NO: 180413 - protein, 784 aa, Oryza sativa
  Clone ID: PAT_MRT4530_77783C.1.pep
MAHMMTSSPTACVVLALAFVLLAVTPTLCYVTDGATRRRGASTSRRHGEARTYIVLVEPPDADGDDDEAAHRRWHESFLPGGGGGGGGEERASPTRIRHSYTGVVSGFAATLTRGEVAAVSRRRGFVRAFPERRLPLLTTRSPGFLGLTPERGVWKAAGYGEGVVVGLLDTGIDAAHPSFRGEGMPPPPARWKGACTPPARCNNKLVGAASFVYGNETGDEVGHGTHTAATAAGRFVDGVSAFGLAAGTASGMAPGAHLAMYKVCNDQGCFESDVLAGMDAAVKDGVDVLSISLGGPSLPFDKDPIAIGAFGAMSKGIAVVCAGGNSGPTHFTLSNEAPWMLTVAAGSVDRSFRATVRLGDGEAFDGESLSQDKRFSSKEYPLYYSQGTNYCDFFDVNVTGAVVVCDTETPLPPTSSINAVKEAGGAGVVFINEADFGYTIVVEKYYGLPMSQVTAGDGAKIMGYAAVGSPAASHNATIVFNSTVVGVKPAPVVAAFSSRGPSAASPGVPKPDIMAPGLNILSAWPSQVPVGEGGGESYDFNVVSGTSMATPHVTGVVALIKKLHPDWSPAMIKSAIMTTSSAVDNDGHAIMDEEHRKARLYSVGAGHVDPAKAIDPGLVYDLAAGDYAAYICALLGEASLRVITGDAAATCAAAGSVAEAQLNYPAILVPLRGPGVEVTVNRTVTNVGPARARYAAHVDAPGSGTTTTTTVKVEPAELVFEEAMERKTFAVTVTASGGGGAGGGGHVVAEGSLRWVSRRHVVRSPIVADSSVGGPSRRSAQDA

SEQ ID NO: 180414 - protein, 96 aa, Oryza sativa
  Clone ID: PAT_MRT4530_77784C.1.pep
EINRCTAPLQAPSNSTFRLRLVSCDEFLHHLICFGMACTPLYFVCFKTIRYRNSFCVSSNRTVISRGLQSVCSLVENVMFWAPGSPQTDLFCKSYQ

SEQ ID NO: 180415 - protein, 214 aa, Oryza sativa
  Clone ID: PAT_MRT4530_77785C.1.pep
MDAPGGGGPRVRGRVGGEPVWDWGNLLDFAVHDDDSLVLPWGDDSIGIEADPAEAALLPPAPSPQPAEAEAEAAGPASLPSSMQAEGSKRRVRKRDPRLVCPNYLAGRVPCACPEIDEMAAALEVEDVATELLAGARKKPKGAGRGSGAAVGGSGGGASRGTPAEMKCQVPGCEADIRELKGYHRRHRVCLRCAHAAAVMLDGVQKRYCQQCGK

SEQ ID NO: 180416 - protein, 83 aa, Oryza sativa
  Clone ID: PAT_MRT4530_77786C.1.pep
MTGAQGVKLIRAKLHGEDNAAKTINDEASWRRACILGEGRRAKSIRRRRMTSPYRGQLREGPRGHPSRFGPLAIGPAIANLAY

SEQ ID NO: 180417 - protein, 142 aa, Oryza sativa
  Clone ID: PAT_MRT4530_77787C.1.pep
QCHRECYGGIFLISPPLQNVALLTKHLDKFFNKKDLPWVNLIWNKYYSHSNLPPHAHTEKGSFWWKDIFRLIPIFRAISKVTVGSGETALFWKDNWTRSILQEELSILFSFAKLEDISLKGFLDLNSIEQSFHTPMLVQAIQ

SEQ ID NO: 180418 - protein, 87 aa, Oryza sativa
  unsure (1)..(87): unsure at all Xaa locations
  Clone ID: PAT_MRT4530_77788C.1.pep
WNKIFHVLPNFYKFEYLNSLTPNGLAHLLKGQSFGLVILLANLDLHNGLCNGTRLMIRAFQNYSISAXIVRGAHSWKKVFIPRIPLH

SEQ ID NO: 180419 - protein, 228 aa, Oryza sativa
  Clone ID: PAT_MRT4530_77789C.1.pep
MDRESAWRERSNNVVIYFESSSICVSPGFGCPTGGAPAVRPAIGSGQTGRAKAVRPTAQSGGGRRFRRFDRSIYICQTDVNQAFSCPFLCNRGCPSEEVSLAIADEIRWVLEKCYSNPWLPLTGEKNRNTAGCATSMEDLVKLPSSLLGTRHVQAFSANMPVEAAAVSEEPRRRYAITALHRIVPTGSSGDGESSEMVTCHDMTYPYVVFYCHMAGPATRAYMVVLVS

SEQ ID NO: 180420 - protein, 107 aa, Oryza sativa
  unsure (1)..(107): unsure at all Xaa locations
  Clone ID: PAT_MRT4530_7778C.1.pep
ENFFLVRQGLVSPXGINMYTRGDCKTSXRSIQLLSAHRHPLSXGFYLSSGKIWHLTRGCIGSVRSPAKGXVLRSTGPGESIGYVGVVQGCIASISWIALVWLIYLPT

SEQ ID NO: 180421 - protein, 212 aa, Oryza sativa
  Clone ID: PAT_MRT4530_77790C.1.pep
ARGSVGPPRPERSTSRRAMVAEVGEEAGTAAESHRERNAIASRIRRADATAARRPYIKCNNCGPAGIVKCDRALSTTGSATTSPTTNSARCLAPIDRALFLAAPLRLGAQRRLRRPPGARPTEHTAARVVLAESLDGEDNQLMVNSYHCTTREGVQAAAGGAVRADGVRSALRMRFCRRGAGLPPPPRPSPRRSSGCCRSPQRCARPMRGQE

SEQ ID NO: 180422 - protein, 295 aa, Oryza sativa
  Clone ID: PAT_MRT4530_77791C.1.pep
MGKNKILEDKWLEPWALWLSRNDMVFDKSPSISYMQVLAGFVISCDRSDRALVAGQTGVYCASKFLKGVLLVHFVNTDKINKVVIYFKSSSICVSPVFGGLTGNSPAVRPTASGGQTGSDIRHGRDSRTVQPEDQHRIARAMNNARNRKRGGPNRCFECGSIDHLRSHCPKLGRGKDKDGEKSNNSKPKDSSQGRKLENLRKAFQEVCAAFEPLSDVDGESGDDDKGKNISDVCFMARGESDTEYEYNETGDWSDRLQSVGQTGHRSDRRYRGGFGAKEEERVDRGFRLFAAHDR

SEQ ID NO: 180423 - protein, 258 aa, Oryza sativa
  Clone ID: PAT_MRT4530_77792C.1.pep
MAEDKFHFPIGDPEGRGTKNTYASLVSSIVTRITTRAMATVEGKPVCGPSGYFEIILFPKPGTQFAAKHANGRVRLLFNYQNLYLVAFKVQGKWHKFKDLTPKIAPDYASIKRKKHCEAKNLPFESNYGVRGMAANLAQLKVSRQTPLQIYKMLSLYDPEHNAGMVRLSDLQKMLFKTCAVFPEVFRFPLLKKRVVYLMGKTADEESTVGEQHTDLFQNWGDCCMALRMGRQAFTPMADLDIYTFDQLLSTIGAVLPV

SEQ ID NO: 180424 - protein, 443 aa, Oryza sativa
  Clone ID: PAT_MRT4530_77793C.1.pep
MGMAASRSRPTAASSSERGRRWSAQLTARSRVGNIRAAPAERCGRGDGDPGARERLQLHVADSRAPPPFRSSSSLGKTAVGIAKLSPVLVRPFAVVVDRRSTVAAVNPKTAAASTSPPVPSVPLPPSLWSPRRHSPAGLRVRAAAAGGDVIADVIVALSREPHGSLRSTRLRSGGDKPTGVAGESMPLVFEGAKRQWASTDAGGGLCKIKEFFDLCFTGFRRSNRQLTGGQTGGIAAVRPAGARWSDRLRRQALQAISAVRPEIQYRIARAMNNARNRKRGGPNRCFECGSIDHFRLHCPKLGRGKREEKDGEKTNNNRPNNNKSKGSSQGRKLDNLRKAFQQVCAAFEPLSNVDGESGDDDKGKNVSDVCFMARGESDTEYEDNEMSAFEEAINILSAKNKKYRLLSVGQTGHRSDWRYRSGFGGKEGERVDRRFRLFAAHD

SEQ ID NO: 180425 - protein, 817 aa, Oryza sativa
  Clone ID: PAT_MRT4530_77794C.1.pep
MPFGLKNAGPTFQRTTRISLGSQIGRNVEAYVDDLVVKTRDRETLLSDLAETFESLRSTRIKLNPDKCVFGVPAGKLLGFLVSARGIEANPEKIRAIERMRPPSKLRDVQCVTGCMAALSRFISRLGEKALPLFKLLKRSGPFTWTKEAERALTQLKAYLSSPPVLVAPEPGEPLLLYLAATPQVVSAALVVERDEDNPHSAHPHSVLAWPGREQGGEAPEPNGGPRPPTTGAGPLPACQTVPGAPDPQDGPRATAGRPHLSPSDPEVNPVPTRPGREEGEEAPEPNGGLRLLTTGVDPLPACPTTPGAPDPQDGPEATVGRPHLSSSDPEVVGTEDKCAPRGRLDEERPRDAAPGEENRPHRKVQRPVYFVSEALRDAKTRYPQAQKMLYAILMTSRKLRHYFQAHRVTVVTSYPLAQILHNREGTGRVVKWAIELSEFDLHFEPRHAIKSQALANFVAEWTPAPEPVSVPEASSGPSQLPHTAHWVMQFDGSLSLQGAGAGVTLTSPSGDVLRYLVRLDFRATNNMAEYEGLLAGLRVAAGLGIRRLLVLGDSQLVVNQFTKWPEAYPVVKIDKHSALKFIKGITARFGVPNRIITDNGTQFTSELFGDYCEDMGIKLCFASPAHPRSNGQVERANAEILKGLKTKTFNILKKHGDSWIEELPAVLWANRTTPSRATGETPFFLVYGAEAVLPSELTLKSPRATMYCEADQDQLRRDDLDYLEERRRRAALRAARYQQSLRRYHQRHVRARSLCVDDLVLRRVQTRAGLSKLSPMWEGPYRVIGVPRPGSVRLATGDGIELPNPWNIEHLRRFYP

SEQ ID NO: 180426 - protein, 204 aa, Oryza sativa
  Clone ID: PAT_MRT4530_77795C.1.pep
MKLSIQSFARKLSLPSPKRTWSSGGGSSKRDGGMSKNGSGVKRAISRSEASSFASASSESESSSDDALMARSTPRSVLPAEISRRELEAVLRRLGHGEPDDEELDAVAAIAAEAEAGGGEDELMEAFKVFDADGDGRITAEELRGVMVAILGGDGDGCSLDDCRRMIGGVDADGDGFVGFQDFARMMMAATATATATADGPRSW

SEQ ID NO: 180427 - protein, 81 aa, Oryza sativa
  Clone ID: PAT_MRT4530_77796C.1.pep
LLPLTIDSLMLPSQLNLCLTLQPRLLNPCRVQRGRFAKIRLWPCILNGETAVQIWMSGHQYSRGGFAIILSGIGSSIRGGC

SEQ ID NO: 180428 - protein, 77 aa, Oryza sativa
  unsure (1)..(77): unsure at all Xaa locations
  Clone ID: PAT_MRT4530_77797C.1.pep
FLDILSEHSLTGIPCLVLGNIICKSQSVSKXGLVDPIGLELIKALISFMIHDVXCKVSVHIKVVIXDWLIKRSRTAK

SEQ ID NO: 180429 - protein, 1328 aa, Oryza sativa
  Clone ID: PAT_MRT4530_77798C.1.pep
MVVSPTVCNVKLGRVLIDGGAALNILSPAAFDAIKAPGMVLRPSQPIIGVTPGHTWPLGHIDLPVTFGGSANFRTERVNFDVADLSLPYNAVLGRPALVKFMAAVHYSYLQMKMPGPGGPISVHGDLKVALACMEQRADHLAAASKPEGGDERLGTSVPTAPRQRIVTCDEVPEDALVSFLRANADVFAWRPADMPGVPREVIEHRLAVRPGAKPVRQKVRRQAPERQAFIREEVARLLEAGFIREVIHPEWLANPVVVPKANGKLRMCIDYTDLNKACPKDPYPLPRIDQIVDSTAGCDLLCFLDAYSGYHQIRMAREDEEKTAFITPIGTYCYTTMPFGLKNAGPTFQRTTRISLGSQIGRNVEAYVDDLVVKTRDRETLLSDLAETFESLRSTRIKLNPDKCVFGVPAGKLLGFLVSARGIEANPEKIRAIERMRPPSKLRDVQCVTGCMAALSRFISRLGEKALPLFKLLKRSGPFTWTEEAERALTQLKAYLSSPLVLVAPEPGEPLLLYLAATPQVVSAALVVERDEDNPHSAHPHPVLVWPGREQGGEAPEPNGGPRPPTTGAGPLPAYQTVPGAPDPQDGPGATAGRPHLSPSDPEVNPVPTRPGREQGEEAPEPNGGLRLPMTGVDPLLACPTTPGAPDPQDGPEATVGRPHLSSSDPEVVSTEDKCAPRGRLDEERPRDAAPGEEDQPHRKVQRPVYFVSEALRDAKTRYPQAQKMLYAILMASRKLRHYFQAHRVTVVTSYPLAQILHNREGTGRVVKWTIELSEFDLHFEPRHAIKSQALADFVAEWTPAPEPVSVPEASSGPSQLPHTAHWVMQFDGSLSLQGAGAGVILTSPSGDVLRYLVRLDFRATNNMAEYEGLLAGLRVAAGLGIRRLLVLGDSQLVVNQICKEYRCSDPQMDAYVRQVRRMERHFDGIELRHVPRRDNTIADELSRLASSRVQTPPGAFEERLAQPSARPDPLGETDAPDRPPRPVGVQASGPEGSAPSSLRLIAWIVEIQAYLTDKTLPEDREGSERVQRISKRYVLIEGTLYRRAANGILLKCIPWEQALNDAVDLVRRCRACQFHAKQIHQPAQALQIIPLSWPFAVWGLDILGPFRRAPGGFEYLYVAIDKFTKWPEAYPVVKIDKHSALKFIKGITAQFGVPNRIITDNGTQFTSELFGDYCEDMGIKLCFASPAHPRSNGQVERANAEILKDLKTKTFNILKKHGDSWIEELPAVLWANRTTPSRATGETPFFLVYGAEAVLPSELTLKSPRATMYCEADQDQLRRDDLDYLEERRRRAALRAARYQQSLRRYHQRHVRARSLCVDDLVLRRV

SEQ ID NO: 180430 - protein, 255 aa, Oryza sativa
  Clone ID: PAT_MRT4530_77799C.1.pep
SAREGAASDQQKLQLHVTARAVVVVRRRSPSLRLATAGGTRRLAAAEPRRHLGGEQRGHAAGALRPLHAVRPPEAGAPTVAGDAAGDEDGGGVGEDEVTYVCIRVYEAYAGCRNEKKKKKKKKKRSPRRANRCGARREAQPGRPDRHLEEAHARPKGLWYIVDTVVENLQAAPSAISPSTLEINKNRRVYEHINNKQAHHKPRRQEQIHHKPEQTIHRYMFYHGRQLHVQHIGHTVPMDLPPSSPIPRIVAVHLL

SEQ ID NO: 180431 - protein, 209 aa, Oryza sativa
  unsure (1)..(209): unsure at all Xaa locations
  Clone ID: PAT_MRT4530_7779C.1.pep
MVAPKEAGKGDAGGGKGGAAATRVASPDPGWGSGRRRGGAETGRQRQRHGGQATTAAARSRRGRGAAVGVCQALVLASVMLRRRALAGHPLYLAGSGRPRPDPSPPRRMAAGRRDGCVWTASAAAARWRPASCSAGGFCRWXDGLCWREAGMGLDVRDGDFLIVGRKFVADRWRFEGGQGPVLPLVTIKSLPRSSGAGRVKEVAPQWLG

SEQ ID NO: 180432 - protein, 62 aa, Oryza sativa
  unsure (1)..(62): unsure at all Xaa locations
  Clone ID: PAT_MRT4530_777C.1.pep
ARNAGAYIENSSRADSYNPRAGXTTWGQPEEAPVSLLPMSATRVNLYQNAIVSPFCNGNAHR

SEQ ID NO: 180433 - protein, 71 aa, Oryza sativa
  Clone ID: PAT_MRT4530_77800C.1.pep
MPPSTGSPPPRPQVATDPSPADSFRRQVTGNRSPSSVIPPPSVPPHRPRQPGLATAPSADHRRLIVKSSLP

SEQ ID NO: 180434 - protein, 116 aa, Oryza sativa
  Clone ID: PAT_MRT4530_77801C.1.pep
CWCPCGCAARCCSPCSSGRPLAGSPSAAALPGWSSPLPPPPPVPPVSPSPPRPRSLVARGSAPPPRSAASAAPPRPRRPCGGGLASACVSPPSPVGRWWLGSKKIQVRAVAWVVPF

SEQ ID NO: 180435 - protein, 46 aa, Oryza sativa
  Clone ID: PAT_MRT4530_77802C.1.pep
MAVVVVEEVAIPICKVKAIEVETPLTMADHRHGLTMAVDVMIGAAC

SEQ ID NO: 180436 - protein, 93 aa, Oryza sativa
  Clone ID: PAT_MRT4530_77803C.1.pep
SPFWGFQKWAKFQKGFFFFSPSRPWGSPRGPVGGVTQNFFLPPVVVFFWLFGPFFFSPVFSKKKKKKKKKKKKKKKKKKKKKKKKKKKKGGGK

SEQ ID NO: 180437 - protein, 173 aa, Oryza sativa
  unsure (1)..(173): unsure at all Xaa locations
  Clone ID: PAT_MRT4530_77804C.1.pep
WPWPVGRWLLPLTRPAASPPSPVGRSRRPLPFPRRPPLPPPASGCLPLSPRLLPPPRPPALRHDQTPPPPRPVAAPPSPTRAATASPLRATAATSPPSPLLCEQQLPLLRERRPQPXASPSPSRAAAAAVPHRSPPRAATTPLRPTASPPRAAGVLRDPPPPHARDILHAAPP

SEQ ID NO: 180438 - protein, 74 aa, Oryza sativa
  Clone ID: PAT_MRT4530_77805C.1.pep
NKLKPKKNTNTEHPNGPVSENPSKVAMSPTKPQQQQKKNNPLLKKFGSFLKKKNHQVGERHMNNNCNSDLFFFV

SEQ ID NO: 180439 - protein, 473 aa, Oryza sativa
  unsure (1)..(473): unsure at all Xaa locations
  Clone ID: PAT_MRT4530_77806C.1.pep
MLHSGLTKSQPLPLLAAASSPRRILLAGLLRAACFSRPTASSPALHPVTTVTNRASARAAVSPGGPSQLGLGGRVSFSTAPDGTASPDGGSALPWLAAASRDGGAAPAARASAGRSSSWETSAEKFFSRGDQSPRGEVLTDRGSGREIIREEEDNGSIDNPKWGRIKDKYRRMVPRDRGSRALMAERRDFYALYIQEGMDFSVSNKKKKDKKGIEKVLQRVMLMDLXVGADTDTDGGEEGDNYSGNQDMKSFLAVESLNVSVAAGVLLYHLAGTNASPVSDKPSIXSYVRMSHNSSIHIIIIYISSLLTLTLSDVVSKASAGSLDHSELLSCRNMMQFLSSSAENGWRVLGGTVAPKAIPLSEVVPGEPTILVLGSEGTGLRPLVERSCTHLVRIPGNVDGSFVGADTDTDGGEEGDNYSGNQDMKSFLAVESLNSIAELSTVKHWFDLIDHKYTILILFFNKYLARELEIGT

SEQ ID NO: 180440 - protein, 75 aa, Oryza sativa
  Clone ID: PAT_MRT4530_77807C.1.pep
AHPCNSGPQVSKPSYLTGRFLSGEIYPPSDFIFVWTFTRLHICHKLTLLGEFLPGKPEDQSWLQSNSDLFCWKFE

SEQ ID NO: 180441 - protein, 103 aa, Oryza sativa
  unsure (1)..(103): unsure at all Xaa locations
  Clone ID: PAT_MRT4530_77808C.1.pep
FFFFFFYXFXRVVPFXXQKDLYPHPSAKILFVIYKDCXRAMTHYCDIRWAYHPTAKHXXXXQLRFGMFWVCAPVAASXXQLGARLGSKFSDDATQISAGWRQP

SEQ ID NO: 180442 - protein, 71 aa, Oryza sativa
  Clone ID: PAT_MRT4530_77809C.1.pep
MELELEPCQTGPSSALRRVESVAAAYTVTASHTHTSAARRGGRQGLARAMQVGLALGLSPVSQGGSSPLRR

SEQ ID NO: 180443 - protein, 99 aa, Oryza sativa
  unsure (1)..(99): unsure at all Xaa locations
  Clone ID: PAT_MRT4530_7780C.1.pep
GLVSTHGYXNMYTRGHCKSSXRSILLSAHRHPLSRGFYLSSGGIWHLTRGCIGSVQSPAKGXVLRSAGPSESIGYVGVVQGCIASISWIALVWLIYLPT

SEQ ID NO: 180444 - protein, 573 aa, Oryza sativa
  Clone ID: PAT_MRT4530_77810C.1.pep
MAGVATGGVEDAYGEDRATEDQPITPWAVCVASGHSLLRDPRHNKGLSFTEKERDAHYLRGLLPPVVLSQELQEKRLLQNVRQFQVPLQRYMALMDLQERNERLFYKLLIDNVEELLPVVYTPTVGEACQKYGSIFRRPQGLYISLKEKGRILELLRNWPEKSIQVIVVTDGERILGLGDLGCQGMGIPVGKLALYTALGGVRPSACLPITIDVGTNNEDLLKDEFYIGLRQKRATGQEYSDLLDEFMAAIKQNYGQKVLVQFEDFANYNAFTLLEKYRANNLVFNDDIQGTAAVVLAGLIAAQKFVSGTLADHTFLFFGAGEAGTGIAELVALEISNQSKVPVEDARKKIWLLDSKGLIVSSRKDSLQPFKKRYAHEHEPVKDLLDAVKVIKPTALIGSAGVGQSFTKEVIEAMSSINERPIILALSNPTSQSECTAEQAYSWSKGRAIFGSGSPFDPVKYNDKLFVPAQANNAYIFPGFGLGVVISGAIRVKDEMILAAAEGLADQVTPEHVDKGLIYPPFSCIRKISANIAARVAAKAYDLGLASHLPRPKDLVKYAESCMYSPIYRSYR

SEQ ID NO: 180445 - protein, 359 aa, Oryza sativa
  Clone ID: PAT_MRT4530_77811C.1.pep
MRTFQGHNPNTMKVHSRKSQPSKKKPREFYDTVEVHIIDDDSDGDANIHKDYSMEDTSKHLVMYNPEITYDKQGEVEVTEPIDNYTSLNQRYMKPRHGYNTVLPSIGAYTVQCAHCFKWRIIPTKEKYEEIRENICQDVFVCERAREWNRVISCVDPEDISQDGSRVWAIDKASISQTPPGWDREVRIRGEGCSKFADVYYTSPTGKKLRSLVEVGRYLAENPHYIRQGVNLTQFSFATPKPLQEDYVRKHTYAATPELPELLETAQVDPLCWAAPPTRSELLGELGASTSRSVDVSQSEVSYPVDLHQPEESAPLPPRTKKKTMKRGRVSATGSQSTPPGSSKDQSGGCVSDVEFVSL

SEQ ID NO: 180446 - protein, 528 aa, Oryza sativa
  Clone ID: PAT_MRT4530_77812C.1.pep
MQPTWLATMPAASSLVVGVAFTAAVAVAVAAAVARRAWRHRGLRLPPGPPGWPVVGNLLQVVFAGKPFIHYIRDLRREYGPIVKLQMGVRTLVVISSAELVHEALVEKGREFATRPAESPIRSIFSSGKFTVNSAVYGPEWRSLRRNMVSGMLSAARLREFRPARLRAMERFVARVRAEAAASRDGASVWVLRNVRFAMFCVLLDMTFGLLDLDEELVVRVDAVMKRVVLAVAARIDDYLPFLRPFLWRQHRQAVALRREQIDTVLPLINRRRAIVRGMRAGSPPDPAVAAPYSYLDSLLDLRVEGRDAVPTDEELVTLCAEMINGGTDTTATAIEWAMARVMDNPSIQARLHGEIMQRVGDARPVDDRDTEGMPYLKAFVKELLRKHPPTYFALSHAAVEPGSKLAGYDVPVDANLDIFLPTISEDPKLWERPTEFDPDRFLAGGETADITGSAGVRMIPFSAGRRICPGVGMGTAHIALMVARMVQAFEWRAHPSQPPLDFEDKVEFTVVMKRPLLAMVTPRKLSF

SEQ ID NO: 180447 - protein, 617 aa, Oryza sativa
  unsure (1)..(617): unsure at all Xaa locations
  Clone ID: PAT_MRT4530_77813C.1.pep
MAVLAEIAGDESPPPLPPSEGGEASGAPSTSSPSDADGGGKPSPRTSKPGRKRLVLTASVLLSFLIGLPLLLKSTEIHRSPLPSDAIAALSRRLHSNPPSFPCGLHAVFLRSGRDPSEASVANRIEREISTQLVDLPDASTAGKISVSVTVESAGGCSSSSKVASPWRCGAVTTADLGRGDEVFDELLDSALGDGGGDGMRVYTVVFVDSDDLKRIVIGKHRHAWVVGKVDEAEVVSIIGKVFVKYFMNGGVEEGEASTVKREFMPVGSDGNIVLSFSLLNADPSDWVYDWEFENIGQRMLTPVIEALRPIANINIESQVLYHTPKSSYSYSDDKLGGNXVLSVGDIPFFVNSNEWHLDTSISATGRSKVLQFVVYIPSARECPLYLQLPDGELSKTNAFISPMWGGVVIWNPPGCSFGSKPHGALDKMSSEELMETIEIFIGQLRQLFGLKSSYHTQSMDGVTKFITSPKGFAQWELDLLYRHHACSNLLSCLTTLESLSSLVQSLPRMIVMDEIGRQVELSLEAASLAQRNASLGISDSSAVSATRARALAEDAFFHPSVMSISYASIEHYFAIYMPFFAPVSLHVLLAVMKELKRYMVERRKYSAFLASQATSS

SEQ ID NO: 180448 - protein, 131 aa, Oryza sativa
  Clone ID: PAT_MRT4530_77814C.1.pep
TGSLGPEIHRPVGGPPRGAHGLPPNNPPGGFLNRSSGRFPPFPINSGLTPLRFLCPGWSPKKGARFPGLFSTPPAPGVGPPPIPRKGRGLTGFGRGNLQDPGGFFACPMFGGGQGLIYFFLRGLFIYLALG

SEQ ID NO: 180449 - protein, 121 aa, Oryza sativa
  Clone ID: PAT_MRT4530_77815C.1.pep
PLLAGGPPLGFGPPNNPFFFVFLLTPRGWGGENPPSRVFFFFFGGVGPFCPGGPFTFFFLVGGFFPGPGRGPPCPLFRWKRGPPGFFFGPLKKKKKKKKKKKKKKKKKKKKKKKKKKKKKK

SEQ ID NO: 180450 - protein, 356 aa, Oryza sativa
  Clone ID: PAT_MRT4530_77816C.1.pep
MEAAAQERELQLLQLQGVSWPFHAMEAARSSSWDATTSSGSSSGASGGGGGDCFLLGWEPPFAAGCLGVLAADVHGLFPLCTCPARFLYLCSSLRIGELIRAPAWSADMESPPAPPQQDAVALPEELDDLLLNFWDASSDQQQQQQQVAFNSSCILQEKTSSTTATATTTNSNSNFFYDDDDLLGSIFSTGPTLPEKGVAEPLLSSSSSNCQADPQVSEVSGAQPQATPAAPARRAGGGRGGGGGVLQTEQQQAAKGGGDADAGKIAAAAAAPACRVLRPFAVLKPDGLDGGATLADINARILMRPSRPVRHPVGEFACAPRVSADKPGLSGKAVAGFTRLHTPGRGTITIIRTRG

SEQ ID NO: 180451 - protein, 372 aa, Oryza sativa
  Clone ID: PAT_MRT4530_77817C.1.pep
MEAAAQERELQLLQLQGVSWPFHAMEAARSSSWDATTSSGSSSGASGGGGGDCFLLGWEPPFAAGCLGVLAADVHGLFPLCTCPARFLYLCSSLRIGELIRAPAWSADMESPPAPPQQDAVALPEELDDLLLNFWDASSDQQQQQQQVAFNSSCILQEKTSSTTATATTTNSNSNFFYDDDDLLGSIFSTGPTLPEKGVAEPLLSSSSSNCQADPQVSEVSGAQPQATPAAPGVARAPPRCSSSSSLKRAAPAEDAAAEAEYCRQSSSKRRREAETPTPEKSAAAAAAPACRVLRPFAVLKPDGLDGGATLADINARILMRPSRPVRHPVGEFACAPRVSADKPGLSGKAVAGFTRLHTPGRGTITIIRTRG

SEQ ID NO: 180452 - protein, 45 aa, Oryza sativa
  Clone ID: PAT_MRT4530_77818C.1.pep
DVFWPRNHSTSLGASASGNRGSHHVCFNHGARKTPPRVIHTPSLQ

SEQ ID NO: 180453 - protein, 510 aa, Oryza sativa
  Clone ID: PAT_MRT4530_77819C.1.pep
MTPPSPSISPGDLVSFAGKCSTKRKLRLLHGALLRRRHLLPTADAVAALAKLLRFAAVSPAGDLRHAAALLSLHLPFLSSASSHLAFFYNTLMRGLAASSSPAAAIELFSAMRRAGAAPDAFTFTFALKSCSRCVSQRRLPSDLHAQAIKHGCLGAGSSHVHVHNALLHGYSSRAAVGDARRVFDEMPARDVISFSGLLTLHLKANDLDAARVVFDQMPHRDVVSWTAMISAYARARRPQEALALFDAMPVQPDEVTMLSVVSACTALGDLATGERVCQYVDSNGFGWMVSLRNALMDMYAKCGSLTEARNLFDGMTVRSLASWNTFISAYASHGDVESTVALFHRMLADGKSVKPDGTTLLAVLTAYAHKGFVEEGRAMFNAILSGNYGKVDLTIEHYGCMVDLLGRAGQLEEAYKMIEQMPIPSNSVVWGALLGACRTHGDINMAERAVQKLRSLNPEEGGYYILLSDMYAASGRTTEAMEIRRIMNQAGARKTAGQSSWSTPCLPQP

SEQ ID NO: 180454 - protein, 293 aa, Oryza sativa
  Clone ID: PAT_MRT4530_7781C.1.pep
ELPPCRSRGRGDTGGDHRRLSPHRRLAPSSTSPPPEQTAGNRAAARKSAVGPSFSLEGAGRCPRPRPVGGGDGAVASASASGRRARRAEATGCGTAGRRRLGAERGRRRRRQIWRPSPNPAVRPPPGTTAAPKEAGKGDAGGGKGGAAATALPRVASPIRAGGEWSAPGRRGNRQAGAASRWTGDGSGGSLPSWSRRCRRRLSSVGVGFGNAAAARPSWSSPVPGWIWPSAARFVASTPDGSWSVGRSAGGFCRWWVSLLLMGSDVRMWKWRDDGLCWREAGMVLDVRDGDFL

SEQ ID NO: 180455 - protein, 59 aa, Oryza sativa
  Clone ID: PAT_MRT4530_77820C.1.pep
APTPQSPPLPTTLSRLQIIDRLHIPSVREIAAPSIDQSSRAAGRQRRETRATPQTSAVK

SEQ ID NO: 180456 - protein, 77 aa, Oryza sativa
  unsure (1)..(77): unsure at all Xaa locations
  Clone ID: PAT_MRT4530_77821C.1.pep
WVGVQRGQQRHILIEKQLEDGLTLADYNIQKESTLARAIRGNGXLCLSIETTLTVKTSTXEVELSDTIDSDNGKIHD

SEQ ID NO: 180457 - protein, 147 aa, Oryza sativa
  Clone ID: PAT_MRT4530_77822C.1.pep
MIVTGSTVIEAKEDNTVIMNILLIMISPWTKILKATTDTTIAHIMKEQDDIKIKSSKCWNQIRPPATLLTSNGRRICIRPPFSAHEYLMESPRSPLSNGSSLIAKLRLGPRPKWGPCGVRPNQVDHDPRVPLVILPPPLRFACRNSV

SEQ ID NO: 180458 - protein, 103 aa, Oryza sativa
  unsure (1)..(103): unsure at all Xaa locations
  Clone ID: PAT_MRT4530_77823C.1.pep
MPEGALHQTTIXLDTGDNPTEAVGRVGEYVVRMTLRPLGKRAAKSIWYEHDRHKNLGPLXEYTPLYLTGELLQDYRWDTVGLWDKDATIVRNRELNVIHYFLM

SEQ ID NO: 180459 - protein, 180 aa, Oryza sativa
  Clone ID: PAT_MRT4530_77824C.1.pep
PFPPPPRRRSASLGEPGGEPGWRWRGHLLCLPAPVDEEQEGMRIQRRLGDEEIWAVDPVMSRCVGAGSGSVGVVLRSASASSTTRPAVATSWRMSSPARGRPPVNLRRDGWGWISASTALADDSRCLTTSLALVGGRRSASITHFCHLRPRAAARRRVVTYVPGLLMCLYRRLHSAPGSQ

SEQ ID NO: 180460 - protein, 53 aa, Oryza sativa
  Clone ID: PAT_MRT4530_77825C.1.pep
TAPRPRRPRPPPPPAPRPRRPRPPPRRPLVPPPPPRPLQPPHLQRTPQGRRTC

SEQ ID NO: 180461 - protein, 190 aa, Oryza sativa
  Clone ID: PAT_MRT4530_77826C.1.pep
MASAAAPTPQPLLPVTNPAAAGGSAPSSGSALTDAPLATPAFRLFLSEATSRLRRNLAYFRVNYAAVVAFSLAASLLAHPFSLLVLLAILGGWCFLYVFRAADQPVVLFGRTFTDRETLLGLVVASVLAFFMTSVASLIISGLLVGGAIVAVHGAFRVPEDLFLDDPSVGSNGNTTSRLLSFLGAPGSGV

SEQ ID NO: 180462 - protein, 126 aa, Oryza sativa
  unsure (1)..(126): unsure at all Xaa locations
  Clone ID: PAT_MRT4530_77827C.1.pep
RRARTRSPSTSTASSRGPPPPASSSGREPSPSAATTGPSGTTPTATAPPRRRAASRRWSSSSXPPTPRRPWSTSSRPSTRSPASASSSARTRRRRSTPGTASSAAPACSSSRRRRSSPATSSRSSV

SEQ ID NO: 180463 - protein, 96 aa, Oryza sativa
  Clone ID: PAT_MRT4530_77828C.1.pep
ISCFYSRTPVYKRPRRSTWGAVEDATAIPAAAAEPAARCTLTWLIRSPPPPLLLPLCHELHLTLGTSAVVGTGAASDKAAHGYTSSSSCKSTPRNC

SEQ ID NO: 180464 - protein, 183 aa, Oryza sativa
  Clone ID: PAT_MRT4530_77829C.1.pep
MASAAAPTPQPLLPVTNPAAAGGSAPSSGSALTDAPLATPAFRLFVSRFSDTARRSLADRRPWTELVDRSAISKPDSLSEATSRLRRNLAYFRVNYAALVAFSLAASLLAHPFSLLVLLAILGGWCFLYVFRASDQPVVLFGRTFTDRETLLGLVVASVLAFFMTSVASLIISGLLVGGAIVA

SEQ ID NO: 180465 - protein, 131 aa, Oryza sativa
  unsure (1)..(131): unsure at all Xaa locations
  Clone ID: PAT_MRT4530_7782C.1.pep
VGRGVRLSSCRIHRGARGDRPLPFEGFFLVLQRLISPHGYXNMYTRSHCKLSLXSIQLLSAHRHPLYRGFYLSTSGIWHLKRGCIGFRSPAKGXVLRFAGPSESIGYIGVVQGCIASISWIALIWLIYLPT

SEQ ID NO: 180466 - protein, 695 aa, Oryza sativa
  Clone ID: PAT_MRT4530_77830C.1.pep
MAGAIFMSNTATRELCFRSNIFGLPIEYQPFVRNIRQGMPLFLFDHTERKLYGVFEATSDGGFNIIRSAFSSIGCSYPAQVCFKIIWKCRPLTEDEFSPAIKENYYMPWKFYFDLSYQQVVCLYQLFDEKRVEHPIHNHSKSANLENDPFRKGTQERKSLSPNIPHFPADQPGLFMPASTPRFSTVEASYCASTSMHQAPHPNMSMPLGTNPFGVQIAPVHNSHHDQAELPYNNNMLFPGYLPSGHVARDTTQELGLSANHSYPPSMGYAYGCLPPPGHRPQDAIAGDVNYAPPYPQFPLPNEQGSATNRRDYYDVHCKQCQFEDIYESEHQHFSKAKVLAPPILNQQDVPVYPAIAESAFDQRKECFTEEDSENARQKQSFNHTDMVFSGLGNSNRAYMPDHLNKNPDIRSESNTIAVGQHAQSSVFSRLSRIPPPLHQEIPGPSLNKLVLSLSQRAEHWGNQDKIITNDVCEQLVSEQVMDTPYPLAELNQQSGLIEEEIEGLAFMNFKRRSETRNLDANLGKEIRGQVKRRKLVRPSFGEVNNAGSSGKELEAKVLEGEKHSNDEHDENKFSIDLNKPAAIDGDVAKEDDTTTALPHPSVAIKMHKEKPSEENMSKPNSPNTTEEMKKQDPSLDSATHTEKISLELDVADLNTIDQSKLQAILSSSLLQALDKLRREKLNNSEEAEEVKIAT

SEQ ID NO: 180467 - protein, 279 aa, Oryza sativa
  Clone ID: PAT_MRT4530_77831C.1.pep
MSAVVCGKRSSSIFGDELIPSSPPSPSPPHHHHHPAKRSRCSPARAFDEATHRREALLHHLLSLFPHMDPQLLERALEASGDDIDSAIKSLNELCLESAAVGDSNSVLPAALKLSAEGVVNNGHLDVLTENPHATENFQTNHHGSEWVELFVREMMSASDIDDARARASRALEALEKSIMERAGTEAVHNLHKENVMLKEQLAIYLRENAVLKRAVAIQHERQKEFDERTQEVHSLKQLVLQYQEQIKTLEINNYALRVHLKQAQQNNSMPGRFPPDVF

SEQ ID NO: 180468 - protein, 70 aa, Oryza sativa
  Clone ID: PAT_MRT4530_77832C.1.pep
QAATEEKLLADPDCRPWVDKYQRSRETVSRTDYEVDLIGTLTKLSSLGQKINYEAYTYPKQKIDIGKLKL

SEQ ID NO: 180469 - protein, 114 aa, Oryza sativa
  unsure (1)..(114): unsure at all Xaa locations
  Clone ID: PAT_MRT4530_77833C.1.pep
KAKSSSFGRXSSPCTLGLRHLWPGKIWSKGLMPSANKPLTGKGEIGASAETVQTMWYGMRRPLSTDSPAETYTIPANEEQYWAFPSWXFYCAAWTVGSYRFAYPCDTWRFITGG

SEQ ID NO: 180470 - protein, 882 aa, Oryza sativa
  Clone ID: PAT_MRT4530_77834C.1.pep
MSAAAVLAVVAAAVAALAAAASGYELTKNGTVITYDRRSLIIDGHREIFFSGSIHYPRSVRDTWPDLISKAKEGGLNVIESYVFWNGHEPEQGVYNFEGRYDLIKFFKLIQEKEMYAIVRIGPFVQAEWNHGGLPYWLREIPDIIFRTNNEPFKKYMKQFVTLIVNKLKEAKLFASQGGPIILAQIENEYQHLEVAFKEAGTKYINWAAKMAIATNTGVPWIMCKQTKAPGEVIPTCNGRHCGDTWPGPADKKKPLLWTENWTAQYRVFGDPPSQRSAEDIAFSVARFFSVGGTMANYYMVVLNSNSNLFLTKKRDEISDRTDTGGFTCVNNQQYHGGTNFGRNGAAFVMPRYYDEAPLDEFGLYKEPKWGHLRDLHHALRHCKKALLWGNPSVQPLGKLYEARVFEMKEKNVCVAFLSNHNTKEDGTVTFRGQKYFVARRSISILADCKTVVFSTQHVNSQHNQRTFHFADQTVQDNVWEMYSEEKIPRYSKTSIRTQRPLEQYNQTKDKTDYLWYTTSFRLETDDLPYRKEVKPVLEVSSHGHAIVAFVNDAFVGCGHGTKINKAFTMEKAMDLKVGVNHVAILSSTLGLMDSGSYLEHRMAGVYTVTIRGLNTGTLDLTTNGWGHVVGLDGERRRVHSEQGMGAVAWKPGKDNQPLTWYRRRFDPPSGTDPVVIDLTPMGKGFLFVNGEGLGRYWVSYHHALGKPSQYLYHVPRSLLRPKGNTLMFFEEEGGKPDAIMILTVKRDNICTFMTEKNPAHVRWSWESKDSQPKAVAGAGAGAGGLKPTAVLSCPTKKTIQSVVFASYGNPLGICGNYTVGSCHAPRTKEVVEKACIGRKTCSLVVSSEVYGGDVHCPGTTGTLAVQAKCSKRPPRSAATAQ

SEQ ID NO: 180471 - protein, 151 aa, Oryza sativa
  unsure (1)..(151): unsure at all Xaa locations
  Clone ID: PAT_MRT4530_77835C.1.pep
KKITPMALDEWDAKHTXREIRLMRYFGHHPNIASLQNLSTCTEKDELYLMMDLVDTDLHRLIQSKTKLEEAHIAAIMYQLLCGAKVLHENGVLHRDLKPGNLLVSKNCDVKITDFGLSRYIPHGGRGNNGTSGSGKGHEKGKDLMTEYVVT

SEQ ID NO: 180472 - protein, 384 aa, Oryza sativa
  Clone ID: PAT_MRT4530_77836C.1.pep
MALPTAVVAGIAAAVATLLVAAAVAAAWWWRVARRSRRNSDTGSSETPPTLVEWGRCGRTLSAPEYQGARQFSLEELAHATKNFSDANLVGAGSFGPVYKGLLLDGTVVAVKRRVASPRQDFVDEVKRLSEIWHRNVVTLIGYCQEGGLQMLVFEYLPNGSVCGHLYANTGKESMTRLEFKQRLSIAIGAAKGLNHLHSLVPPLIHKGFKTSNVLVDENFIAKVADAGIDRLLRGFDGAAPSHHPSSSCSSIYQDPEVHSLAQLSESSDVYSFGVFLLELITGKEAASLISSEPREPLVHWMESHFSSNNEVTDPRLGGSFTSEGMKELVGLTLQCVSTSARRRPKMRLIAAELDRILEKEMSLTTVMGDGTAIVTLGSQLFTS

SEQ ID NO: 180473 - protein, 710 aa, Oryza sativa
  Clone ID: PAT_MRT4530_77837C.1.pep
MAVKKHNVAMQLQVVVLWLVGVALFSVMASSAPAAVAAAPPPAECPSKCGDVDIPFPFGVGDDCAWPGPDDFNVTCNHSFSPPRPYYGNIEIRDISVAAGEMRVYTPVVYQCYNTSDHVDSSTSFLQLNITDSPFLVAPGRNEFTAIGCDTLAWLQGRDDWSFLTGCITTCVSLDEAAHDGEQCSGLGCCQVPSIPPNLALVELNWGNLTKNYAWRYSPCSYAFVAEKAWYKFSRGDFSRAGSKSFMNRAGDRSVVTVLDWAIRSDGSCSSTSRVAPACVSPNSYCVNTTNGQGYLCKCSPGYDGNPYVTGDSGCTNINECKLRREDPAKYSELYPCYGGSKCHDTEGDYRCKCRLGRRGDGKIDNGCQPIIPPPVIGILVIAGVVLFGLVLVCLRKKWKLKGCYDRNGGQMLEKTSVKIFTKQELDKITNNKSNKIGKGAFGVVYKGTHDDQPVAVKYSIEKSISRTRGKDEFVKEITVQLQVSHDNLVCLIGCCLEVEVPMLVFEFVPNGSLESVLHGAERCALPLLKRLDIAIGSAKALTYMHSHSRRCIFHGDIKPANILLDDNLMPKVSDFGSSESVLKTKHRSVCADMGYIDPVYMVTGNFRLKSDVYSFGIVVLELITRKKAVYDGKSLPIEFTNCYEDDNARRNMYDQDILSAEALQPHCMECLDRMAGIAVQCLEYNIDKRPTMAEALQELIQLRAKVAGK

SEQ ID NO: 180474 - protein, 349 aa, Oryza sativa
  Clone ID: PAT_MRT4530_77838C.1.pep
MAPRNSLLPSFLYDGVGGGGGGAPAVVAGAPSEPPFGMIELFSPAYYSACAFGGAAACGLTHAAVTPLDVIKCNIQIDPTKYKSTTSAFGVVMREQGARGFYRGWAPTFLGYSAQGAFKYGLYEVFKKEYADMAGPEYAARYKTLIYLAGSATAEVAADVALCPMEAVKVRVQTQPGYARGLSDGFPKIVRNESYAGLFRGLVPLWGRQIPYTMMKFATYENIVEMAYKHLIPTPKEQCSKPLQLGVSFGSGYIAGVFCAAVSHPADNLVSFLNNSKGATVGDAVKNLGLWGLFTRGLPLRILMIGTLTGTQWVIYDSFKVMVGLPTTGGAPAPAAIPIGELAELKASA

SEQ ID NO: 180475 - protein, 55 aa, Oryza sativa
  Clone ID: PAT_MRT4530_77839C.1.pep
ERISSSAWCKRRPGPEFGDKGTLPNHLLCEIQGHRLTCAAIGRDDETLRGQRRAF

SEQ ID NO: 180476 - protein, 278 aa, Oryza sativa
  unsure (1)..(278): unsure at all Xaa locations
  Clone ID: PAT_MRT4530_7783C.1.pep
MVAPKEAGKGDAGGGKGGAAATRVASPDPGWGSGRRRGGAETGRQRQRHGGQATTAAARSRRGRGAAVGVCQALVLASVMLRRRALAGHPLYLAGSGRPRPDPSPPRRMAAGRRDGCVWTASAAAARWRPASCSAGGFCRWWVLSLLMGGDVRMWKWQDDGLCWREAGMGLDVRDGDFLIVGRVFSLSSVSPLGRTLFXSWGMLGGGRRLRLAVEVCGGXMAFRGWPRARXCHWLQSRCWRKPCRAFGGFDNXAPVGVVSLLGGVVMALFHILTNLSR

SEQ ID NO: 180477 - protein, 49 aa, Oryza sativa
  Clone ID: PAT_MRT4530_77840C.1.pep
MPCYTQVTTKDAKYNPDTIRLLRVTVAIQQPYAHFAGTEAAANILEMNN

SEQ ID NO: 180478 - protein, 670 aa, Oryza sativa
  unsure (1)..(670): unsure at all Xaa locations
  Clone ID: PAT_MRT4530_77841C.1.pep
MAGAEAVSAAWKEWALQALVLLSLMVQVTLLILAEFRRYIDSGVLRAFIWSAYMLADGTAIYVLGHLSVTSRSPEHELLALWAPFLLLHLGGQDKITAYAIEDNRLWLRHLQTLVVQVAAAAYVIYGSSIVIVGDSRTLLLLSATILMLMVGVAKYGERVWALRCAGSSPTGKYESDIARRRFSQMVPESFIRRLDPAETLLLNAHLLLDFAKDRFKGPLPRLFLCGPMNEGSRLQGEDELYKVAEMQLSLLHDVFYTKSEITHTWYGLCIRVLSSLATTVAFFLFNILLVWGNHHQHKLNGYSRADVIVTYVLFVGAVILETMSLLRAMFSSWTCALLVKKGSEGSNVCNFLAHIPACLRRLVRAAYWRRRRSWSRSMGQLNLIQLCVHSRASRCSKIARWMGVEDWWNRLAYSGLPIPISACTKQLLLETMKAKQWGQEEFESRGLYRDPAWVAESKMEQRILIWHIATEIYLCWYKDQEKKQXTADLMETAQALSNHMLFLLASRPHMLPPDASRNDYLVLCYAITRHLRYSTAEDVLHLLQLNADALRTNSSKPKFKLTCTNTNRLGDKMLRGGCSLGAFLIDRQDSPADGTGTLEMICQVWAQMLCCCGEQCSTDSHVKQLSSGGELVTVTALVAKYIGVGVAGKPPRGMGLPHWAPMGRRPRHR

SEQ ID NO: 180479 - protein, 36 aa, Oryza sativa
  Clone ID: PAT_MRT4530_77842C.1.pep
MVHHRPLLNPSYRKKFHLAGPFTSQNILAPTQDYPP

SEQ ID NO: 180480 - protein, 766 aa, Oryza sativa
  Clone ID: PAT_MRT4530_77843C.1.pep
MAGAEAVSAAWKEWALQALVLLSLMVQVTLLILAEFRRYIDSGVLRAFIWSAYMLADGTAIYVLGHLSVTSRSPEHELLALWAPFLLLHLGGQDKITAYAIEDNRLWLRHLQTLVVQVAPAAYVIYGSSIVIVGDSRTLLLLSATILMLMVGVAKYGERVWALRCAGSSPTGKYESDIARRRFSQMVPESFIRRLDPAETLLLNAHLLLDFAKDRFKGPLPRLFLCGPMNEGSRLQGEDELYKVAEMQLSLLHDVFYTKSEITHTWYGLCIRVLSSLATTVAFFLFNILLVWGNHHQHKLNGYSRADVIVTYVLFVGAVILETMSLLRAMFSSWTCALLVKKGSEGSNVCNFLAHIPACLRRLVRAAYWRRRRSWSRSMGQLNLIQLCVHSRASRCSKIARWMGVEDWWNRLAYSGLPIPISACTKQLLLETMKAKQWGQEEFESRGLYRDPAWVAESKMEQRILIWHIATEIYLCWYKDQEKKQAEATSGSGSAAEEEQAAATGGSGSAAEEGQAEAASGSSSTAEEDQAKAVGGSVSAAEGEQGEVANGSSSAAGEEQPEVVDGSGSAADLMETAQALSNHMLFLLASRPHMLPPDASRNDYLVLCYAITRHLRYSTAEDVLHLLQLNADALRTNSSKPKFKLTCTNTNRLGDKMLRGGCSLGAFLIDRQDSPADGTGTLEMICQVWAQMLCCCGEQCSTDSHVKQLSSGAMSTSSMVIERSLDNAEDGFVRAATIELRPLKLADSLRKEKMEIAITSVDDDNQ

SEQ ID NO: 180481 - protein, 60 aa, Oryza sativa
  Clone ID: PAT_MRT4530_77844C.1.pep
ARLRGRHPLPSHSHLSKTLGQTPPPLPPWLPRWSPAAYCSDTCLTRPTDSSFNILAPCRP

SEQ ID NO: 180482 - protein, 60 aa, Oryza sativa
  Clone ID: PAT_MRT4530_77845C.1.pep
MGAQGSGCRRREWAERHEECAECAATRAGDLDQSLFILQVIPIRELDVAGEPPLEAVCLL

SEQ ID NO: 180483 - protein, 36 aa, Oryza sativa
  Clone ID: PAT_MRT4530_77846C.1.pep
MVGASAVTGGALRRWSAAVKRLSHIYRRLQQWPAGA

SEQ ID NO: 180484 - protein, 95 aa, Oryza sativa
  unsure (1)..(95): unsure at all Xaa locations
  Clone ID: PAT_MRT4530_77847C.1.pep
XXSPDRXLLLXXXSRTQXSXPGRXXXQLAVAKXSXVXCHXVHLTTDXWSNXMAQDXNRGRXDXXTLDYRRHRHXXTSSXXMIAPSGTXSRGXPPN

SEQ ID NO: 180485 - protein, 100 aa, Oryza sativa
  Clone ID: PAT_MRT4530_77848C.1.pep
MHLTLEFGGGLELLLEKSTKVHKVDLQPNDGDGKVVMKGLLAWVKSNLIKERPEMFLKGDSVRPGVLVLINDCDWELCGGLDAELEEKDVVVFISTLHGG

SEQ ID NO: 180486 - protein, 90 aa, Oryza sativa
  Clone ID: PAT_MRT4530_77849C.1.pep
KMDIFLHLMLVSKFFTIYFLDLSTVHHCIIHLNVYALQEQGLITMTQLLACLACSYSHHRSAIRNLLLSLSPMNPPVSQTCSSIQTSNLD

SEQ ID NO: 180487 - protein, 107 aa, Oryza sativa
  unsure (1)..(107): unsure at all Xaa locations
  Clone ID: PAT_MRT4530_7784C.1.pep
SFFLIRQGLVSPYGYXNMYTRGHCNLSIYRSIQLLLAHRHPLYRGFYLSSDGIWHLTRGCIGFQSPVKGXVLRSAGPSESIGYIGVVQGCNASISWIALVWLIYLPT

SEQ ID NO: 180488 - protein, 80 aa, Oryza sativa
  Clone ID: PAT_MRT4530_77851C.1.pep
MGWPVRPASARSDRIRLRRLGIGHPEQHHPAHMAGRSDRPIPAGQTSVDAAVRPALTWRSDRRCQPVRPALARPHSERTI

SEQ ID NO: 180489 - protein, 304 aa, Oryza sativa
  Clone ID: PAT_MRT4530_77852C.1.pep
MAKFTLDDADDDPPVATARDKRKRDDGPADAEDEPPRARGSAVAGREPAAPGAEAEAAGRRGPAEEMANGEVEGGLSVQIDPDVLDCSICFESLRPPLYQCQNGHVACFSCWSKLSNKCHICSRDAKFARNIALEKIVESIKSSCSYAKWGCCKFINYAQRDAHEEACLFAPSVCPISNCGYRGFTGRWSGHFLTSHSSDVMRFIYGQPFEVNIEVSVPFLVFLGEDDHLFLLQNNNLTPFGHAFSVVCLRSGNLNWMFSYQIEATSRKKPENRLQLKASVTNTRQWTALIAIPLRQDWGCVIG

SEQ ID NO: 180490 - protein, 1026 aa, Oryza sativa
  Clone ID: PAT_MRT4530_77853C.1.pep
MIIRCIILRAALVSMGGKVSGRSSRCTWSGFSSLHYRNSQDISLATTPCTATSLSQLPPPIPSSSAFATADDLSALLAFRARVSDPSGVLRRGNWTAAAPYCGWLGVTCGGHRHPLRVTALELPGVQLAGSLAPELGELTFLSTLNLSDARLSGPIPDGIGNLPRLLSLDLSSNRLSGNLPSSLGNLTVLEILDLDSNNLTGEIPPDLHNLKNIMYLGLSRNELSGQIPRGMFNGTSQLVFLSLAYNKLTGSIPGAIAGSVGSLSKLEMLVLENNLLSGSMPAAIFNMSYLQAIAVTRNNLRGPIPGNESFHLPMLEFFSLGENWFDGPIPSGPSKCQNLDLFSLAVNNFTGSVPSWLATMPNLTAIYLSTNELTGKIPVELSNHTGLLALDLSENNLEGEIPPEFGQLRNLSNLNTIGMSYNRFEGSLLPCVGNLSTLIEIFVADNNRITGSIPSTLAKLTNLLMLSLRGNQLSGMIPTQITSMNNLQELNLSNNTLSGTIPVEITGLTSLVKLNLANNQLVSPIPSTIGSLNQLQVVVLSQNSLSSTIPISLWHLQKLIELDLSQNSLSGSLPADVGKLTAITKMDLSRNQLSGDIPFSFGELQMMIYMNLSSNLLQGSIPDSVGKLLSIEELDLSSNVLSGVIPKSLANLTYLANLNLSFNRLEGQIPEGGVFSNITVKSLMGNKALCGLPSQGIESCQSKTHSRRKMNKPGKMPLPSDADLLNYQLISYHELVRATRNFSDDNLLGSGSFGKVFKGQLDDESIVTIKVLNMQQEVASKSFDTECRVLRMAHHRNLVRIVSTCSNLDFKALVLEYMPNGSLDNWLYSNDGLHLSFIQRLSVMLDVAMAMEYLHHHHFEVVLHFDLKPSNILLDNDMVAHVADFGISKLLFGDDNSITLTSMPGTVGYMAPELGSTGKASRRSDVYSYGIVLLEVFTRKKPTDPMFVNELTFRQWISQAFPYELSNVADCSLQQDEDSIILNICLASIIELGLLCSRDAPDDRVPMNEVVIKLNKIKSNYYSLW

SEQ ID NO: 180491 - protein, 518 aa, Oryza sativa
  Clone ID: PAT_MRT4530_77854C.1.pep
MAGRHTSHTMEHKLLKAVATGDADLLAQALGIWPTATAEQGDVDQSCCLKGVTAEGSSVLHIAASRGHLKLVVMICTHDISLIKSRNNQLDTPLICAARAGHADVVDYLVRAASAMQEPERSVLRAWNSGGATAMHEAVRNGYAPVLQKLMSSDSGLATAVLGGCVQPARYGRQQATRGQMEKPRCTLRSTSVKGFTTPTLVFRAHAFQTAKREMSESLRRWEPTLAEKVDIDGRTALHYAVLTGETGLVELLLDNSSAAYIPDNDGLFPVHVAAIAGKASVTRMLMEMCLNCDELLDNKQRNVLHCAVEYGRLMVVWYICRNPKFTRLLNAGDCEGNTPLHLAVKHGNAIIISCLMMNTRVNLSIINHGGSTPLDVAFNKSTRYYSLSWLSSTSITMCLQACNAYTSRFLNRADKRFLEDKEESSVYTNVSQSILCISVLIAAGSFAAAFTPPGGYIADGEDAGMPLLKEYAEFSSYVAANSMSFYCSTFATCLLVHDSLTNRRVRNSQRLSLRNWN

SEQ ID NO: 180492 - protein, 57 aa, Oryza sativa
  Clone ID: PAT_MRT4530_77855C.1.pep
LHLRIKSNRSKFGSNQITAKSITIRSTSEHTIKSQASNPYQQQQQQSQIQPHPSRSP

SEQ ID NO: 180493 - protein, 303 aa, Oryza sativa
  Clone ID: PAT_MRT4530_77856C.1.pep
MLCPCGARRGMMAWRPTQCLGACTAHDELVRMPDLEEEGGEKQGCGLTIAPLFSIIVSGRDSDGASEVARRACPLPESGPTPREADEGGEAGREICASQVGELLDPTRRSLDLASPLFIGSTHASVNPYNSVHDKMERKKKVAHGVIPTRRAEERGSRYPVALGRRDARQSDARDVEGNYLPRINMSARAMTVLFMRKGSTPRELVALAGAHTVGFSHCGEFAHRLYSFKSARALQSSCTNYRSDPTISIFNDINRIAATALVPSLPPPQLADPRIGEAEHPGELDEDGVEHGVAFEQLVSRG

SEQ ID NO: 180494 - protein, 48 aa, Oryza sativa
  Clone ID: PAT_MRT4530_77857C.1.pep
INIFIWGELSIVLYKLGKTGIVCLEIWNSCNCKLHHISPFSRAYAFYS

SEQ ID NO: 180495 - protein, 116 aa, Oryza sativa
  Clone ID: PAT_MRT4530_77858C.1.pep
RIWMLERWWHCHPASSFSSHRPLPRAFLRVGRQPPTPFLAAGSSGHELEVVRSGDPKLLITGSSCSDGGEPCGRRDMRGCIMSGELRCCFSILFFWATRVIVATSYDDHDDGRLVV

SEQ ID NO: 180496 - protein, 61 aa, Oryza sativa
  Clone ID: PAT_MRT4530_7785C.1.pep
FHCPSFYNFVTEKTLSFPNLFPLQNFPFSPVGLLPKRPPPFPFPNICPPLFAIGTPPFPAL

SEQ ID NO: 180497 - protein, 123 aa, Oryza sativa
  Clone ID: PAT_MRT4530_77860C.1.pep
MLEGLVIGMSLVCSEWQGSSCERTRWHLWLARTACSAWSARNSDASSWQLPVVERGWRWHHQHGCGRGARVARTAQRRRQGHGTGGRGAGIERKEMREPTCGPKSILELLHNFSHLFNQKLLF

SEQ ID NO: 180498 - protein, 75 aa, Oryza sativa
  Clone ID: PAT_MRT4530_77862C.1.pep
LVSSSSAPALADAYDIPWVEKYRPTRVADVVGNSDAVARLQVIVRDGNMPNLILFGPLGTGKTTSLLLLGHELVG

SEQ ID NO: 180499 - protein, 399 aa, Oryza sativa
  unsure (1)..(399): unsure at all Xaa locations
  Clone ID: PAT_MRT4530_77863C.1.pep
MGRHGMSRGAAAGDGGGCLPMPVISAEVALAVIDASISVAAFVQLARIHRHDQQHGWTRQKIFHFMIGLCNLVFLVYFVSTIIATSSPQILLLASFLLLLSFWVDLCHQTNDEDEEDTRSHHEALLDRTKNKPGIRHVNVRLRCATRVQLGCWQEFVISALLLPFVVTIILPSLTWVGRGENRVVTLFXGIDHPLHRIHNGGLPLHPLTRPSSQALFNQKTNRXCGNFSLFNLLEFYQCVICALASSSFLTGCWYKDGYXLYWYSADEYIINNAIILFMYYFIGSSIPSGFVLWVMKDIPHRQTVERPTQSRVVILFRDRPSPTQDPQWRTAVTSSNKGVLILAAGMARYADFNLSACYIIQLLNKVDRLLVTAPLESKLPLSSERYARLNNQPTSRNT

SEQ ID NO: 180500 - protein, 390 aa, Oryza sativa
  Clone ID: PAT_MRT4530_77864C.1.pep
MKQLHKSSPTHAPAAAHAPASKASKASRPGPRSWVGYLLREQRLLFVLLGALIASSFFLLRPYLFSLSPSSHVPDRRPLFSFASHTSSASGVPPGFRPPPRRVVVTGGAGFVGSHLVDRLLEQGDSVIVVDNFFTGRKDNVAHHLRNPSGCSVEILGRRDRFVSCDAQVTNVMGTLNMLGLAKRIGARFLLTSTSEVYGDPLEHPQKETYWGHVNPIGVRSCYDEGKRTAETLTMDYHRGGGVEVRIARIFNTYGPRMCLDDGRVVSNFVAQALRRQPMTVYGDGKQTRSFQYVSDLVAGLMALMEGDHIGPFNLGNPGEFTMLELAQVVKETIDPMATIEFKPNTADDPHMRKPDITKAKHLLRWEPKVSLREGLPLMVKDFRQRILDE

SEQ ID NO: 180501 - protein, 67 aa, Oryza sativa
  Clone ID: PAT_MRT4530_77865C.1.pep
GRVLEYHPQLLKEHISGTERPNFHHLSVVDQFRKQFTQVEENLNGSGAAVSLQRKHSSLPRRAFNYR

SEQ ID NO: 180502 - protein, 78 aa, Oryza sativa
  Clone ID: PAT_MRT4530_77866C.1.pep
MAPFAAGGSPGARAWPLGSRGAAAAWQPAGRRRHRGWEAMLRPRRASASPLSLCPCAVGSRESGSGGRQGEDRMGRRG

SEQ ID NO: 180503 - protein, 352 aa, Oryza sativa
  Clone ID: PAT_MRT4530_77867C.1.pep
MADEWWSASQRSHGTSACSAAPSPLTADRVSCGWTSPAAAAAAESTSSITFQDPSRSSAAHHQPLSDAASSLGDPHMVDWTQAFLSGRSDASFQAVLQDDMAASTRPFRAQPTAADEAVMTNPFRDMGVGQGLLLDQASAPLHGLSFDAGEPAVAPATHSITTSFGDYQHSASYDAAAAVMQFSQTPRAPSLPAAAQMQFLSGSYQLPFGGAPPLPSQLLLQAMQPKPSCSSNANTLLAKVRKEKLGDRITALQQLVSPFGKTDTASVLHEAIEYIKFLHEQVASLSSPYLKNGNPLQHFQQKGSESTKDAEQPKPDLRSRGLCLVPVASTYTVASETVPEFWHPTFGGTFR

SEQ ID NO: 180504 - protein, 76 aa, Oryza sativa
  Clone ID: PAT_MRT4530_77868C.1.pep
MAVWCEEEARAQRDGAEAILVGRRGRGALAWSTREGKKKRVTATQQPKGRGGRVGGVDVGFVGTWRGGKLEFLYRA

SEQ ID NO: 180505 - protein, 102 aa, Oryza sativa
  Clone ID: PAT_MRT4530_77869C.1.pep
MASWRTRWLEGEGSHRLEDTNIGLCASEQVVMGDLFSSEVEDGLGKRVEEMLSKNLVAELCLSRLYSIVPKISKVSFSFFTCKIASDESDCVASRWTDEDKG

SEQ ID NO: 180506 - protein, 35 aa, Oryza sativa
  Clone ID: PAT_MRT4530_7786C.1.pep
RSNDNATILLDHEDCTLTGGGPQTETLMAQRQKSI

SEQ ID NO: 180507 - protein, 165 aa, Oryza sativa
  unsure (1)..(165): unsure at all Xaa locations
  Clone ID: PAT_MRT4530_77870C.1.pep
MVILSYVRPSNLMLTTPTVVNCQGVYERGLLDIMSTKGYLYPKTMFDAFQGVEVVFHTAAADPDINDFQLHYKVNVEGTKNVIDACVTCKVKRLIYTSSSGVVFDGVHGLFDVDESMPYPNKXYYVTDAYAQSKAEAEKLVRNSNGICELLTCSIRPGSIFGPGD

SEQ ID NO: 180508 - protein, 39 aa, Oryza sativa
  Clone ID: PAT_MRT4530_77871C.1.pep
MASSGFDSSQPTWNRGIVDKGSVRQADCDGCDYGCSCAQ

SEQ ID NO: 180509 - protein, 74 aa, Oryza sativa
  Clone ID: PAT_MRT4530_77872C.1.pep
FSLPSELFLLDRRMQQLIERRGATTLLRLYQSPIVSGRSTDHSSQPSIHYNKQLAWRPIDRSIICRFDSIRWRA

SEQ ID NO: 180510 - protein, 53 aa, Oryza sativa
  unsure (1)..(53): unsure at all Xaa locations
  Clone ID: PAT_MRT4530_77873C.1.pep
GFFFFFVKEMGRDWGIXYQVEGGLPIDLPIVGDFTISVFHRGGIKFPPLKGRF

SEQ ID NO: 180511 - protein, 85 aa, Oryza sativa
  Clone ID: PAT_MRT4530_77874C.1.pep
HQSEPPRHGRPGGFVLAAGGEAPTPCPLPYPPGGDCVRRPPSPSTILRRPRTAGNEHGLEGVTRCPNACHLYKMCGSTNYLSYLD

SEQ ID NO: 180512 - protein, 211 aa, Oryza sativa
  Clone ID: PAT_MRT4530_77875C.1.pep
AIAHGLGMRRVGLVFTQAVGRKTSDTGEYTMSNREVLQATELQAEGGIPEWVTAIVKLEVGDDGSGDVHFEAFQMSEICVKLFKDGVLETEIGDKDDPRLSKMRKEVVAGGKDTMEVDNDFFLVPVKISDHQGPLSTGFPIENRGNPVAMSALKSHLDRAKHLPFVKRISDFHLLLLVAAFLDIKADVPALTACVKNQSVVPEGYQLLIES

SEQ ID NO: 180513 - protein, 107 aa, Oryza sativa
  Clone ID: PAT_MRT4530_77876C.1.pep
MSSRYVEMLDMGVRIAARFHSHCPHTARMYYKPPQTTADHGGAAAGKQVVAAGFRFEAVSSSSAGAMAVAAAAAWEDRGFRATAPSGFDFEFDTAQAVVVYDHVAAV

SEQ ID NO: 180514 - protein, 206 aa, Oryza sativa
  Clone ID: PAT_MRT4530_77877C.1.pep
GEDGHIFEDESDYDDDDDEVGSAGQARRQAGQTAGTPPVRPAHDVRSDRPGSSGSGTVDADQDEFFDLCLPGFGGLTGDLPTVRPVASGGQTGGIRAVGPQPSRRSRARVRPLTGGSHLSDPSSSSRPNPSRAAPPPPFQFGRAFPSSPCAAAAPVVVVARKGRHRDHQAVADLVRPSVVAVVAGAPPSSSSRSRRRFFLVAVAVR

SEQ ID NO: 180515 - protein, 93 aa, Oryza sativa
  unsure (1)..(93): unsure at all Xaa locations
  Clone ID: PAT_MRT4530_77878C.1.pep
ASVGRKQGRILVFGAPKKKKSVFKEGGRNLDILRGETALMFLFFIVVIWFFVCFFIVFFSLXFFFLLFKFFFLSFFLFFFYFFFFFFFFFFFF

SEQ ID NO: 180516 - protein, 322 aa, Oryza sativa
  Clone ID: PAT_MRT4530_77879C.1.pep
MHSYVHNYGRMIRGDAGRPYQIVLHNRWMATPHGHSRKSRRMDLMDGVLRSIDRPKLDRSDGRRSARGSPVHGDRLSSIELYNWRPTTGHSDCSLSFQRISPRRLQCPVPSIDRDMVISNGANAIDTFMHARAANGGAYLASYDIDRLVTCLARSIDRDSRTSKLVHVECTVYGSVNPWIYMVRTTPVIEGRPELRKRSIAARCRKATLQYIHRYYRSARAGQCRRPTGRRTSRSAGEGRPRPKLGQTQPAHGERQRPPPPRGCRTRGDGEALYARLRVRRMAAGEHRCERAPARCVRMVRRGGGSIDRYHRWPNTYSRTLQ

SEQ ID NO: 180517 - protein, 421 aa, Oryza sativa
  Clone ID: PAT_MRT4530_7787C.1.pep
MSSSSSDVISGGNIAVAIVSVITGGIVVIVVAILIYKCCKLRMWRKYGLSPPELPASQPPRPRSDDDRAVAALTTTTVDVIKERPVRFSSPQLREMTGDYAERLGAGGFGVVYKGQIPGGLAVAVKVLGSDMGRRAEEQFMAEIGTIGRTSHVNLVMLYGFCFDADLKALVYECMPKGSLERYLFFLDEQEQGLGFHKLFRIAVGTAKAIRYLHDECARRIIHYDIKPGNVLLDEELEPKVGDFGLARLCDREKTHLTMTGGGRGTPGYAAPELWKPVPVTHKCDVYSYGMLLFEILGYMHGMESQEQWYPRWVWQRLEHGETEAVVARARAQGGAAAADKAERMCTVALWCVQYRPEDRPSMASVVQMLEAHDHVAAPTVSPFAHLDPQVIITTSSFSSLLHTDDTTGGTTSTHISHHIT

SEQ ID NO: 180518 - protein, 787 aa, Oryza sativa
  Clone ID: PAT_MRT4530_77881C.1.pep
MSRFVDKLPLFDRRPSPMEEAEGLPRSGYLGQLHHHQYYQPHSNMLPLEQSPPTSTKHTSVTLAQLLKRVNDARSGSSTPISSPRYTIELGGSKPESVSSESDDHHSDDGGSEGQPRALVLKFTDLTYSVKQRRKGSCLPFRRAAADEPELPAMRTLLDGISGEARDGEIMAVLGASGSGKSTLIDALANRIAKESLHGSVTINGESIDSNLLKVISAYVRQEDLLYPMLTVEETLMFAAEFRLPRSLPTREKKKRVKELIDQLGLKRAANTIIGDEGHRGVSGGERRRVSIGVDIIHNPIMLFLDEPTSGLDSTSAFMVVTVLKAIAQSGSVVVMSIHQPSYRILGLLDRLLFLSRGKTVYYGPPSELPPFFLDFGKPIPDNENPTEFALDLIKEMETETEGTKRLAEHNAAWQLKHHGEGRGYGGKPGMSLKEAISASISRGKLVSGATDGTVSVAASDHSAPPPSSSSVSKFVNPFWIEMGVLTRRAFINTKRTPEVFIIRLAAVLVTGFILATIFWRLDESPKGVQERLGFFAIAMSTMYYTCSDALPVFLSERYIFLRETAYNAYRRSSYVLSHTIVGFPSLVVLSFAFALTTFFSVGLAGGVNGFFYFVAIVLASFWAGSGFATFLSGVVTHVMLGFPVVLSTLAYFLLFSGFFINRDRIPRYWLWFHYISLVKYPYEAVMQNEFGDPTRCFVRGVQMFDNTPLAALPAAVKVRVLQSMSASLGVNIGTGTCITTGPDFLKQQAITDFGKWECLWITVAWGFLFRILFYISLLLGSRNKRR

SEQ ID NO: 180519 - protein, 802 aa, Oryza sativa
  Clone ID: PAT_MRT4530_77882C.1.pep
MGCGQSKIDQEEAVCRCRDRRKLMADAVQARNAFAAAHSAYTVLLKSTGGALSDFAQGETPDLVASHAHLAAPTQAAASVSAPPPPSTAAVLIAPSPPPPPFLDFSHATLQRSSSTPNIPMPDPKAATKTQLAAGASIREEDEVEDDADGHIRTESEDDDDDDEDDDSDDDHHEHDDVLVEEMVHGQPQKRVMMGSVGSSPVTPPPPPRPNPSPPATRTTPPPPMPEPQMATTWDYFFGPTTTPPPTLEQPPEESWMDKREKESVPEMKAPIMKPAVDGSAAPMHVAEEQPPQTALEKEKAIEQLAANLPPSKPLIRKPPKAAPGPPAEVRYQHASSMGAVETRKGKTMSGHIDHSTKIMHVITWNRSFKNLPNQDDFGDNFEIDERFETHATVLDRMLAWEKKLYDEVKAGELMKIDYQKKVALLHKQKKRGVKLETLEKTKAAVSHLHTSPWRKSGMLESMGNKDNLFDIKNELHSLPIRSDCFQDFVMRYWEMFDELGSIQYLVNRDGSRVNKWDMKSDMRLSYPITHVEDRMANMWSSMHHHHKWQLVIISGIRNFEAPPVPRETTDQHYKQTCDLRDIVREWHMQFEKLMDHQKGYIRALNAWLKLNLIPIESNLKEKVSSPPRLVEPPIKDLLYAWHDQLERLPIELAKTAIKSFAEVISNIVLLQEEEVNLRRRCEETRRDLNRKKAQFEEWHQRYMERKASQGEDANNSEVAEAVNSDPVADRKTAIEEVEIRLREEMGHHNRIARQVREKSLANLRMHLPELFRNMTDFAGFCYEMYSNLRKSAVLPKDEVQG

SEQ ID NO: 180520 - protein, 946 aa, Oryza sativa
  Clone ID: PAT_MRT4530_77883C.1.pep
MAAVENEGLSLNIVVLLLCFGQGKTEAFPELPAKVLIINCAIQIEVQISTAKMIKLRSALGVLEILSVLCISLVAAYTPVDNYLISCGSSVDTPVGQRLFVADDSGTVVLTSPASDAVKASPSAVSGLRDDAAMYQSARVFKAPSSYSFRIRDPGRHFVRLHFFPFVYLGYDLATASFKVSTQDAVLLDGFAPAAAARGNASTTTTTATAAAVCEEFLLDVARDTLVVTFVPLAGRLAFVNAIEVVSVPDDLIGAADSSLSTSDSTGQQLNPAVMPLQTVYRVNVGGQAVAPDSDTLWREWTSDQQLLVGPAMTKGVSYNRTPNYLPGQATANDAPAIVYATGRELIIMTNSTDDGMKQMAWQFDVGRSASYLIRFHFCDIVSSVPGRLHMNAYVDSSNAIQDLDLSAIGNGTLAFPYYRDFVLAASTPSGKLAVYVGSTSQKITTPAAILNGLEIMRILTTAGNVAVVEPTMPPGTKKKNNLAVVLGSVCGAFGFVSVAAALVIVLRRKEEKEELRTPTTSQPSTAWMPLLGRISFRSAPPSAVGSRSPSFTIDTNANTPGGGATPGMAAAASSSPSYRFPFAALQDATGNFDEGLVIGEGGFGKVYAAVLQDGTKVAVKRANPESRQGAREFRTEIEMLSGLRHRHLVSLIGYCDEQDEMILLYEYMEHGSLRSRLYGGGAATATATALSWAQRLEACAGAARGLLYLHTATAKPVIHRDVKSSNILLDDGLTAKVADFGLSKAGPDMDETHVSTAVKGSFGYVDPEYVRTRKLTAKSDVYSFGVVLLEALCARPVVDPRLPKPMVNLVEWGLHWQRRDELEKIVDRRIAGTVRPAALRKYGETVARCLADRGADRPAMEDVVWSLQFVARLQEVDGLDASDVSSLNMVHQLMPPTSLHARQRSAGESETGRTDADEDSSVVDDDYTDASMRGIFWQMVNVRGR

SEQ ID NO: 180521 - protein, 117 aa, Oryza sativa
  unsure (1)..(117): unsure at all Xaa locations
  Clone ID: PAT_MRT4530_77884C.1.pep
LEAHLRSTKLKLTXAPDIEDLVSLLLVEFDYLIKRIKLEEDDNACDNLNPCTCQEFPAXLGDANMRNLQTXGKCIQLERKGYYRCDAXPFDAGLAKPLSFSLLPDGTTKRPQRTRNL

SEQ ID NO: 180522 - protein, 340 aa, Oryza sativa
  unsure (1)..(340): unsure at all Xaa locations
  Clone ID: PAT_MRT4530_77885C.1.pep
MPGPDWLFCIRAQGGKGFPAKNPPSVTARGGQKAWTRELGSGXLARAREARLGSRTKRAEPDLPPQLVCKSSRARASSQAARKNREPYLNCSVRPSPFPIPRRRRHAAARAHDWRLAATSERSCRPPSPAPSPAPPPAGPPPLSFIPSRPSVPPARRLPPLRSPLCATGSPPPSPVWLHSFGLPPQRRSTVDGSTLPVPPWRRLPPPSPVAPLCHRLAASLPCVAAQLRPSSPAALDGRRLDAPRAAVAPPPSPVPSRPSVPPARRLPPLRHRPAASLPPLCSCAGSSLPPQRRSMVDGRWLDAPRATAALPPSPALPPASLLSAAQPPSQAGSSRLELL

SEQ ID NO: 180523 - protein, 72 aa, Oryza sativa
  Clone ID: PAT_MRT4530_77886C.1.pep
LDAKQSKYWHVASANFTTNIGPSLDDRNSDKLKNTFCRFNLLKELQLHTKFDAKVGQIARSSISTVAPLHHL

SEQ ID NO: 180524 - protein, 75 aa, Oryza sativa
  Clone ID: PAT_MRT4530_77887C.1.pep
VYTFDDLYKYIYTDVNVHMISLALPLTSPCFLTYVETYICTYIHTSCGHTHTEKQTLKHPTGKGGTNSRGPYFYV

SEQ ID NO: 180525 - protein, 66 aa, Oryza sativa
  unsure (1)..(66): unsure at all Xaa locations
  Clone ID: PAT_MRT4530_77888C.1.pep
TRSRAXXADXPGPSGXXXRPXGXXQGXXXRLXRRPSDQXQLNIGRXVYTHMLDTLXRLGXGRXXQN

SEQ ID NO: 180526 - protein, 101 aa, Oryza sativa
  Clone ID: PAT_MRT4530_77889C.1.pep
MHKSYLNLHCRLICPRKPPTPLCPSDPPAGSHRRRLIHPWKLREDAVAAIATAHAEGGHRGRCRSQWGRAPPLLAVGKGATAVARGGVVQHRSPDAWVDPG

SEQ ID NO: 180527 - protein, 152 aa, Oryza sativa
  Clone ID: PAT_MRT4530_7788C.1.pep
EKGAGPKQKTRGGKSLKPKTHRGLLKKRGQTKIFLGGGNLNGRLVPGGNNAFPAQKKRDMKGKGTGHHQFSKKKRKPLNHRLTIKNRGPIFQESQGNSLYPQGTPPRGKFGRLPGRTGQLCKNLFKRKGGGKRKELGKMEKNFPVKKKGGGG

SEQ ID NO: 180528 - protein, 102 aa, Oryza sativa
  Clone ID: PAT_MRT4530_77890C.1.pep
MASEEDMRVRNKDEGGAAIDEEPIEDQGGESDEGDDEDALGFIVLALTMAHHRRVISAATTTTTYYCDDVGGGRDVGGGSIVHVGSWREEDKRRRSSGSRVK

SEQ ID NO: 180529 - protein, 51 aa, Oryza sativa
  Clone ID: PAT_MRT4530_77891C.1.pep
PCETLPMFGCTDATHVLRELDEFKKAYPYAFVRIIGFDHVRQVQLISFIAY

SEQ ID NO: 180530 - protein, 288 aa, Oryza sativa
  Clone ID: PAT_MRT4530_77892C.1.pep
MVEDPSTDETISWNDSGTAFVVWRPAEFARDLLPKHFKHSNFSSFVRQLNTYGFKKVVADRWEFANDCFRRGEKHLLGGIQRRKGSGTGGAGAAPAGGIPTAIPISSPPTSSGGEPAVSSSPPRGAAGIAAGVSGAVAELEEENARLRRENARLARELARARRVCDGVRRLVSRYDHDHGGGEEEAGEGDVKPMLFGVAIGGKRSREENGEDEEEEEEEGADEDGEDDEVEEDDEERERHAARRVPVREGKVRRTTELSDLDVLALSVRAAAAARPGGASRDRKSSVS

SEQ ID NO: 180531 - protein, 72 aa, Oryza sativa
  unsure (1)..(72): unsure at all Xaa locations
  Clone ID: PAT_MRT4530_77893C.1.pep
SEVKLILKDHLHHIYILLEQIDPFHHRYIIYTHTNDIXSDIKFCTTQTIPSYYIHILCEYQNQNKNCPEHPL

SEQ ID NO: 180532 - protein, 101 aa, Oryza sativa
  Clone ID: PAT_MRT4530_77894C.1.pep
FIKWYFDNVHDYFLSSSGLVISCDYSYLFVHLLRKKFPIQLQKYDIAIGDITIRYKRSSYVDFSLPYTESGVAMIVPVRESINMTTWIFLKPLTPGMWFGS

SEQ ID NO: 180533 - protein, 202 aa, Oryza sativa
  Clone ID: PAT_MRT4530_77895C.1.pep
MKTFATLLHMSADSLNLCKPPTYISFVRSKHELGTRTLAEHSKEMQHRGSVLWGATSESSLRGARFRAQARMLASTERSTIPPCRGPTRGEETSAVERVAPCAPPVRALAPPVWKGFPQNHPPKNHGNKSRNNPPKSRQQIKEHAHQNRGNKSRNTNRGNKMAARRSAPRGFGKIANTNRGNTNQGRRQAPPLVPEAAAACP

SEQ ID NO: 180534 - protein, 125 aa, Oryza sativa
  Clone ID: PAT_MRT4530_77896C.1.pep
MTSLPITTVNTVLTRGQYSGGVVCCGREGGGVAGGGRRAGGQRRWGDESDLEGAVGTRGGDLGLARWPAYCGLLPLDDGAAPRLRELHPDDDGKEQTPASHALGALGGSRKMELGEGALGQRRRQ

SEQ ID NO: 180535 - protein, 195 aa, Oryza sativa
  Clone ID: PAT_MRT4530_77897C.1.pep
MVDVSRVQKELTECNRDREVSGVSIALHDGSTISHLTGTIAGPQGTPYEGGTFVIDIRLPGGYPFEPPKMQFITKVWHPNISSQNGAICLDILKDQWSPALTLKTALLSLQALLSAPAPDDPQDAVVAQQYLRDYSTFSATARYWTEAFAKNSSTGMEEKVQKLVEMGFPEDMVRSVLKSVNGDENMALEKLCSG

SEQ ID NO: 180536 - protein, 77 aa, Oryza sativa
  Clone ID: PAT_MRT4530_77898C.1.pep
RLPRLAQDLTSFIPSFLPSTIYIYHIPYSISMYYCISKTYLQYIPRVSSTIYIYYPDKMIVSFLKSGYQLFHVLDNI

SEQ ID NO: 180537 - protein, 143 aa, Oryza sativa
  Clone ID: PAT_MRT4530_77899C.1.pep
MAKARVNLTVLGLSSLVALLVLIIAVEDVAVVAQVIDYSSMNRDHIPGTPQLNHPGDIANKYTRGSRIAMAKARVNLTVVVGLSLVALLVLTAVEDVGVSADNEIGYTTMNHDDIPGTPKLLHPGGPANTYTRGCEKEQDCRD

SEQ ID NO: 180538 - protein, 132 aa, Oryza sativa
  Clone ID: PAT_MRT4530_7789C.1.pep
PKGEGARTGSTGAGPTRQPHGPRWTGCTRLTPTGAVGPRRQPHPRARAADGRTPRGNRSVRPGGRSLRRGRREAAPVPRWSPPATTGTAEQRPREGRERGKRNGGPPLTPSRKRRRKLRPELRKRRPGLGST

SEQ ID NO: 180539 - protein, 65 aa, Oryza sativa
  unsure (1)..(65): unsure at all Xaa locations
  Clone ID: PAT_MRT4530_778C.1.pep
TSXGXTXXKXRXSNTXXFSWEXQHXGHGRNXXGXLNRPXPXGXXTTXVAIVVSPXXTLWATGQXF

SEQ ID NO: 180540 - protein, 67 aa, Oryza sativa
  Clone ID: PAT_MRT4530_77900C.1.pep
RAAGIGTRKLLSADRPCPSCLWLALLRFHSALVNSPHDAQVIRAFAALMYFGSWEGAVNFLNQDIGA

SEQ ID NO: 180541 - protein, 103 aa, Oryza sativa
  Clone ID: PAT_MRT4530_77901C.1.pep
CILLPLKKQRVDHLCLLFTTACFISGACTYPLDSMRKQLHGNRCPFHSLEGDGGLGPSNYQRYSCGTSFITQYWHDNILKLTSIAILYYEKSLGSFRYYFSIL

SEQ ID NO: 180542 - protein, 230 aa, Oryza sativa
  Clone ID: PAT_MRT4530_77903C.1.pep
MELDIASDDRRKPPPQMRMAIESSLIHSSRALQSTLHLVDNGGELILVQRMLWPDHYAHDDGSYRTKRSRKYEAWRVDFDAGILVPVKGFNWRALFISMSRAISVSAETLPFVAADTIYFGYCGNLERYSLADGSIERLWTYTLRRVQCNILPREWKQPEMKENWLRVSLFKKQKKDSHYKHIALKNLHAAKVVEQTSSPGLMPIAWWPSGSATAMSHGWTPTKRVGDVA

SEQ ID NO: 180543 - protein, 105 aa, Oryza sativa
  Clone ID: PAT_MRT4530_77904C.1.pep
MEFLAGGGAAGESRESFFGFKNVITIMILAAMISITHARIALDDCMQLGYIVIKQENPWRFCFLEAVGTTRVTEPEIELAFFMHQMNHKGNNTTTLSKIELLRTS

SEQ ID NO: 180544 - protein, 109 aa, Oryza sativa
  Clone ID: PAT_MRT4530_77905C.1.pep
MDTSRSRAPEEILTMERTPLTWQQAKDKQEFASWTVKFESTKEENNQFVSAFSTQSELHGHERELAIWHSTRQPGEKYYSRYCSRAEFIRADAGSVGAALRAVTLIVAA

SEQ ID NO: 180545 - protein, 583 aa, Oryza sativa
  Clone ID: PAT_MRT4530_77906C.1.pep
MATRGKKLGGVAGGGGAAVRVVGVVCVMAVPLFALLVLGGWASASTVWQSAARLTAVTAGKMFVICSMRLFRDASGAGFTNASKPSATGDAATGADELFGGLLAAGGCFDRGACLSRHESPRYYKSSPFSPSPYLLQKLRDYEARHRRCGPGTPGYAKSDEQLRSGHSSEVMECNYLVGLPYNGLGNRMLSLVASFLYALLTDRVFLVHFPDDFADHFCEPFPGGEGETATTWVLPPDFPVADLWRLGVHSNQSYGNLLAAKKITGDPARETPVSVPPYVYLHLAHDLRGDDERFYCNDDQLVLAKVNWLLLQSDLYFVPSLYAIPEFQDELRWMFPEKESVTHLLARYLLHPSNSVWGMVMRYHHAYLAPAAEMIGVQIRMFSWASIPVDDMYKQVMACSSQERILPDTDGGDAPAPARTNTSGGGATTAILVASLQVEYYERLKGKYYEHAATASGGGRRWVGVFQPSHEEKQEMGKRAHNQKALAEIYLLSFADVLLTSGMSTFGYMSSALAGLRPAMLLTAFNHKVPRTPCVRAVSMEPCFHKPPPAAATCQGKLAVSENVTRHIKRCEDLAGGIKLFD

SEQ ID NO: 180546 - protein, 56 aa, Oryza sativa
  Clone ID: PAT_MRT4530_77907C.1.pep
MAGPVVARVGGGGDTNKWFGDGDGEDGQGSKVERAKNGAGERGDVAEITTRRTFEE

SEQ ID NO: 180547 - protein, 45 aa, Oryza sativa
  Clone ID: PAT_MRT4530_77908C.1.pep
SSQERQQHSKKLIKCGVWWSHVTHVRMTSLITSGLRGCLGETYVF

SEQ ID NO: 180548 - protein, 153 aa, Oryza sativa
  Clone ID: PAT_MRT4530_77909C.1.pep
MENSLYIKKKRVDPLEKKQIQKLHNSIVSLEKPKKIHMERQDKKTCNSTTAAIQYKSFFPGLSQDKQLRYAIAIDGLNHYSTPKQDLRSEAFKKKITSKTLTTPVYNIRLGFYPKEKKINHQHNATKKENGSYIRQHHYHQSKTGQGLRHRLL

SEQ ID NO: 180549 - protein, 196 aa, Oryza sativa
  Clone ID: PAT_MRT4530_7790C.1.pep
KRGKKKKNLGGELRGVTPAGAVGPTRQPHLRARAADGRAPRGSHSARPRAAKPAQPAGGGARAPMVAGGGHRHGRAAAERGKGKGEKKRRSTAHPRSTATTKKAAGAEEGGGAARVDGVHGVPAGGERNGGVDEVGEDAANPKEAAPRWEVVRGDDGGGPELDGDCRERERRRELYSGEEKGRREAETDGRGAGRV

SEQ ID NO: 180550 - protein, 135 aa, Oryza sativa
  unsure (1)..(135): unsure at all Xaa locations
  Clone ID: PAT_MRT4530_77910C.1.pep
SVFVRHGIDAALTWQFDPFLFFLLSPHLPLFISLPSLLLFRRERRAGGGSETGAHRREQRGPPCAAPLGSGGGTGVLGVAEVDVDVVRGHGHGVPVRIRRAPQKRRHGEWRLSCCNGGVNGGKGXRKLLASVGCR

SEQ ID NO: 180551 - protein, 502 aa, Oryza sativa
  Clone ID: PAT_MRT4530_77911C.1.pep
HEASIKCLKVLAGHRAAAALLGVLAARAAGDWLVAPDSGAALVLSSVLAGPQVCMELLVPLLRGAVVACMVMSVIVLAEKVFLGVVSAVVKLLRRRPARLYRCDPVVVEDDDEAGRASFPMVLVQIPMYNEKEDSFTGVTLAPPDKNSEQCRLTWPADRLIVQVLDDSTDAIVKELVRKECERWGKKGINVKYETRKDRAGYKAGNLREGMRRGYVQGCEFVAMLDADFQPPPDFLLKTVPFLVHNPRLALVQTRWEFVNANDCLLTRMQEMSMDYHFKVEQEAGSSLCNFFGYNGTAGVWRRQVIDESGGWEDRTTAEDMDLALRAGLLGWEFVYVGSIKVKSELPSTLKAYRSQQHRWSCGPALLFKKMFWEILAAKKVSFWKKLYMTYDFFIARRIISTFFTFFFFSVLLPMKVFFPEVQIPLWELILIPTAIILLHSVGTPSYYDQKDGTSHELHVLQSYQELPFQRQESSTLRQLRASTNCDKHMGDKNTLSKKKII

SEQ ID NO: 180552 - protein, 156 aa, Oryza sativa
  Clone ID: PAT_MRT4530_77912C.1.pep
MAAEGGGGDAAMRGGVAVAAGGGGRPPCAIPPGSGGGAGPLGVAEDAEVDVDVVRGHGHGVPVRIRHAGVPPQKRRHGERRLSCCGCGVNGRKGKRKLLAPRSGGLQLTSSVVVKRDGSSAILAAGGPPPTSAPYRRLHPLHPSPAVVLLTPVGSR

SEQ ID NO: 180553 - protein, 443 aa, Oryza sativa
  unsure (1)..(443): unsure at all Xaa locations
  Clone ID: PAT_MRT4530_77913C.1.pep
MVMYKTFAIVERFSPPEDKKQLQSLIGKVNFVRRFISNLSGRLEPFTPLLRLKADQEFTWGAEQQRALDNIKEYLSSPPVLXPPQKGVPFRLYLSADEKSIGSVYSXELEGKERAIFYFSHRLLDAETRYSPVEKLCLCLYFSCTKLRHYLLSNECTIVCXDVVKYMLSAPVLKGIVGKWIYALTEFDLRYESPKAVKGQAIADFIVEHRDDSIGSVELVPWTSFFDGSVCTHGCGIGLVIISPRGASFEFAYTIKPYATNNQAEYEAVLKGLQLLREVEADTIEIMGDSLLVINQLVGEYECKNDVLLIYNEKCQELMNSFWLVTLRHVSREQNVEANDLAQGALGYKPMVQDIEVEIVAITTDDXRYDVCRRLRSPRNGSTQSPKLGHASLAVSKENMLCRSVDTQIWESPTTACAAMRRACRLWGCAPIGSGSGDAASMT

SEQ ID NO: 180554 - protein, 538 aa, Oryza sativa
  Clone ID: PAT_MRT4530_77914C.1.pep
WRPGEGRWPAGRRGGVQRWPPEEEEMQPCGEAWRWQPEEEDVRRALLPPVVAAARGPWESPRMPRSTSTSSAATAMASPSASGVRHRSGGMGSGASAAAAAASMGGRGSGSSSLRWAAADELGGGETRRIERHPGGWGPSSDLCSRPPPSSSSPVAGCRPPRSGGRSLTSSVVIEIWGDIGGELGAAEGLVEAAECSSGGELAGSVEPVEGAVAGPVEGGAVAGPVEASAVASSAEPHKLVAAGAGERCSVGHAIGIEAMDVLDTLVVRFHIKGEFVTEDDDSESDADMEVESDKESEEAVEVDVAQCKATAAQCDQTNASGLKGKSVMEGDEDDRMLVVYYPESAPLASLAPSESESDSDYIPGDVCPSDDDEEAAEIEKHYKEVKKKIKTGQLEDLDAVFFEQDRSKPIEELGSDGEVRIRQDKHPRYKKKDGVPTFELGMKFNCKNQFKKAITKYALAEKKVINFIKDDQKRVRGKCDWDTCQWVCLLSKNSRSDSWQIVTYESLHACPPRRDNKMVTATRIAQKYWKFIAANPS

SEQ ID NO: 180555 - protein, 370 aa, Oryza sativa
  Clone ID: PAT_MRT4530_77915C.1.pep
GNKTDIVISKYEGSFMVSYTLQVLFIRLDDKFSHIKYAHLIIKSTVLSKFETFSSQLFADVSERTVRIHPQFRIHMLVRLSPSCKKARKLLSIDFGVHVRKDESVFSDPTYNVLFGKRDEPLLLACARQLIEHIRRRRCLGRFQGPSALLWHHDCSQELSQLTLALQDVSLSGEEDLRLSPLSQQGDLTTREIYHTLLPPSETDLVHNFIWKNASPPKFKFFAWLLSKDRLSTAKNLFTKIILQSPQCAIRQTGEETSNHLFFMCPFATAFWTTIRVPPNVTEVSNIHLLARPPNIPSKHFKTFYLLCFWGLWNRRHDVVFRDFQPSVQRLILRCKEESLLWAERLKVNDRLEANVWCNIFSNSLSSLHP

SEQ ID NO: 180556 - protein, 51 aa, Oryza sativa
  Clone ID: PAT_MRT4530_77916C.1.pep
ATAKHCRYPAVTIIVLRSAFSFWFVILHEGGEFVADVNHDTSILMEVCPVK

SEQ ID NO: 180557 - protein, 62 aa, Oryza sativa
  Clone ID: PAT_MRT4530_77917C.1.pep
GKIIECLFSWMGPLGTLQYFVFLPRNFILLRSLFGFFVKQPAGLVRHFACKQVLCSWEVCWG

SEQ ID NO: 180558 - protein, 119 aa, Oryza sativa
  Clone ID: PAT_MRT4530_77918C.1.pep
KKGGAKYVSPPFLVGPVLCRPIFGPGGPYFVRLFWEVPLLKVPRQATRAPGCPSKKPGPGPPVFRDQPWDSLGRHSWGSPLMGFPKKIFPLFLFQKKKKKKKKKKKKKKKKKPKKKKTH

SEQ ID NO: 180559 - protein, 61 aa, Oryza sativa
  Clone ID: PAT_MRT4530_77919C.1.pep
MATASSEGRRSGARRAGREGNAAKEGLGLGNLVEHFRIGSQLGVACRWFRPNPIFAIGIHF

SEQ ID NO: 180560 - protein, 209 aa, Oryza sativa
  unsure (1)..(209): unsure at all Xaa locations
  Clone ID: PAT_MRT4530_7791C.1.pep
MVYCVSRGGGACGPGPREWGPRGSLTVHGGPGAPGLTPIGAVGPTRQPHPRARAADGRAPRGSHSAHPRAAKPARTAGGGAXRAPMVAAGDHRRGGAAAERGEGXGERRRRSTAHLGATAAMREAAEAEGGGVAARVDGVGGAPAVGDRNGEVDEVGEDAANPKEAAPRWEAVRGDDGGGPELGGDGGERERRRELAKTDYPVPGPALH

SEQ ID NO: 180561 - protein, 97 aa, Oryza sativa
  Clone ID: PAT_MRT4530_77920C.1.pep
MGGCSSKSKKAKNQKGNSNAEAKATTTTAGQQPPAAASTCGMSARASRRTNNDSDPRRQSPPFTVEATDLPPPPPTVVGGTGSAAPTSRSHCRLVSA

SEQ ID NO: 180562 - protein, 100 aa, Oryza sativa
  unsure (1)..(100): unsure at all Xaa locations
  Clone ID: PAT_MRT4530_77921C.1.pep
YHFVTSRLPPGRAHLHLIAFIXNKLPSQTNTCLFCTLCPHSCTPTGKXFPVGHPSQIAPSQVRLTLESXXDWLPKKKLQLVDMSILLILLSLRAGILQTA

SEQ ID NO: 180563 - protein, 95 aa, Oryza sativa
  unsure (1)..(95): unsure at all Xaa locations
  Clone ID: PAT_MRT4530_77922C.1.pep
MGKTRGMGAGRKLKTHRXNQRWADKAYKKSHLGNEWKKPFAGSSHAKGIVLEKIXGIEAKQPNSAIRKCARVQLVKNGXRRLLAFVPNDGCLNFN

SEQ ID NO: 180564 - protein, 142 aa, Oryza sativa
  Clone ID: PAT_MRT4530_77923C.1.pep
MGKTRGMGAGRKLKTHRRNQRWADKAYKKSHLGNEWKKPFAGSSHAKGIVLEKIGIEAKQPNSAIRKCARVQLVKNGKKIAAFVPNDGCLNFIEENDEKMIAGFGRKGHAVGDIPGVRFKVAKVSGVPLLALFKEKKEKPRS

SEQ ID NO: 180565 - protein, 106 aa, Oryza sativa
  Clone ID: PAT_MRT4530_77924C.1.pep
MELRKRRASTSGRRRDSGMDCVCACAVTWVDTMSSWSSASRRSATATATGTHRRCHRAARHEKDGGTDGRYRGAREVLQAAQCSPRENERFSIMAIVAHRHRPGLL

SEQ ID NO: 180566 - protein, 91 aa, Oryza sativa
  Clone ID: PAT_MRT4530_77925C.1.pep
MGIGNKKDLLLTWLHRTTREPHTGIAAAIKENEGLATTSLEHFRHLAPGAPDRMAGTLHFPFTAMGRELGKRVNWEEWRMEMEKRERRGPR

SEQ ID NO: 180567 - protein, 80 aa, Oryza sativa
  Clone ID: PAT_MRT4530_77926C.1.pep
GFPESFKSAASSLRYVHIDACEGLEKLPSCIAEFSSLREVRIYNCPALSTRCGDVSGEDYHLICHVPEIYIDDILLSEEA

SEQ ID NO: 180568 - protein, 282 aa, Oryza sativa
  Clone ID: PAT_MRT4530_77927C.1.pep
MAGFSHLPQQMEHGLITNNGFLFCHGSHGGAATTTAPAIPEDASMETSSVVLDTSPQDKKRKPREEDTASLNSAHSKEAKENGRKRGGKKHSRDQMEEEAPQGFIHVRARRGQATDSHSLAERVRRERISERMRMLQALVPGCDKVTGKALILDEIINYVQSLQNQVEFLSMRIASLSPVLYGFGIDSDAFSDHSQKMEGMFHEAVAIPASVLNRGSSPAQSHAIMDTSNTSPTPYTLQVQGGSNNNSLSQDNGSYIMQTVGEPRQELFNQVVLNNYMCSFQ

SEQ ID NO: 180569 - protein, 120 aa, Oryza sativa
  unsure (1)..(120): unsure at all Xaa locations
  Clone ID: PAT_MRT4530_77928C.1.pep
KXNPFXGFLGVXXEXGGGWXXPKXGXFQXVPXXAFCSXRGXXGFHGRQXPTLVXXXQGTQXGXXEVIDXVSGGSSNGEGXRLEXVLNFXXPSLAXXCMXVILLLYADVAXAGXAGEXSQX

SEQ ID NO: 180570 - protein, 88 aa, Oryza sativa
  Clone ID: PAT_MRT4530_77929C.1.pep
MHYGDCEMRLQRIDIRVHVQDDDVNMFGGWGNSGRITDVGARGPEKGEAGARGFLSPLPVSSNPDSNLSMVQPDEHLGPCSRVVERLG

SEQ ID NO: 180571 - protein, 1916 aa, Oryza sativa
  unsure (1)..(1916): unsure at all Xaa locations
  Clone ID: PAT_MRT4530_7792C.1.pep
MSYYVDPNTSVPQYPLYPVYGYPPSTVARQVGELGIQGSTTMPSSFVDNNANTSFGQVLSTLIMLVWTQVGEIVYPVYTTMPISTGPPMTGNENAVATNQDTSSSKNPPVETENGLPTTSKFVKDSDAARPCPSDTNRGPTKMTSKTTRSWCPIHKTKKHTLQDCWVFVNVRAEIRACKERGIQRTSPTRDVYCPIHKTKNHDLSSCKVLLGAMKTPSPKSYVPVKDNGKEQGATPAPDRFVGVIDLNPYEPSVLHLLEDYGSSTSDAARAVLAIDDVGTSAQANAETANQSTTPAQHIRAVQAILRETPYDPVLNNDLEQRRESPQQATPPPRGTGDLRDQINGRREARRTRDDVNRSRRHVSSRRHDRRSRPNEDRDYDNRDRRGSDNTGHGRRRNDEDEEDRRRDNSERRRQDSRDPGRHPRNRTPEQSDPSSSSSSSSASSSSSDRHPRRSRDHRQPTAPSAGCRAFGRSLSDVRWSKRFRPGAIEKYDGSTDPEEFLQVYSTVLYAAGADDNLWQQFVANFQGTYKRHAIEDDLHALTQNSGEYLREYVRHFNECRNTIREITDASVIRAFKSDVRDRYTTQELATRRITTTRRLFEIVERCAHVDDALRRKNDKPKTGGEKKSAADTSESNKNKNRKNGKRKAQAEVLATEYANPPKCPDPQGSDTKKSWCPIHKTDRHSLEDCLVFKKSLEKHMAFEKGKRVRVVEKDEESPRHESDSAYPDSDLYVSHIFGSSTTYSSKREYKKVEREVCSTWQGAAPRMKWSEQKMEFSEADHPKTSVIPGRYPIVVEPTIRNIKVARVLINGGSSINLVFTSTLDAMGIPQTYNAIIGRTALAKFMATSHYAYQVLKMPGPKGTITIQGNAKLAVQCDKRSLDMVEQTPTPPATSEPPKKELALITFLRDNADVFAWQPSDMPGVPREVIEHKLMVRPDAKPVKQRMRRFAPDRKQAIREELDKLLKAGFIREVLHPEWLANPVVVRKANGKWRMCVDFTDLNKACPKDHFPLPRIDQLVDSTAGCELLSFLDAYSGYHQISMTTEYEEKTAFITPFGVFCYVKMPFGLITARNTFQRMVQGALSNQLGNNVEVYVDDIIVKTKTSDSLIDDLRETFDNLRRYRLMLNPEKCTFGVPSGKLLGFLVSGRGIEANPEKIKAIENMKSPTRLKEVQKLTGCMAALNIFVARMGERGQPFFALLKKQDRFVWTQEAEEAFIALKRYLSNPPVLVAPQPNEELFLYIAATPYSVSTVIVVEREKVQRPVYYVSEALHEAKTRYPQIQKLLYVVIMTSRKLRHYFQAHRVTIVSSFPLGEVVRNKDVVGRIAKWVVELSQFDVRFVPRTAIKSQVLADFVADWTMPDNKATNNTAEYEGLLAGIRAAAALGAKRLIVKGDSELVANQVHKDYKCSNPELSKYLAEVRKLEKRFDGIEVRHVYRKDNVEPDDLARRASRREPLEPGTFLDILTKPSVKEVSGEVGPSTPDISSKVTEAERAVADIETTDDWHTPLIKFISSEELPEDDTEAEKITRKAKIYCMIGNDLYKKAPNGILLKCVSTDDGRQLLLDIHEGICGSHAAGRTLVGKAFRQEFFWPTALKDACDMVQRCETCQFHXQAHKATCTSASNNPSDLAVLLLGARHTWAIPTRTRRLQIPIXVAIDKFTKWIEAAPTGEIKADNAIKFIRGIFCRYGLPHRIITDNGSQFISADFQDYCIGLGVKICFASVSHPQSNGQVERANGIVLQGIKNRVYDRLMSHDKKWVEELPSVLWAMRTTPTTSNKGTPFFLVYGSEAMLPGELRHQSTRVQKHSDENREEQRDIDVNLLEEHRERVAVRAASYQQALRRYHEKRIRACILSIGDYVLRRVQTQAGRNKLSPKWEGPYTITQALRPGAYKIADDDGRELANSWNIDQLRKFYV

SEQ ID NO: 180572 - protein, 232 aa, Oryza sativa
  Clone ID: PAT_MRT4530_77930C.1.pep
MAIDLGCHVGCASPETKQEETADPTAAPVVVDDVEAAAGGRRPGDGGGVNYVARAQWLRAAVLGANDGLVSVASLMVGVGAANGTRRAMLVSGLAGLVAGACSMAIGEFVSVYAQCDIQAAQIERARGGKDADGGEEEEELPSPTMAAVASALSFAAGAALPLLAGGFVRPWAARVAAVCAASSLGLAGFGVASAYLGGAGVARSGVRMLVGGWLAMAVTYGVLKLFGMHGV

SEQ ID NO: 180573 - protein, 516 aa, Oryza sativa
  unsure (1)..(516): unsure at all Xaa locations
  Clone ID: PAT_MRT4530_77931C.1.pep
MAAAAAALASSPMVHLTASRLRLPRPARSPAAATPSPSPASAACCSRGAACGLEWRPKSGLRALRRCEDRLRCFSIDGGGGGGGGGGGGTGGDGEKRGEEEAAAAAEAKTPGISNEPPFLSFSVDNIDTVKLLELLGPEKVDSADVKAIKEKLFGYTTFWLTREEPFGDLGEGVLFIGNLRGKREEIFAKLQQQLRELTGDKYNLFMVEEPNSEGEDPRGGPRVSFGLLRREVSEPGPTTLWQYVISLLLFLLTVFSCVELGIASKISSLPPEIVTYFTDPNATGPPPDMQLLLPFVESALPVAYGVLAIQLFHEVGHFLAAFPKKVKLSIPFFIPNFTLGTFGAITQLYVSKVLVXDLVEVPSKLFQGSLLLGLVSRATLGYRAMHAATVAIHPLVIAGWCGLTTTAFNMLPVGCLDGGRALQGAFGKDALFGFGLTTYSLLGLGVLGGPLSLPWGLYVLICQRTPEKPCLNDVSDVGTWRRAALIVSVFLVVLTLIPLWDELAEDLGVGLVTSF

SEQ ID NO: 180574 - protein, 883 aa, Oryza sativa
  Clone ID: PAT_MRT4530_77932C.1.pep
MSSAANVMLAIHEKRTTPTDLYRPLRLYIASAYSEREAAAADDDLAAVRDLRADVEQPSLPDPSSLERRRDALLAYARALSLVEPRFPISSDRAHVHSLAFTWHDAFKTGKKASVASIHLEKAAVLFNLAAVYSQIALAADRATDVGIRTACGSFQSAAGAFAWMRESGVAAKAVAAGATTVDVTPECAAMLEKLMLAQAQECFFEKVIAGGKPPALCSKVARQVGIFYEEAYAALSAAPLSQHFDKTWVSHVQLKAAQFYADACYRCSLDLHEKEEIAQEIARLKIGISALADAKKVARGVASPLLDSVNKLESNMKTNLERAMKENDRVYLMRVPDASSLGALPAASLVKPTSLAEVLDASKERLFSSLVPDGSMKALSKYTEMVDNIIRTQAEKLQQASEITRVRLKEMDLPDSILSLEGNITLPLDLKEDVEAVQISGGPAGLEAELQQLRDLSRVNQELLVQTEEMLQKEANEDAQFRTQFGSRWTRPQSSTLTKNIQDRLNLFASNLKTAGDSDSQIERGLKESYPLISILDRRPIESALPSISRPIMSLDGNEDAIVGALKQSLRQLESLGAQRAGLEDMLKEMKRKDDILPKLMAGVGSHDDLFKKEISKYDPVCAEIADNIVAQEQLLLQIQAQNEQFAAVFNLEDYKVARERCYKQIAAAVAKYRDIKKNINEGLNFYVTLQEAIGKIKQQCSDFIMTRNIQCREMIEDVQKKLAGFSFSSSSSQASMQRNTSVPPDQNSPSPPPPSSHAPHAQGPYGVPPGGDSRPGYSQPEQRPAYSQPYPPYGAPPQQPPYGAPSQQPPYGAPHPGHYQQPPHQQPPNHDYGQQAYPGGWRGQYYNPHQPQPQPQPPYPQPPYNAQGSYPPHQSSYYRPQ

SEQ ID NO: 180575 - protein, 145 aa, Oryza sativa
  Clone ID: PAT_MRT4530_77933C.1.pep
PRVRATGPPPDMQLLLPFVESALPVAYGVLAIQLFHEVGHFLAAFPKKVKLSIPFFIPNFTLGTFGAITQFKSILPDKKTMFDISMAGPLAGAALSFSMFSVGLLLSSNPAGASDLVEVPSKLFQGSLLLGLVSRATLGYRAMHA

SEQ ID NO: 180576 - protein, 116 aa, Oryza sativa
  Clone ID: PAT_MRT4530_77934C.1.pep
MVGPRGPHVILTPLLSPSPLSSSPAGGEAHRFTVDPRVISTHDDVALLRVLHPNDELHRGIESYDYFVYMASASSLRRLPNPRVSPFRNEEVAIVRCSGETRFVIAGLMPTINYPV

SEQ ID NO: 180577 - protein, 244 aa, Oryza sativa
  unsure (1)..(244): unsure at all Xaa locations
  Clone ID: PAT_MRT4530_77935C.1.pep
LLFDGGGGGGGGGGGGTGGEDGEKRGEEEAAAAAEAKVGGAVEEMRSERTRSGSFSSSSSSSSGTPGISNEPPFLSFSVDNIDTVKLLELLGPEKVDSADVKAIKEKLFGYTTFWLTREEPFGDLGEGVLFIGNLRGKREEIFAKLQQQLRELTGDKYNLFMVEEPNSEGEDPRGGPRVSFGLLRREVSEPGPTTLWQYVISLLLFLLTVFSCVELGIASKISSLPPEIXTYFTDPNATGPPPD

SEQ ID NO: 180578 - protein, 207 aa, Oryza sativa
  unsure (1)..(207): unsure at all Xaa locations
  Clone ID: PAT_MRT4530_77936C.1.pep
NWQHKADGNKCKCAHAQSDYAIPARATNSIPDSIAIEQHAQQQTQPFSHCIHSHFCCSFLANINIHLQLDTXTFHLIITTWQATSQCSASNHLEGAICQSLSCPRGGLQAIKCPRPSSNSTTYXSQGYHASHPSCKPTLMHYITVQSASVVGGXPAITLRSSCFSNLSKAVFATRPDNHLNWGLWRRHRVGPIPGXIRDCNAKKIAI

SEQ ID NO: 180579 - protein, 124 aa, Oryza sativa
  Clone ID: PAT_MRT4530_77937C.1.pep
MVRFIDRDPYRCPLLAPQRCPNWRDVGTDEHAPIGPKPRTAASEEDNAERPRELVCAKAEVVVHTFLSDDVARRLGVQHTPLLDIKVIVANSDKVPCAGRRLDLRVTIYNIVLASSCPEVSPSS

SEQ ID NO: 180580 - protein, 282 aa, Oryza sativa
  Clone ID: PAT_MRT4530_77938C.1.pep
MQQQHSRKESRTGQCAGERPKRRGKAAYPSTARYQWLLCQFQDMSVQSFGDAHRDMSCGANVNTTKPSTQNPNLATKAAPSKSHRSLSPESSSLLPFSVQTTRLRSQSGEITKPLSPPPPPPPQQQQSLRRSTMMHMTFYWGKDVTILFDGWRTATWTGYLLSLVALLLASAFYQYLEAFRIRVKLLAGAKPASIPPPASSDAARAPLLLPSSAAGRWPARLATAGLFGVNSGLGYLLMLAVMSFNGGVFVAVVVGLAAGYLAFRSSDGEDLVVVDNPCACA

SEQ ID NO: 180581 - protein, 84 aa, Oryza sativa
  unsure (1)..(84): unsure at all Xaa locations
  Clone ID: PAT_MRT4530_77939C.1.pep
MSCCGGSCCCCSGXQCGGCCCGCKMIPAVEATVTTKTLVLAAPSNKASSGGMDMAVASRQNGGCGCNTCKCGTRCNGCYCCYCN

SEQ ID NO: 180582 - protein, 158 aa, Oryza sativa
  unsure (1)..(158): unsure at all Xaa locations
  Clone ID: PAT_MRT4530_7793C.1.pep
PLVLVCTRDRLRPVTHTSPPTQYDNTLCFKRLILLMPINSAYTPSYCQGHLPGGGDQPQHKTTGRSDDRVNDGLNTRRAEQEEEKKRKAQVGXITTEQEEQRQELMTRGSPIEIERSRAEEQVKKRKVTLKSSDGGNTHRQMIELTENNGRHVDKLKL

SEQ ID NO: 180583 - protein, 339 aa, Oryza sativa
  Clone ID: PAT_MRT4530_77940C.1.pep
MDRPRRPGSDRRYPPLRFRKRKRSSSDSRSSKLNNKPGSDKWEDVCSICDDGGDFLCCEGRCLRSFHATEKHITEINQCTTLGLTEEQWKIFRQNDEKTCHQGLRIKMPFSHCHMLQMSVQLLIYVFQCEDEKCGHFYHPKCLARLLYPDSSMQPLNFEEEVARGLKFLCPVHKCHVCKGGENKNDMENQFAVCRRCPTVYHRKCLPSDIVFEDDESNGIVQRAWDDVLRDQILIYCMKHEIDPELGTPARNHIIFPDCKNLLTRGPSKPKGQEDAPAVLDIPEEDMSPDHSSEPSQPPPQPAAETDQTDQDLSNGFNSFAPKALFPLPYPGSCGWLDD

SEQ ID NO: 180584 - protein, 104 aa, Oryza sativa
  unsure (1)..(104): unsure at all Xaa locations
  Clone ID: PAT_MRT4530_77941C.1.pep
WTLHGIYSVSLPKWEGTHSLLQSYKTIFFGGGGGHISXQKXHSSILQKKKHLTPYPFISSHHPXKIQGXXTDLSFKXXNCFLYSIXXCKGGAYCFREFILLNKT

SEQ ID NO: 180585 - protein, 40 aa, Oryza sativa
  Clone ID: PAT_MRT4530_77942C.1.pep
YLSLYFHFRTQPSCYFSILATPYDIKLIIYHLTTKGRYHM

SEQ ID NO: 180586 - protein, 57 aa, Oryza sativa
  Clone ID: PAT_MRT4530_77943C.1.pep
PTPLYNPHTYPVLPRERTRRLFRQAAESSGSTATTVTHRRTLTNVGAAGTYKVSANR

SEQ ID NO: 180587 - protein, 89 aa, Oryza sativa
  Clone ID: PAT_MRT4530_77944C.1.pep
PPCFLFTVPGTATGPVGFNPPAFLLFFFFTGWCFCFRKSEHLLSFFFLRCAFLLLNVPVLFLLVGAIRIYDNFLYSLPCMYIGMEMELD

SEQ ID NO: 180588 - protein, 770 aa, Oryza sativa
  Clone ID: PAT_MRT4530_77945C.1.pep
MMAATQSSSWADLQMDILGLVLRRLPSLADRVRLRAVCRPWRSNAQLLTLPPPFPWLNLLDGTFLSISDGEIHRMPLPDDASCYGSIDNWLFLTDSDDGCSLMNPFSKATLQLPKLARIWHHERGNAYNACTRLFYKLAVPLPLDLSSDSLVAVLMNDPLRHSVVCIVHRSISTDSFRFHDRPIKNNFYDIAFCGGKLYALSCGKLFTVEMSEVHIEKPKVPHVECIVEDFPTESHSQPCPENHICVTWPYLVASGGRLLNVIRLVGVPFPPEDDDDIFKDSLTFSFEVYEADLNTGSRMWRRVESLGDQALFVGRHYSKSLSAAEYVGAQEDCIYFMCDDYFRSDEDPLCDAGIYNMRSGVITPLLQENTAPRLHPTGEGHPTWFFPADDFKSCMMAAVQSSSWADLQPELLGLVLTRLPSLADRVRLRAVCRPWRSNARLQPLPPPLPWLTLLNGTFLSISDGEIHCMPLPDDASCHCSIDNWLFLSHDDGGFSLMNLFSKATLQLPKLDTIWCHHLWYAAPKFPLFYKLAVPSPLDFSPTSLVVALIMNRSHQKALCICQPPVATESFRVEGSTMEGMQDFTFLDGKLYVLNNFNKLFILEIDESHIGNPKISSIECIIDSQDDSTTEPQSFPEDYLIMRRYYLVESGGGLLMVTRYVGIVLPLAEPNSFKHSRTLSFKVFEADLTTGSRMWRRVTSLGECGVPQEDCIYFMCDYWRPYAGDPLCDSGVYNMRNGVITPLLQDATAPRLHPTGRGDPAWFFPADVAT

SEQ ID NO: 180589 - protein, 494 aa, Oryza sativa
  Clone ID: PAT_MRT4530_77946C.1.pep
MSSEDSLKSLSLDYLNLLINGQAFSDVAFSVEGRLVHAHRCVLAARSLFFRKLFCGLDPNHQPPPPPPPLNWPMAGGGGGGSGGGGRGGAGGGGGAPATPELVIPVSSIRYEVLVLVLQFLYSGQASVAAPKSGPLPGCGARGCWHTRCGAAVDLALDTLAAARSFGVEQLALLVQKQLESMVKEASVDDVMKVLMASRKFEMQELWATCSHLVARSGLSADLLAKHLPIDVVAKIEEIRAKSPLAAVAAPRSPFLTHHYLPMNPASSAADRDNKIRRMRRALDAADIELVKLMVMGEGLDLDDALAVHYAVQHCNRDVVKALLELGAADVNSRAGPTGKTALHLAAEMVSPDMVSVLLDHHADPNSRTLDGVTPLDVLRSLTSEFLFKGAVPGLTHIEPNKLRLCLELVQSAVMVTTRDDGAPVTGGAEAGGSDGGNFPRSDADDSLVSLTMNSTLMYQGQEMAAAVAAGEGRKSNNGRGSPPPAMYFPNGFA

SEQ ID NO: 180590 - protein, 78 aa, Oryza sativa
  Clone ID: PAT_MRT4530_77947C.1.pep
MQLSASYGDGEKEEATGDIHRARIDLRNRWPTATGWMREMSILYLGVGADEAMRVYGSFIGSVEFGRAPPAKKITNDG

SEQ ID NO: 180591 - protein, 54 aa, Oryza sativa
  Clone ID: PAT_MRT4530_77948C.1.pep
SPPSNIFKGYTKNQVKLFKTNPTGAAKEQKPVPVLLVKKKKTMVAKNKKSSPPS

SEQ ID NO: 180592 - protein, 90 aa, Oryza sativa
  Clone ID: PAT_MRT4530_77949C.1.pep
MAVGACDRREVAEPEHTPKGQESILQAARGGVVLGAAFFGARGGACGGSGDSMWRNRRRTSMMAASGGGVDTEGSGGDNVPRRFLRLAAW

SEQ ID NO: 180593 - protein, 84 aa, Oryza sativa
  Clone ID: PAT_MRT4530_7794C.1.pep
LSIGRSLSGAQRRLPPDTGGSPPLRGDRGDVGARPPVQSTMTGNRLVTDRSHPTDRSRSGTPHVCPRRIECSKGRLGRCTFMAA

SEQ ID NO: 180594 - protein, 183 aa, Oryza sativa
  Clone ID: PAT_MRT4530_77950C.1.pep
MATILENIQKARFLPTRPLKDELPTFQGGGGGGGGGGGKESHLMGLRKRLSSFSDKIQPISSASAEWAFRRSKSAPSLGAFAGGPLKRWWDWGVGWLMSKKPGFATDLEMNEEEVAALGRGSRGSWGHILYKMRSGVRRLVTSHSLPTTHRAAAAASASAQCKPAATFNYTQSFHSGQTAMAY

SEQ ID NO: 180595 - protein, 77 aa, Oryza sativa
  unsure (1)..(77): unsure at all Xaa locations
  Clone ID: PAT_MRT4530_77951C.1.pep
NCRHIVISSQALPGHISALRSRLSSCPEWPHEGXGQAAENLNIYSSPIYLAHSSLPSPPLLIHRSRFERECPCGSDG

SEQ ID NO: 180596 - protein, 267 aa, Oryza sativa
  unsure (1)..(267): unsure at all Xaa locations
  Clone ID: PAT_MRT4530_77953C.1.pep
MANLFLKQAKQYAATRPAYPPELFDFIASKTARHDLAWDVGTGSGQAIPPLAKLXKDVVGTDTSAQQLSYAPRLPNVRYVHTPPDLPLDGIHAAVAPPGSVDLVTVAQAFHWLDLPRFYAQVRSVLRAPQPQQAAGVLAAWCYTEPCVDAAVDDAFWRLYNGSQPYWAPNRRLVDDRYSGVDFPFDPVDGEAHTGPFEFSTERRMDLDGYLAYITSWSAYQTAKEKGVELLDEATVRGFADAWGGDRVEVKTVRYPIFLRIGKVRPE

SEQ ID NO: 180597 - protein, 609 aa, Oryza sativa
  Clone ID: PAT_MRT4530_77954C.1.pep
MLSSEEPSGPSCSSIQGVSAVPATSPGESPASQDPTDLVQPCAKFSIRDYVFASRSKGIKRSWPFHPRSLQLCLKRGVKDLLPPFEPPDLIRSRSLSTTINTRDDGSSIVNASNINFQSCQPVAESLGPSQYTSPEDGKSAVDQGENTNGLDHTDEVMPVDLQVNSCTKAIRQTEPSEKKCKLVVKVGSLTRTEEVASNSSTVSDPMASKTCPVCKVFASTSNTTLNAHMDQCLSVESNTEPVEKVILKPKVKPRKKRLMVDIYKTARLFTLEDLDQRNGTNWAIELATPTTNKEVCTENRSPEVVPFDPRDDERECRVSISRDSQVHDQSAMARPVPAFTGRPVPQLNIGLRASSSFSTYQRTSTKANPCLDSHDQTLAGKVSAEPTMNTQVRTHTDGDMHEHTSEDEESNPMHVQKPTESTSYGGSETIRQWVGSKRSGLSKNCAREVTDKASKSITPGTKKLARSSIRGFDDSQISDSPPEAFSSQPPEEMTITSEANDDDERNGTSRLLRSIPRWSLKTTPSSNVIPKVPRSAAALAKRKIKEIGRRESYRSDNYRTVWHQAPFTAFHPKTSFSQGRVLLDPCLYSQTLTQLLVLAHQVKETTQK

SEQ ID NO: 180598 - protein, 192 aa, Oryza sativa
  unsure (1)..(192): unsure at all Xaa locations
  Clone ID: PAT_MRT4530_77955C.1.pep
SSLVSMVDFFAVVLMAAMVXAISGAHLTESDMRFMDRQCQRKAQDSPLDACRQVLDRQLTVRQRFHSMFLRPGALGLRMQCCQQLQDVSRECRCAAILRMVXRATXESMPMPLEQGCPSALTDNYSGEASTPEQGYYGEESSEEGYYXEQQHPPVMTRVRLTIARQYASQLPPMCRIEPQQRIIFCAGQYYA

SEQ ID NO: 180599 - protein, 50 aa, Oryza sativa
  Clone ID: PAT_MRT4530_77956C.1.pep
FFFFFLVTRSTGYGLTKSVSKQEGLLLLLYIMNPNSPPLATTNLFHILIY

SEQ ID NO: 180600 - protein, 80 aa, Oryza sativa
  Clone ID: PAT_MRT4530_77957C.1.pep
MAVAAVAVGQPQRSQVAKFLVTQLHNSTPDSTPGVIFRSWSCTKQAAGKPASSPSRENQDKGKVKKTGDGGLLGFWGNCT

SEQ ID NO: 180601 - protein, 87 aa, Oryza sativa
  Clone ID: PAT_MRT4530_77958C.1.pep
MSTGGGASGAAGDGAPGTGGGAHGAAGGGAPGTGGGAPIENTNGGNSASQSSGGTFIGSFHTVHVMFIVLIFWIKICRFMTIFPTLS

SEQ ID NO: 180602 - protein, 185 aa, Oryza sativa
  unsure (1)..(185): unsure at all Xaa locations
  Clone ID: PAT_MRT4530_77959C.1.pep
TGSQLRVAYQXXVPGAYSEKAAGKAYPGCDAIPCDQFEVAFSAVELWIADRAVLPVENSLGGSIHRNYDLLLRHRLHIVGEVQLPVHHCLMALPGVRKECLTRVMSHPQALAQCEHTLTAMGLNVVREAFDDTAGAAEYVAANGLRDTAAIASSRAAELYGMEVLADGIQDDCGNVTRFVMLRPR

SEQ ID NO: 180603 - protein, 1012 aa, Oryza sativa
  unsure (1)..(1012): unsure at all Xaa locations
  Clone ID: PAT_MRT4530_7795C.1.pep
MMNRRRLVLGRRGWEPSSPFLSPPTSPSSSPLPFSPHSALPSPREFGDVFPEELPGMPPKREIEFRIDLAPGTTPLYKRPYRMAANELAEVKKQLEELKEKGYIRPSTSPRGAPVIFVEKKDKTKRMCVDYRALNEVTIKNKYPLPRIDDLFDQLKGATVFSKIDLRSGYHQLRIREEDIPKTAFTTRYGLYEFTVMSFGLTNAPAFFMNLMNKVFMEYVDKFVVVFIDDILVYSQSEEDHQQHLRLVLGKLREHQLYAKLSKCEFWLSEVKFLGHVISAKGVAVDPEIVTAVTDWKQPKTVTQVRSLLGLAGYYRRFIENFSKIARPMTQLLKKEEKFVWNLQCEKAFQTLKEKLVSSPVLILPDTRKDFMVYCDASRQGLGCVLMQEGHVVAYASRQLRPHEGNYPTHDLELAAVVHALKIWQHYLIGNRCEIYTDHKSLKYIFTQSDLNLRQRRWLELIKDYDVGIHYHPGKANVVADALSRKSRCNTLGVRGIPPELHQQMEALNLSIVGRGFLATLEAKPTLLDQIREAQKNDPDMHGILKNMKQGKAAGFTEDEHGTLWNGNRVCVPDDKELKXLILQEAHESPYSIHPGSTKMYLDLKGKYWWVSMKREIAEFVALCDVCQRVKAEHQRPAGLLQPLQVPEWKWDEIGMDFITGLPKTQGGYDSIWVVVDRLTKVARFIPVKTTYGGNKLAELYFARIVSLHGVPKKIVSDRGSQFTSHFWKKLQEELGTRLNFSTAYHPQTDGQTERLNQILEDMLRACVLDFGKTWDKSLPYAEFSYNNSYQASIQMAPYEALYGRKCRTPLLWDQVGESQVFGTDILREAEAKVRTIRENLKVAQSRQKSYADNRRRDLEFAVDDFVYLRVTPLRGVHRFQTKGKLAPRFVGPFRIIARRGEVAYQLELPASLGNVHDVFHVSQLKKCLRVPSEQADSEQIEVREDLTYVERPVKILDTTERRTRNRVIRFCKVQWSNHAEEEATWEREDELKAAHPDLFASSSESRGRDSV

SEQ ID NO: 180604 - protein, 492 aa, Oryza sativa
  Clone ID: PAT_MRT4530_77960C.1.pep
MAGAPPTEAEKESLVTSFLEIAAGQTPETATQFLQMTSWHLEEALQLFYIDGEAALAAHPAPSPAAAAEAAAAAVAAAAEVEDAMRFAPPPAAALGDGMLQGLGEEEDVRAPLPTKRETLYGDAPMVVVRPNSTVAFRNFEEESRQSAVWDSEQNAASSSRDNLAALYRPPFALMFNGPFDKAKLEASVLDKWLLINLQSTEEFSSHMFLLLSVSFMKLNRDTWANEAVAQTIRSNFIFWQVYHDTSEGRKVCTYYNLVSVPAILLIDPITGQKMRGWNGMIHPDRLLEDLMPYLDKGPKEHHAAQPQKRPRKVDQETSIGKQGSGYVQCISRLTKSTCSQFHFFVGKTPVPVVATEDEDEELARAVAASLEESKGSDTSEEKIEPEVENEPSLSAKLNYPPLPEEPKGSRELLCRVAIRLPDGRRIQRNFLHTDPIKLLWSFCYPQVEDGDKKAFHFVQPIPRASTNLEYESDKTFKEAGLANSMINLLWD

SEQ ID NO: 180605 - protein, 44 aa, Oryza sativa
  Clone ID: PAT_MRT4530_77961C.1.pep
MKKETNGRRAMGIGSDCNFGSSHGSTIQQIYETLRYSVETYEVF

SEQ ID NO: 180606 - protein, 661 aa, Oryza sativa
  Clone ID: PAT_MRT4530_77962C.1.pep
MSRLDATSLLLSPSLTPPHKPTTPRRLICVVSSTLAALGASLSLLLLVVHSAPAPNYGSLFLSLASNDTAALHLRALTLHPHVAGTRANSLTAAYVCDAFSSLSIPAHITPYSVLLSYPVERSLSLAVPGRATTTSFALSQETYPNDPYASATAEVMPTFYAYAASGSVSAEAVYANYGREEDFAYLASRGVDVAGKVAVARYGRIHCEDIVHNARVAGAAAAVVYTDPLQYGGAPGEAWFPDSRWLPPTGVQVGSLFRGVGDPTTPMWASSEGCERVSVEEAMDTDDMPGIPALPVSARDAAEIHAALGGDAAPADWQGREGSPVYRLGPGPAILNLTYTGNDTMATIENVFAVIEGAEEPDRYVILGNHRDAWTFGASDPNSGTAAMIELAQRLSVLQKQGWRPRRTIIFCSWDAEEYGLTGSTEWVEENREMLSSRAVAYLNVDVSVVGPVQDPDNSSQAVYDSWVKSNISPLDQAIPYIIRYTMTSCGWRNSEIQGSVGTLQRHFRITAASIWGMMALRLADEEILPFNYMSYPVELEAYTKVVENEVRGTAISCSPLHNAIRALKTAATKVNGERKAERAFTNREGLFKREWFKHLVYGPSEQNDWESASYPGVENAIASARKENTTESWKFVQHEIHRVARAITQASVVLAGSLT

SEQ ID NO: 180607 - protein, 147 aa, Oryza sativa
  Clone ID: PAT_MRT4530_77963C.1.pep
FVPRVPLFFRMIFTKNYPNRIRSTGGQTTLQPALYRPSVADEEAKPISPRGEEERGLMPPTADRDIPLTTPETATEKGQALPIRGPRPPHGGRGAPEGMPQRGGGDRGITGQPHSRKRRPPKTARAGTAWQPSTSRGGIHPGRPECR

SEQ ID NO: 180608 - protein, 511 aa, Oryza sativa
  unsure (1)..(511): unsure at all Xaa locations
  Clone ID: PAT_MRT4530_77964C.1.pep
MVLTFTNLTMIMDKISSGEEVGGAGGAYSYNALKRLDQIWSSICEAQSDSKVPEVVTRVQGPLVDYDLGDGSEIFDVLVCGGTLGIFVATALSYKGLRVGIIERNIIKGXRREQEWNISRKELMELVEVGILSEEEIEQIISSDFNPTRCAFESKGEIWVENILNLGISPAKLVEIMKERFVSSGGAIFEGKSLSSISVHDDFAVLNLSDGGSLPCRLVIDAMGNFSPIVRQGFPAGSGPTDRTTYMFTYVDPHSGGPKLEELLETFWDLMPAYEDVVLENLDIMRVIFGIFPTYRNRHAISLLRKPVGCTHFSPLTSNALHCFALQVGDASGIQSPVSFGGFGSLTRHLGRLSNGIYEAVSGDLLDARSLQLLNPYMVRPNLSASWLFQRAMSARPQIDVSPTFINELLFANFESMQDVIQFGPLVKTLGLVMITRPQILPSIFKQAGPGVILNWSGHFVMLGYYTFLSTFIDPILRPWVESLPLRNKYQWKRYLEAWKYGAGLDYRQGE

SEQ ID NO: 180609 - protein, 58 aa, Oryza sativa
  Clone ID: PAT_MRT4530_77965C.1.pep
MTFIGFNRTPSRLMAIRDGPYPRGLRFCLSRAIIDEAFCGPTNMTFFVTGLLPPSWIA

SEQ ID NO: 180610 - protein, 153 aa, Oryza sativa
  unsure (1)..(153): unsure at all Xaa locations
  Clone ID: PAT_MRT4530_77966C.1.pep
SGKIFVGGVAWETTEESFSKHFEKYGAITXSVIMKDKHTKMPRGFGFXTFXDPSVIDKVLEDEHVIDGRXVEVKRTVPREEMSSKDGPKTRKIFVGGLPSSLTEDELREHFSPYGKIVDHQIMLDHSLGVLEDLVFVTFESEDPXGRGISEGR

SEQ ID NO: 180611 - protein, 111 aa, Oryza sativa
  Clone ID: PAT_MRT4530_77967C.1.pep
MAAVAVETTAVAVGTRMAAAKECNAVAMGRKKGRRGRMTWIDRLPEVGGGRTWTGYKKGKLGMGRLVTVGCSEGGSEVRRDWLRRRQGRRKGIGKRQIIRSGTCTVSMKID

SEQ ID NO: 180612 - protein, 140 aa, Oryza sativa
  Clone ID: PAT_MRT4530_77968C.1.pep
VPVPARAVPPFWTPISQTLAASPLAAPPPLSLSPPLQAATGPRSIFPAGDNLSRAPSAALRHLLLSTLPLRRCSTMVETHQSTPTAASKYSSLSPSSSAAKQRRPRPQRAPVRARMRWRPREVTIFFVFSARELVAWAWD

SEQ ID NO: 180613 - protein, 88 aa, Oryza sativa
  Clone ID: PAT_MRT4530_77969C.1.pep
PPFFFLRFVFFFFSPINPGSGFFSIPPPEECNFGLPSFSPVFPPLFGLGPPWPFFSSDFSFFPVWVKTPPLLFFFFLAPPPFLVKIHP

SEQ ID NO: 180614 - protein, 125 aa, Oryza sativa
  unsure (1)..(125): unsure at all Xaa locations
  Clone ID: PAT_MRT4530_7796C.1.pep
IWSTAHNRRHGYSNSFTLARGVQLYPQDTAXHTRFHAPTCHHDILERGRDRTIRITPSNRSHHTSRFAPVPSRQREAPLSCLSESGSRSARHPGRPNSITPTLAWVHWLDESYTTSPAVAHAGLW

SEQ ID NO: 180615 - protein, 103 aa, Oryza sativa
  Clone ID: PAT_MRT4530_77970C.1.pep
RLSTPVPVISPQKGIPFRLYLSAGDKSIGSVLIQELEGKERAIFYLSRRLLDAETRYSPVEKLCLCLYFSCTKLRHYCRDRENCIFPNASVLTYSPKLLLLKR

SEQ ID NO: 180616 - protein, 71 aa, Oryza sativa
  Clone ID: PAT_MRT4530_77971C.1.pep
MTRSVFSKNAEASSKGKKFDTPTRVSRQKEAATDANLDDHGAESKSLFAAPRSSASGGGGVRQRRRWQPRQ

SEQ ID NO: 180617 - protein, 478 aa, Oryza sativa
  Clone ID: PAT_MRT4530_77972C.1.pep
MSLRKRQRSASSSRLSTLSSSPAPHTAAAAASASSPPLSFPNADLVLRLHLDPCPDDDADLDAGEDHRPSLDLHVSSASLLRSRYFAALLSDRWSPAPTSAAGGHGHLSLAVAAPRSASHPFHAHVEVVRLLHTLDFAGAIHSPADALDILPVALQLLFDACVEACTRFLEAVPWSPDEEARVLEIAPLLPADEAADLLARITPPPAASASAAGGEAARSPSEAMLHGLIHSAIHGHPVPAATKAFVAMLLKDYPSRDCVQKVLDEAFLSRLETVKELMGKYASPDFRVAVDSDERDAIQRLNLQSAVLNVRHLLWLIERMVEMRVAGNAVKLWSEQAALTADLQKLLNDVDMWKNITPGLPVLVTRCTLRFANSVVNGETIVPRQVRTKLVRSWLPVLNVCRNMVQPMQCGYKSPNCQELEETFLQIISTLPVPDAQELLQQCLGFSTRNVDDCPHLIAAFKTWFRRAGRAPQGAEN

SEQ ID NO: 180618 - protein, 1061 aa, Oryza sativa
  Clone ID: PAT_MRT4530_77973C.1.pep
MDRSFSMVMEGMGMAAAWAAGDLWVLAAAVVAGVVLVDAVVRRAHDWVRVAALGAERRSRLPPGEMGWPMVGSMWAFLRAFKSGNPDAFIASFIRRFGRTGVYRTFMFSSPTILAVTPEACKQVLMDDEGFVTGWPKATVTLIGPKSFVNMSYDDHRRIRKLTAAPINGFDALTTYLSFIDQTVVASLRRWSSPESGQVEFLTELRRMTFKIIVQIFMSGADDATMEALERSYTDLNYGMRAMAINLPGFAYYRALRARRKLVSVLQGVLDGRRAAAAKGFKRSGAMDMMDRLIEAEDERGRRLADDEIVDVLIMYLNAGHESSGHITMWATVFLQENPDIFARAKAEQEEIMRSIPATQNGLTLRDFKKMHFLSQVVDETLRCVNISFVSFRQATRDIFVNGYLIPKGWKVQLWYRSVHMDDQVYPDPKMFNPSRWEGPPPKAGTFLPFGLGARLCPGNDLAKLEISVFLHHFLLGYNAFRLAGEQAGAVDGLLSLPDPPSALLPCATSSLARPPARPPSPGLVSLPRADPSSVFLISFGRRAVLVAVHSSFVRSEMDGVVAASADATRDEIKIMNVYIWDMDETLILLKSLLDGSYAGAFDGLKDHDKSVDIGKRWENLILELCDEHFFYEEIENYNEPFLSAVKEYDDGKDLTTYDFEADCFSSPYDDLNKRKLAYRHRAIGEKYTKGLEKILDHHMIKVWNDLYSATDKYTDGWLSSAHKLLEEAMGKSTAESTAKHSSINCIVTSGSLIPSLAKCLLYRLDDVVAFENVYSSWEVGKLQCFKWIKERYDGPNVRFCAIGDGHEECTAAQIMKWPFVKIEFHPDAPHRFPGLNLPTIHRIMDTVYDSSSNDGDGSEQVPGPPSILLKQQQGEEEAVKEKVKDKVSAVKAKGKVSKAKADEKKEVATARSHAERELAHERAKARVAAAKMELHQDKALHREEAIQHRLHKHGAGTTAGKTRGLGDLLNSSAGPKLAFGYASVPVDLILQSTRNNYVHCVGFPVITTSASHAVTRASLHAIARTDLSLHHPLVAPASHGPISTNHAGLRKRQLRLLVSR

SEQ ID NO: 180619 - protein, 41 aa, Oryza sativa
  Clone ID: PAT_MRT4530_77974C.1.pep
GRQQIHLQHFCKSLTSLEIFQFVSLTEIILHINNRLNQLTW

SEQ ID NO: 180620 - protein, 405 aa, Oryza sativa
  unsure (1)..(405): unsure at all Xaa locations
  Clone ID: PAT_MRT4530_77975C.1.pep
MASPAKAQRRPEGASVLETLPALPLAIIIAKAGPRCAAALACASSTLRAAASGEALWRHFCSDDFALDAPLAPGDLPLPSFKDAYKAWFQSFGMYPLPLVKRVKIFWSSFRAWLCEYFPEGLRTLGEGVSEAEIAVAECNLGLVLPMPTKLLYRFCNGQLHIGRGEEVSYGVMGGYDYVHQRYTVRLLPLAHHAVQKNSNYIVVATSCFGEKIFLLDCASGRLYVGTKYWNEEREIMACVPKATIRVAVDDDHGMPQDGFLLWLEEHLSRLQDGPLQAQRRKTPXCQGISVRFQYYFLTRLPPVCMACRLQVXILPSSFSSCHYTIQIGDEVLPYTCNYGGHGKCPLLRCGEELFVYGCSISAALEPGSVMGNLTLVPWRCGQPRGSPFIADIAPFPLHPPDYIF

SEQ ID NO: 180621 - protein, 218 aa, Oryza sativa
  Clone ID: PAT_MRT4530_77976C.1.pep
MAPVGLPPGFRFHPTDEELVNYFPPRKVHGLSIDLDIIPEVDLYKCEPWELEEKSFLPSKDSEWYFFGPRDRKYPNGCRTNRATRAGYWKSTGKDRRINYQNRSIGMKKTLVYYKGRAPQGIRTSWVMHEYRIEESECENAMGIQLQDSYALCRIFKKNVVLGEFDKKGECSSSQAKGNEEVTDFGDAGQSSGANENDKDNSWMQFIAEDLWCTNKLK

SEQ ID NO: 180622 - protein, 126 aa, Oryza sativa
  Clone ID: PAT_MRT4530_77977C.1.pep
MGLCLVLKKLKNRMKKNMILFADRVINWKWLVCSNCSAAPCTAVGRGRRRCSHYSPHVVGGDAPSKKSWRPPPLPPPPPATFAAHGLLSSPLRLPLRSALPLHPRPAAAPLSQHASAAAVVGGSGD

SEQ ID NO: 180623 - protein, 379 aa, Oryza sativa
  Clone ID: PAT_MRT4530_77978C.1.pep
MVAKRGAGACALSWDEEGEVSRGEKRRRADGDGSSDVGGGGGIGAFDALHDELVVSILADVAASAGSPADLAAAMLTCRRFRELGKHGLVLARASPSAVAVRAAAWCDDAHRFLVRCAEAGNVEASYLLGMIMFYCFENRKLGAELLGAAARRGHGEALYSMAIIQFNGSGLPKDGRNLQAGAQLCARAASRGHTDALRELGHCVSDGYGVRRSLSGGRRLLIQANFRELCAAVANGGARFAAALGRSGECKPPGPHMCLLSDYGCHVAGAAGRRAHAANAFLAGWYASRPLASGAGAAALRMCSQPTCGRPETRKHEFRRCSVCSGVIYCSRACQAMHWKVAHKSACVPMAHWLVAANAGAGNAVGAAAAAAAQMAMP

SEQ ID NO: 180624 - protein, 141 aa, Oryza sativa
  Clone ID: PAT_MRT4530_77979C.1.pep
PAGLIPNPQSPIDQSSLPQPARLRRNRSRTSCSRRRSRIAPPATAFSHLQPSLFPHNFCLSTAVGLPAAGCRSASIGQAAAFQWISLTPATTPGSTPHSPWLTLSGDELERARRQAARGAAPSAIRGCGEEGPTPRWAPSR

SEQ ID NO: 180625 - protein, 192 aa, Oryza sativa
  unsure (1)..(192): unsure at all Xaa locations
  Clone ID: PAT_MRT4530_7797C.1.pep
LALLAFPNVGFNLHEERIFRSCSVRGRGQLTAGPHAAATRRARGRPRRRGRREAARPRPDGCRRRPPARRSGGRERGGKGERRRRSTAHPGATAATEEAAGAEGGGGAARVNGVDGVPAVGDRNREVDEVGEDAANPKEAAPRWEAVRGDDGGGPELGGDGGERXERRRELESGEEEGRREAETDGGGAGRV

SEQ ID NO: 180626 - protein, 60 aa, Oryza sativa
  Clone ID: PAT_MRT4530_77980C.1.pep
GKDCSSSVAGYASSAALTASTEAFVRCGEPTPRLLIPAGEWPGSVYSISSRPHSELMVMF

SEQ ID NO: 180627 - protein, 153 aa, Oryza sativa
  unsure (1)..(153): unsure at all Xaa locations
  Clone ID: PAT_MRT4530_77981C.1.pep
WRDDPRVRPRVRTLQQKHKNYKPTTVKIIFFLALLVIAACSAFAHLDAVTQVHRQYQXLQPHLMLQQQMLTPCSEFIRQQCNTVATPFLQSPVFQLINCQVMQQQCCQQLKMIAQQSHSTSISSXVQAIVQHLLLQQLASVYFYQSEAQAQAM

SEQ ID NO: 180628 - protein, 168 aa, Oryza sativa
  unsure (1)..(168): unsure at all Xaa locations
  Clone ID: PAT_MRT4530_77982C.1.pep
ELSEVDESAWTTKGCPNFQCLWGRGTGDTESXNLQVEHGNDLTPTSVSEKPGNNYLPCLDTLFIMGSDKLAMLRNLPPSLKNLSIYHCPELRSISGNLDQLVDVSIGGCNKLDSPDWGNLPALEDFGLLNCKRLTSLPGNLGNYSALRRVLVKYCPAINMKPLYKHLP

SEQ ID NO: 180629 - protein, 100 aa, Oryza sativa
  Clone ID: PAT_MRT4530_77983C.1.pep
QLRTIKLLAFHASYATIQVMLIFQSQGDPPFGFVFLDFVCLSWLLASNLCHSSLPGESSLSHSTNPTHLICSHPTMHATHATLCNNSRCILLIPFNVARM

SEQ ID NO: 180630 - protein, 598 aa, Oryza sativa
  Clone ID: PAT_MRT4530_77984C.1.pep
MAATGDSAAAAGEVRRLLAHLDSHQQLLASCHDAWSRALAHFASLDEDLAARSASLDDALAAAGASTSESLAALEAREAAVPARLAEAEAALSAAVAEAGSAEPPPADVRGALRWMCGRMDAPALWRFMAARRRELAAVRKEVGPAVAASVDPPRLVLDALADFLAAEDGAGEDQFWVLGILLRSLFDSDGRKPPEIGDTLVERAAGVAKNWSEKFGIKMELYAPDNNEVEMTEAPLVENATATEKKEEHVDEEEEEEEEDPEEMVPASEEEADAEEVEKEEEDPEEVEKEGGEAEAKVANAAKTGEVEKRKVEEDKKASGREVKEGEKGGQAEVQIFLQMVAAFGLKDRYDVDFLRRLLVDNGRRRELARIACVLGFEDSLRDVIEEFIKSGNEIEAIHIAHEAGLLERFPPVPLLKSYIKRITNKTQVALRGGRHSNSVVEEANNSECNAYKSIISTQGARTRTTGHLFGTRPPTLSPTPIVPVLSDRHQVLGRTSHREAPWARAVLGCCTVDLERHLEPAMAMVLVLGINLTITKDGLDFGLDVDVTECSLFSWLVLTWHFEKVCSPLALSTLPHARRQDSEHASAIGRRINWKR

SEQ ID NO: 180631 - protein, 96 aa, Oryza sativa
  unsure (1)..(96): unsure at all Xaa locations
  Clone ID: PAT_MRT4530_77985C.1.pep
MKKTNQIXLFLEKPTPTLRSVSFLFGGILPHWRQVEELGSIPFIRDVALASVNYAYLLFLYLLASNLLSHRKRDMNAYPRVYNSLLSLIYHCLFGA

SEQ ID NO: 180632 - protein, 496 aa, Oryza sativa
  Clone ID: PAT_MRT4530_77986C.1.pep
MGSTATARRQHHAVMVPYPAQGHVTPMLKLAKLLHARGFHVTFVNTEFNHRRLLASRGAAALDGVVPGFRFAAIPDGLPPSDPDATQDIPALCYSTMTTCLPHLDALLATINADAAAAPPVTCVVCDGVMSFAYDAARRIGVPCAALWTASACGLMGYRHYRHLVERGLVPLRDAAQLTDGYLDTVVDGARGMCDGVRLRDLPSFIRTTDRGDTMLNFLMRECERLSLPDAVIVNTFDDLERQALDEMRRVLPPPVYAVGPLLLQVRRAVPAGSQLDVAVGANLWKEQGGLLEWLDGRPPRSVVYVNYGSIAVMTNEQLLEFAWGLAHSGYPFLWNVRPDLVKGDAAVLPPEFLAAVEGRGLLTTWCPQEQVIEHPAVGVFLTHSGWNSTLESLAAGVPMLSWPFFAEQQTNCRYKRTEWGVGMEIGGEARRGEVAALIREAMEGEKGAEMRRRAAGWKEAAARAARPGGPAECGLDRLIHEVLLAGGNKGGQRLS

SEQ ID NO: 180633 - protein, 475 aa, Oryza sativa
  Clone ID: PAT_MRT4530_77987C.1.pep
MARRQRHAVMIPYPAQGHITPMMKLAKLLHARGFHVTFVNTEFNHRRMLASRGAAALDGGVPGFRFAAIPDGLPPSDADATQDIPALCRSTMTTCLPHVVALLAELNDPTSGVPPVTCVVADAIMSFAYDAARRIGVPCTALCTPSACGFVGYSHYRQLVERGLVPLKDAAQLADGYLDTVVDGARGMCDGVQLRDFPSFIRTTDRGDIMLNFIMREAERLTLPDAVILNTFDDLERPALTPCAPSSLRGSPLDTAIGSNLWKEQGGLLEWLDGRPPRSVVYVNYGSIAVMTNEQLLEFAWGLAHSGYPFLWNVRPDLVKGDAAVLPPEFLAAVEGRGMLTTWCPQEQVIEHPAVGVFLTHSGWNSTLESLGAGVPMLSWPFFAEQQTNCRYKRTEWGVGMEIGGEVERSDVAAKIREAMGGEKGREMRRRAAEWKEMATRVTLPGGTADINLTRLIDEVLLSGGKKRQALDARD

SEQ ID NO: 180634 - protein, 325 aa, Oryza sativa
  Clone ID: PAT_MRT4530_77988C.1.pep
MRWLPRLLSHAAAAGRATARTTGSHARGSNGFASGRGGSDGAVVPREWLRKLWTEELRRQRDAARRWGRRAVATTDGGGADSFSDFARAPSRSYQHDDRDLTPVEAKLKPLLSRANLLIARDIEWANIVLAFEQESRYIIMDPLFPQSPVGFIREKSNVIFRQLFRSRRPFVAEITDAMGNEIFTVRRPFWLINSSIYAEVNGKLGLPPFVFFRNRQFAVVENPGFWNWTFTLTDEDDNVLAQIDRNWRGIGFELFTDAGQYAIRFGDAGLNRKFGLASDIDELHVVRQLSLPERAVALALAVSLDCDYFSKRGGWGLPFLIATE

SEQ ID NO: 180635 - protein, 350 aa, Oryza sativa
  Clone ID: PAT_MRT4530_77989C.1.pep
MRWLLRLLSHAAAVRSDEVAAPAALPRRGGWEGHSEDHWQPCRGIQWVRERLRGRRWYGGASGVATEAVNRGVEEAKGCCEANSWIGLKGIGYRMKMETNFLNEQDGHFCGQAKLKPLLSRANLLIARDIEWANIMLAFEQESRYIIMDPLFPQSPVGFIREKSNVIFRQLFRSRRPFVAEITDAMGNEIFTVRRPFWLINSSIYAEVNGKTQITQFFVYLLVLLYCLTLDLPPFGFFRNRQFAVVENPGFWNWTFTLTDEDDNVLAQIDRNWRGIGFELFTDAGQYAIRFGDAGLNRKFGLASDIDELHVVRQLTLPERAVALALAVSLDCDYFSRRGGWGLPFLIATE

SEQ ID NO: 180636 - protein, 161 aa, Oryza sativa
  Clone ID: PAT_MRT4530_7798C.1.pep
SKTDDRDRTVHDRLTGEGDDDVDDDVTTSGGGSAARTAHARRRTAALRHERRAPTGSGRHGELTGDQSDGGRGTNGDGDEEEAAALFGLTTATVLRRSTATAKGRTRTATTWRPRRRSSRATATSGTAAAHGWSDGGDGGARAHDARALRTTRGEGEGGGG

SEQ ID NO: 180637 - protein, 258 aa, Oryza sativa
  unsure (1)..(258): unsure at all Xaa locations
  Clone ID: PAT_MRT4530_77990C.1.pep
TFLGDENIPASWACAYEYTAAERCTTSASPIRPVSSPAALDSRLLACPAAGILLAEVALAFSCSRRIRSPVSILIHPIRPRPRVSSPRLPLAPIPILRGEVAPGVLLLPPHRRSPAKLKPLLSRANLLIARDIEWANIMLAFEQESRYIIMDPLFPQSPVGFIREKSNVIFRQLFRSRRPFVAEITDAMGNEIFTVRRPFWLINSSIYAEVNGKEVGVVHRRWHLWRRIYDLYLXNRQFAVVENPGXWNWTFTLTDEG

SEQ ID NO: 180638 - protein, 105 aa, Oryza sativa
  Clone ID: PAT_MRT4530_77991C.1.pep
SARTTTRRAMGGRRQRRGMKLRIRRCHHRIWHPRGWIRRPAAGPGRRRASLPSARRRRSGGACAGGRRGGGRSGRGGGQSGRGGAGPPAVSSAPPPPLSPLVGDG

SEQ ID NO: 180639 - protein, 95 aa, Oryza sativa
  unsure (1)..(95): unsure at all Xaa locations
  Clone ID: PAT_MRT4530_77992C.1.pep
LLCFWNDLHLELRLNSFFILEKFHTVSTVFTTEANSVLSLSGDPLGAQGDXSPAKFPPAAMSTSASPSVAPSAKYAEVRAHRLDPFSPRNRSIFF

SEQ ID NO: 180640 - protein, 71 aa, Oryza sativa
  Clone ID: PAT_MRT4530_77993C.1.pep
GKKRALSQENFPFIERGFPRGPLKNPMGWKWKRESTFPAPLLWGPPPKPAGAGGPPPGTPFWPSPLKAPPP

SEQ ID NO: 180641 - protein, 132 aa, Oryza sativa
  Clone ID: PAT_MRT4530_77994C.1.pep
KKHTHNKPKKKGTRANKPRTNKCKKKRKEKKAHAHSEAGTHMAVVTITSHVPEAPVDDNVLDEALGEAEGVQEVLAETQLRTPHKAPLAGVVAAQRVLCLQLLVQMHQGCSQVACDSSRRRGSMCIARKDEK

SEQ ID NO: 180642 - protein, 95 aa, Oryza sativa
  unsure (1)..(95): unsure at all Xaa locations
  Clone ID: PAT_MRT4530_77995C.1.pep
GGHRQRRDGGEENPSNLQEPLLPXCNSCCSYKTMHCAVGSIGVLVFEEEAEGYGYFINLVVGGGLAGGRQGDVLDGGGPVQDVLDGGTSAQFCRA

SEQ ID NO: 180643 - protein, 1083 aa, Oryza sativa
  Clone ID: PAT_MRT4530_77996C.1.pep
MPSKDATDLKNQQSLVRISDLESELSKLQAQLEKIEGKVQMLEQELKHKKEEVDSLQISIQDEAHKRSEGEAALLAMTNLNSESQEEVNRLTLETKKLKVKLSEVENSNTDLENIVAKHTQDIHVLREKNVSTELMIKELHHELDALKELNVKLESEMGLHIGEKEALQRDFACQKEEKQNLEGIHHSLAEEMSTLKSRSAANQKLIEDLQIMNLKLKEVCAKNEVEKALLSEKVQEVEKLSEEFSLMENSLSDANAEMDSLREKIKVLETSEGSLKDVISSHVSEKAILTSDLETLGKSYADISEKNSNLDILISDMKAEIENLRTKLTDSEETCQAHLANNSALSDEKNNVFSQLESVTVVMKALESKHADLEDKSSSLSREMNLAYDQVRELQDQLRVKDEEYEAFVKSHQTQVNDFEEQISSLQKKSYYMNELLEQEQENHMSASINVVILENCLADLKDKNVDLFNECQKFAEANHAAEMLISQMKDEARYHQDERKFLLIHTEKLREGISQHMKILNICKDLGPANIAEDKIILQTVSDEASNIMKLKEQSEDANRLMYTELTVLATVMLQVGLELRDLNLQKRALEKELETRAAEFITLQNNNVQMLEWNEQLKQELQQGCEREEVLKAEILVLQEKLSCSRESYQTSQNEIVSLTEKNETLCKEYQSLIENYNALEDENGTLLSECMRLEHLSLFLRGHNNEVATALGSLTDEMALLSVGKDELDCEVQELSRRGMMLESENNNLKEYFIYLIEILSAQLALSEFDLNINKSICQELASELESCMAQLSQKDDELLEAEDKVHLLQGKNRELCGVVGSLQVAIEGAKIVKEELEKKITTLTEEGNTKDGEISLLRQANERLQVEADILKDKEDSLTSSHELLSKEVEQHEGEFVVLMDDAISSSVNAAVYEEKALELMTENTELKANLSTHVALIASLSDHVNELEENTLSLSKPSRAESKKEDAEVPFMQERNHGPESHPLPEGTPELQRLIARMGALQVAIRNAKDLHDQESTKSAATLAAAHRDIQELKARGGSQMEAREIYSDNEKLNNVEGSKGKQVQMMKDIELDQIST

SEQ ID NO: 180644 - protein, 60 aa, Oryza sativa
  Clone ID: PAT_MRT4530_77997C.1.pep
GFGFFRVKTLCGSAGSTKGEPKILVYQKVRKKGAGALFTPAISFNPAAGLVLRRSTLGTP

SEQ ID NO: 180645 - protein, 43 aa, Oryza sativa
  Clone ID: PAT_MRT4530_77998C.1.pep
FVLISNMLYETHQWEDMKRLRKLMREWGMKKNMGVFIEQRTYD

SEQ ID NO: 180646 - protein, 152 aa, Oryza sativa
  unsure (1)..(152): unsure at all Xaa locations
  Clone ID: PAT_MRT4530_77999C.1.pep
MAAVTRAARSRALLLLPRASAAAPHFSTTASSGAAAAAAAPGGRRSARAFDARGGGGVXAXEPAAPPPKRWGLRKLXAFRGVCGALGAGGDSSYAYTLEEVDQKTREVRKAMTTPRPVXEDAXGFEKXQAMIYXXXXKAXXGKIEXFMDGHT

SEQ ID NO: 180647 - protein, 52 aa, Oryza sativa
  Clone ID: PAT_MRT4530_7799C.1.pep
MILSDYAETNDHKLSFPTSRLGAKVSAFSTKAGQGSKSLISREQFSDDKAGG

SEQ ID NO: 180648 - protein, 124 aa, Oryza sativa
  unsure (1)..(124): unsure at all Xaa locations
  Clone ID: PAT_MRT4530_779C.1.pep
YIQDTKQFVHGVSGGFWGQASLQAVVNTWFLLPCSDSFRLASIPIRLAFNTISSIVTIVPIARAPFLCPGEKSSTIQSXRANSSNTAKXLSFCVYSCQDPNGHCLVSPAWYSSLLSCPISHCSS

SEQ ID NO: 180649 - protein, 59 aa, Oryza sativa
  Clone ID: PAT_MRT4530_77C.1.pep
RAAGIRHEGDSNNEKEKSYGYMMMERLRGSPDGRIDHVLQVIRLFLLKQVQFHSLLVYV

SEQ ID NO: 180650 - protein, 624 aa, Oryza sativa
  Clone ID: PAT_MRT4530_78000C.1.pep
MRGGGFVNEMRHTGKRPQQHRDHDREERRDQKRRPVPRAQENSGNDELVVYRILCPDRVIGNVIGKNGKVINSIRQQTSAKVKVVDPHPGADKRVILVYCFVKHRNLDVNDDDDREPVCTAQDALLKVHDAIVDALSITRDSDDEEANILVPASQSASVIGKSGAVIKRLRSTSKAFIKVSPKDPNEVTHSCAMSFDNFVQITGDARAVRKALFAVSTIIYKCPSKETIPLETSVSDLPPSIIVPSELPVYPSSNFYSPSDAAISSGHPSLSILGSTPHVPELTVSADAHSRLPIYQSVLPVIPAYNTPKCSGELVLRVLCPAGKIGLVIGKGGVTIKSIRKESGARIDVDDSKNDREESIITITSNEATDDAKSAAVEAVLLLQSKINDDNEGKVIGCLIGKGGSIVNDMRSKTKAAIYISKGEKPRKASSSDELVEVFGEVENLRDALVQIVLRLRDDVLRDSVDRQNSEKDGKLTVATTDPLYASSYPLPALLPYRQQITPLGYDHRGDIERGLEVYPHSSLYGYSSLQAIDDGYSAVSSYASKGYGGRPPHMEMTIPASGLSKVMGKHGTNLDNIIKISGAHIEIIESKSSRHGHVARISGTTEQKQSAENLIKAFIMST

SEQ ID NO: 180651 - protein, 340 aa, Oryza sativa
  Clone ID: PAT_MRT4530_78001C.1.pep
MEQVDGSGIPASVGRGRGRGHSTGDALVASAFGGLGKEEKAAASARGMEEEREMEEEQVALGEQRRQQRKLNCLYFKVVIKLTQEHGKGVRPPSGTQVDGVYLQSNYEELIEIMDGFKTSWKDYGITVMCDSWTGPTMMSIINFMIYSNGQMYFHKSMNETGKLQNSNFLYDCIREVVVNDIGAENVVQLVTDNGSNYKKACKTLIQEHKHIVWQPCATHAINLMLKDTGSLSPVDQVVSSAKKISMFFCNHNRFLPRILKARQELESQFGDASQEEKPVLEKINTRITSLLDTGFMRAGTRFLDEPNHACANRRRANKKRKKNAKTTYIDEEDVASGDV

SEQ ID NO: 180652 - protein, 110 aa, Oryza sativa
  Clone ID: PAT_MRT4530_78002C.1.pep
MAAAASALPRADPAEVVAAAFPVGGFSGPLPPSPSVRSFSLGSGGGGDVSGTRGWIRPRGSARCHAAVPSAGSAEWLAPPSFCRRGGAMLRWQGKRARVARGENRADSDG

SEQ ID NO: 180653 - protein, 85 aa, Oryza sativa
  Clone ID: PAT_MRT4530_78003C.1.pep
MSFVISLTLLTIIEDAITGNNLISSWFGMVHSWFEDRTVQPGWLYRTVGPIQQGMLYSVGLILFNYYLTVLLNSQMFAKCCFFCK

SEQ ID NO: 180654 - protein, 57 aa, Oryza sativa
  Clone ID: PAT_MRT4530_78004C.1.pep
VLVQIIQFATQPAMTILRMDDVISRTNSESAVAESRALTLIFVLSSDLLCVMVVLDP

SEQ ID NO: 180655 - protein, 200 aa, Oryza sativa
  unsure (1)..(200): unsure at all Xaa locations
  Clone ID: PAT_MRT4530_78005C.1.pep
NLPVASTASLGFGSLPPSCRHHGXXVPGRDVFVVMATVGAVDGVEVVSALIGQYYDGLALELVVFSLAIVVLRYAAVLYANHLVDSLSELQAAVGAGIGGSSSGGGLDSAAIARLPCFVLPPRRGGSAAAAAAECAVCLGAVEEGETVRALPCCPHAFHARCVDAWLRLRPTCPLCRADVPVPARPTAPRRRHVPRGTVE

SEQ ID NO: 180656 - protein, 465 aa, Oryza sativa
  unsure (1)..(465): unsure at all Xaa locations
  Clone ID: PAT_MRT4530_78006C.1.pep
MEQPNDVGILAMDIYFPPACVHQEALEAHDGASKGKYTIGLGQDCMAYCSEVEDVISMSLTVVASLLKKYNIDPKQIGRLEVGSETVIDKSKSIKTWLMHIFEESGNTDIEGVDSSNACYGGTAALLNCVNWVESILMQRLVVCNXDCAVYAEGPARPTGGAAAIAMLIGPNAPISFESKYRASHMAHVYDFYKPDLASEYPVVDGKLSQTCYLMALDSCYRQYCTKYEKIVGEQFSISDAEYCVFHSPYNKLVQKSFARLYFNDFMRNCSTVDNDAKEKLQPFANLTSEESYQSRDLEKASQQVAKHLYDIKVQPSTLLPKQIGNMYTASLYAALASVIYNKHDSLDGQRILMFSYGSGLTSTMFSLRLHDGQHPFSLMNIASVLDVTTKLESRHVTSPEKFIETLKLMEHRYGAKDFETSKDTSLLPPGTFYLTKVDSMYRRFYDKKAAEGKIKGCNGIANGH

SEQ ID NO: 180657 - protein, 115 aa, Oryza sativa
  Clone ID: PAT_MRT4530_78007C.1.pep
SMEAKRVLIWLLVGACSLCALLFCLQVIVLIRTCPLKVFSLLYYWFTHETIYIICADLTCVKDLYCHLCCGLQLFLHCTLPVITRNVQVFSFEFTCHCGCHQSWIFERRWMFLGY

SEQ ID NO: 180658 - protein, 66 aa, Oryza sativa
  Clone ID: PAT_MRT4530_78008C.1.pep
KRFASPFPKRPSRPRLVSCPRLRVFCPAGGIPVYPRFFPFSKNNCPQFFLYLRPIQPFFSRFFFPF

SEQ ID NO: 180659 - protein, 195 aa, Oryza sativa
  Clone ID: PAT_MRT4530_78009C.1.pep
MLQPTCAPLPCHPATSPPQLEKGGEDRHPLEKVKWRSPMLRYRAAARFAMLELMSREGRGEPGSVAVPWLVLNSHERGEATTMAVELPRHSKSVPPSLRSSPSKESRSGGAPWLCRRLGLLDHRRISVWVGLERRPGVERCRDGEKEEAGGGARVHCRGGESGERPEAAVSPVNSSRWVGGGSGDGCGPSGGGWG

SEQ ID NO: 180660 - protein, 379 aa, Oryza sativa
  unsure (1)..(379): unsure at all Xaa locations
  Clone ID: PAT_MRT4530_7800C.1.pep
INMCMDRKSDTYSLIPDVTTGNIPTGVPFVRVLFLVPGGKTEPQTKPYPLDMWKYGSALQXRPEDRSLYGRAGPHAAATRRARGRPCRRXGGRRRAHAPMVAAGDHRRSGAAAERGEGXGERRRPSTAHPGATAATGEVAGAEGGGGVARVDGDGGAPAVGYRNGEVDEVGEDAAKPKEAAPRWEAVRGDDGGGPELGGDGGERERRRELESGEEEGRREAETDGGGAGRVXIGLEGGEGGRRGRKPARRSRAPSMAPAGLGEGFQMNPRERGRENWGERERESRGIIPPYXLHAGTTGCGGFGGGGGAXAWAERRERREVRDDGXAPPVSEGGGRARPSAARARGWAEWAAGRGERGRGRWAKPAQEGEGGILRFFFL

SEQ ID NO: 180661 - protein, 81 aa, Oryza sativa
  unsure (1)..(81): unsure at all Xaa locations
  Clone ID: PAT_MRT4530_78010C.1.pep
CRRCRAAAPPPLKPPRRALPPCATVEPEGVADPSEGQDPQDFEQGKSSLFLEHVDPNCEIILFTNKNCXNDEHPTCDYAMP

SEQ ID NO: 180662 - protein, 77 aa, Oryza sativa
  Clone ID: PAT_MRT4530_78011C.1.pep
LLQGISCVPCLLVDVILYNCFRTPVVHSCFQCYAWRQTASDTSTVQLMLHVGADFFVGITSFLKISGIFALPKSLIF

SEQ ID NO: 180663 - protein, 358 aa, Oryza sativa
  unsure (1)..(358): unsure at all Xaa locations
  Clone ID: PAT_MRT4530_78012C.1.pep
PDPPPPPLPLPPLWPPPLPLPSPVALAFAYGGEDVGEAPPSAAADPVPLPVPVPXPPDPSTPPACPPATPPPPPPALALPPPWLTEPELEPWPDPEPKPVPLYCEPPPPQPPPPAFAWVPLPLWLTPXPFPFPTPPPFTYPPPLPVPEPXPYPDPPPPPLPLPPLXPPPFPLPLPDPFPPPVPXPPDPSTPPACPPPLPPPPPPALAXLEPAPDPLPNPVPLYCEPPPPQPPPPAVAVTPLPLSLDPXPLPFPTPPPFTYPPPFPPPXPCPWLELEPRPDPEPCPDPLYRPPPLPPPPPPPPLPWTEPPSFTILTLDPVPLPDPPPAPSIDPPPSPHPVPFPLEVLEALANPMPNITM

SEQ ID NO: 180664 - protein, 236 aa, Oryza sativa
  unsure (1)..(236): unsure at all Xaa locations
  Clone ID: PAT_MRT4530_78013C.1.pep
LEASRTGAPVAPPQGXRGRRNLIVAPSLPLLFPASLPPEQPPSKPGDCXRRRRQGSPFPLLLVKWLGXPTRPKHERRSPVTMARSGAIEFGSGPSLVGSVLDAWVGRGGXGARAARRRRRRHEGRAEAAAIAARGPARRWLRLVDRASAAASLWPVHGEAGGGGGVSSXPSRLKKPXSWSSSPPMARSCPSHGELRERVDAVACAKDDGAMATCESRPXAYLSHGVVNWANWWLIR

SEQ ID NO: 180665 - protein, 62 aa, Oryza sativa
  unsure (1)..(62): unsure at all Xaa locations
  Clone ID: PAT_MRT4530_78014C.1.pep
RFYXSDTWXXXRXKXSEALQSNGRDATXDGSDSEXKNNRKNYXXSIXAIXGGXRXXLXXATX

SEQ ID NO: 180666 - protein, 36 aa, Oryza sativa
  Clone ID: PAT_MRT4530_78015C.1.pep
GAYTRMQLLNINIAPWVLIKDLIYLSISVFLHRNYK

SEQ ID NO: 180667 - protein, 52 aa, Oryza sativa
  Clone ID: PAT_MRT4530_78016C.1.pep
IIIANVTAVPGESDLADVNMFLTLYEIFFLCVAMQATTEFLYTISHPKSCKN

SEQ ID NO: 180668 - protein, 64 aa, Oryza sativa
  Clone ID: PAT_MRT4530_78017C.1.pep
RPRFYNLGLRLFYYVAVLGHYYFPQEKAFPMVKLGSIQVPCREIWGAFRGRSEITGLNQGFANF

SEQ ID NO: 180669 - protein, 86 aa, Oryza sativa
  unsure (1)..(86): unsure at all Xaa locations
  Clone ID: PAT_MRT4530_78018C.1.pep
MVLSNDIDLLNPPXELEKHKHKKKRLVQSPNSFFMDVKCQGCFNITTVFSHSQTVVVCPGCQTVLCQPTGGKARLTEGCSFRRKSD

SEQ ID NO: 180670 - protein, 180 aa, Oryza sativa
  Clone ID: PAT_MRT4530_78019C.1.pep
MTARSLLAGRMVAAARRAFRSWPLHTITTTTTTDAATAIATKEQHKVVSRLDVMEDIRKKLRPAGPSSSSPSPPPPRAATTSLSAAAAAVSNFKMVLSNDIDLLNPPAELEKLKHKKKRLVQSPNSFFMDVKCQGCFNITTVFSHSQTVVVCPGCQTVLCQPTGGKARLTEGCSFRRKSD

SEQ ID NO: 180671 - protein, 733 aa, Oryza sativa
  Clone ID: PAT_MRT4530_7801C.1.pep
MVNTRSNGNGPNNNNNNNNEGNPTLAQVLAQQTQLMNMMMQQLQNQQNQGNNHTPPQNKLAEFLRVRPPIFSSTTNPVEAGDWLHAIEKKLDLLQCTDQEKVSFASHQLHGPASEWWDHFRLNRITAEPITWLEFTAAFRKTHIPSGVVSLKKKEFRSLTQGSRSVTEYLHEFNRLARYAPEDVRNDEERQEKFLEGLNDELSYPLMTGDYSDFQKLVDKAIRQEDKYNRMEQKKRRIAQFKRQFFNNNAGNNIRNQAPRPVAAPTQQQPAKREQGSKPVVCFNYGDPGHYADKCPKPRRAKVVPTQSNSIAPASKARVNHVAAAEAQDAQDVILVREYPDVFPDDLPANELAEVKRQVDDLLQKGYIRPISSPWGAPVIFVEKKDHTQRMCVDYRALNDVTIKNKYPLPRIDDLFDQLKGATVFSKIDLRSGYHQLRIKEEDIPKTAFTTRYGLFECTVMSFGLTNAPAFFMNLMNKVFMEYLDKFVVVFIDDILIYSRTKEEHEEHLRLALEKLREHQLYAKFSKCEFWLSEVKFLGHVISAGGVAVDPSNVESVTNWKQPKTVSEIRSFLGLAGYYRRFIENFSKIAKPMTQLLQKDVKYKCRAPPPFRSSSSLGKIAIVVAKSSPSSSAPSPPPKTAGAPPPSSSRRSPPLLPRRRRRPLLLRRFFGHRWVRRAVRYPLVPFVRAEAPPFAGEFARPSRRAAAGGDVTADVIVAVCQEEFYNDADGVED

SEQ ID NO: 180672 - protein, 168 aa, Oryza sativa
  Clone ID: PAT_MRT4530_78020C.1.pep
MGRGGRGGGGGGRSSFRGSSTGTKAVPRAAPATTPAAKSTGTAPATKNTSSGSNDSVIGSIGSAFFDGWGWGTGYGMVQRGMDAVFGPRTVNVVDATSTSSSPAPAAAAAAHPMLDACGAHKKAFQECVAQQGIHVSRCQPYLDMLNDCRRDSAASAAVGVATTTRIL

SEQ ID NO: 180673 - protein, 100 aa, Oryza sativa
  unsure (1)..(100): unsure at all Xaa locations
  Clone ID: PAT_MRT4530_78021C.1.pep
WLKREIIKFINAGFYCTXASNRHVMQEAAXTWAGMLRRIDTLVHGSXVVRLTRLAVITKLVRANETPSLMVRGTISAFGDLXAMSCIAELMRGRASSGGG

SEQ ID NO: 180674 - protein, 120 aa, Oryza sativa
  Clone ID: PAT_MRT4530_78022C.1.pep
GGHNPGPFSRVVFGCKNGMGWDKRSFRGEWDGLVPGDEYSFQIWDQSIRPNLADELVPPRTSERRDDTLLTALVALGSACGDDNGGLGDGGGGGLGDDGSSGGEGGSGETSDGEGCGGRS

SEQ ID NO: 180675 - protein, 100 aa, Oryza sativa
  unsure (1)..(100): unsure at all Xaa locations
  Clone ID: PAT_MRT4530_78023C.1.pep
AQGSPASDQGTTVGGEGGFVGGGEAWRQRIWRHVAPPLLFPSLPLDIRWRRARGVFGRRPRGRRPEKRVASVAMGRHGGDGSGVGDESGXRIQRLERATM

SEQ ID NO: 180676 - protein, 76 aa, Oryza sativa
  Clone ID: PAT_MRT4530_78024C.1.pep
MKVEDWLGVTMTMTSALQQGRCVPFVVMAALMTSSVISPALGKVGEAAEGGSGREAFPVRAHRQWRVETVDGDGKS

SEQ ID NO: 180677 - protein, 77 aa, Oryza sativa
  Clone ID: PAT_MRT4530_78025C.1.pep
PKYPLSHLTQAPIVQCPNPVPLFLFVRRPSQRNHAASPPFLVPPRAPPPATAYVPSPEKPPVHSPPRLPHRPSPAPL

SEQ ID NO: 180678 - protein, 121 aa, Oryza sativa
  Clone ID: PAT_MRT4530_78026C.1.pep
CTTPPPPFFPPPSLPTTTSSLPGGANPSRTAPPLLPQPPPPLLLLLLRVTPDPAAWRSGPPDPATTRGSSAPPPLRHAGSGHHVQQQLLLRPSSGSSTTATAPPLVFLQQQCKAKVCMVGF

SEQ ID NO: 180679 - protein, 118 aa, Oryza sativa
  Clone ID: PAT_MRT4530_78027C.1.pep
HSRMMVLQSTACGEPGGSDDHISPSAKIEIASSRQNQVSQPVPRTTSLHSPVGSPAFPLFVTAIQIFLESKGACAKVRVSASRAISSIFRSPAKIILTMSVCQSIDGLSSQVSVRALL

SEQ ID NO: 180680 - protein, 38 aa, Oryza sativa
  Clone ID: PAT_MRT4530_78028C.1.pep
EGAIKNPSSINPPCDTMIPANAPRRERPKAARGHPGKL

SEQ ID NO: 180681 - protein, 122 aa, Oryza sativa
  unsure (1)..(122): unsure at all Xaa locations
  Clone ID: PAT_MRT4530_78029C.1.pep
MFSEKKKATTHPLLPSPPLAMPPPSPPPXSVRETKREWGREGRGIAPPSTSMTTKKTTMTTRKMTTPXSPDPPHPHVAIQELPPRPSPSPAPLRPCCRHCPSSPPAPLQTPLPSAAPPRSHR

SEQ ID NO: 180682 - protein, 836 aa, Oryza sativa
  Clone ID: PAT_MRT4530_7802C.1.pep
MGVKEEEEEEEREKGIGCGYSCEASCHGRPRGIWPGPPLGLGCGSRDMKQYYNPRCLIPAVSLLLLVVILTVSNTYFPFPTTKSRTLSYSSFSSSHGGQKAADEACNIFRGEWVPDPDAPYYTNDTCSVIHEHYDCMKYGKPDLGFVQWRWHPDSCDLPRLDPARFLSSMRGKTLAFIGDSLARNHMNSLICLLTRVAEPTTSWPSSEHTVYHYGGGYNFTVLSFWAPFLVRNELIDTDRPAHTGLWNLYLDEPDAVWASHVPAFDYAVVSASSWFYRPSMLYEAGRLVGCHHCLLPNVTDLTLRYALRMATRAALRAVVGGGGGVTAVLRTVSPSQYEGGEWNKDGNCVRTRPYRRGEKTLQGVELDFHTLQVEEFEAAKRAVTASGGSGGAVRMMLMDTTEAMIVRADAHPSRSMMKFHEVIKLPSIAHYGLRYVLPAAAVAACVLVLAAVSLPGRVPLPPLLAPEVTKNTADGVGGDRSGCDIFKGEWVPDMSGEPPPYTGESCPVIHGHYDCMRYGRPDLGYVRWRWRPDGGCEMRRFDAARFLAAMRGRSVAFVGDSLARNQMHSLVCLLSRAERPAPWTNGSYAYRFERHGLTVAAFWSPFLVRAVETDPDGPTGSGAGLWSLHLDEPDAGWAAHVGAFDHVVVSAGSWFYRPSMFYDRRGRLVGCNTCLSPNVTDLTLRYSLRMAFRSALRAAATGGARRRGGRAARRTVIVRTISPSHYENGTWNGHGDCVRTRPARRGEWELNAMEKDMHRIQVEEFAAAARKRGKGAARMMLMDATEAMAQRPDAHPSKYRLWQPDKFKVSRDCVHWCLPGAMDACNDMLFHMLIG

SEQ ID NO: 180683 - protein, 68 aa, Oryza sativa
  unsure (1)..(68): unsure at all Xaa locations
  Clone ID: PAT_MRT4530_78030C.1.pep
PRXADXTSPNVKIARXEGXHXLSXPXLLPSSXSXSRPXLSVRSSXXDAADDDAAGGRGLMXTGGEKEG

SEQ ID NO: 180684 - protein, 833 aa, Oryza sativa
  Clone ID: PAT_MRT4530_78031C.1.pep
MSSSARGITLLCLLLIVSSTVLHFSIGGGSNGEKRRDDGDGDGDDEKVRLLLGANALGERDRRHGHGHGGGVSSAPAPAPAPARAHLPPPLLHKNARLPDPVPGRVGLGHRRGNATAAHRRRSEREGKKSTPLVVVAAGAALSGAAAVLLVVLVVFLACRRFQRRAMPGADQSGTNKVSFDPGPDVFYLDAVKPYVEADHGGGGGVVKTAPELAGPKEEPRCEEEDSGVALSDDGADSVHSSCCFHSSHFSYSELRDTKPGSNGVSPSPSGRSRRRSSAPVTPSEKNKAASPYSPQCPRTPSNRERSSRAHSPSSSVSDLTSVSTSVVKDHEVRRAVHSLMFPEAQSGGAGHVKEDEAESGNMRPPPPPPPPPPPPPPAVTQQQDVKTSCGPAVPPPPPPTPPPPPPLLAPKQQSSGGPILPPAPAPPPLFRPWAPAVGKNGAPLPKLKPLHWDKVRAAPNRRMVWDRIRSSSFELDEKMIESLFGYNARCSTKHEEVQSRSPSLGHHVLDTKRLQNFTILMKAVSATAEQIFAALLHGNGLSAQQLEALIKMAPAKDEADKLSAYDGDVDGLVPAERLLKVVLTIPCAFARVEAMLYRETFADEVGHIRKSFEMLEEACRELMSSKLFLKLLEAVLKTGNRMNVGTARGGAMAFKLDALLKLADVKGTDGKTTLLHFVVQEMTRSRAAEAADIAAGLGAELTNVRKTATVDLDVLTTSVSGLSHGLSRIKELVGSDLSGDERNQCFVAFMAPFVAHAGEVIRELEDGERRVLAHVREITEYYHGDVGKDEASPLRIFVIVRDFLGMLERVCKEVRGAKNCHGGNPALNLNNV

SEQ ID NO: 180685 - protein, 82 aa, Oryza sativa
  Clone ID: PAT_MRT4530_78032C.1.pep
HELLQSFVSLFKDEYKLPKGSVIELSRESSHVLKISIEGEELGSIQSKLLCKSILDLYIGDDPFDKNAKESVQENMASILKN

SEQ ID NO: 180686 - protein, 53 aa, Oryza sativa
  Clone ID: PAT_MRT4530_78033C.1.pep
SLGGTETCTRLGTDKTANCGTAAAGLKPTTLVLTPAMARAARVQADAWSTGIR

SEQ ID NO: 180687 - protein, 172 aa, Oryza sativa
  Clone ID: PAT_MRT4530_78034C.1.pep
MGGYGVTRFVAACLAASLVVLLLRCSWCEGRKLMLAAEERGGDEVMHFEGGLELRVAVWRRRRGGGSGVAVLPPPRPRGFSASGGRTERLMRSVPSPAATHDAGPSHDRTRIGHRPRHGREGRAVLATTRRPLRPQPHGRATAPAPGRAHSPASAPSPPHRPTVAEGDGIRR

SEQ ID NO: 180688 - protein, 210 aa, Oryza sativa
  Clone ID: PAT_MRT4530_78035C.1.pep
LTGTARSIDRSPWPPPPLAVVSSSRCGCAARCRSSCPPPPPAPPLPRRRRSSSSLSLRRRQAPAKVSCQLRRPRRRRRTWQLPIRLPRRYQWKEQGRTRSTCRRRRWRRRCRCRSPTGTPWRAPSPTAASAATRPSSPAPAATARRRASAPAASARTAATAAAQGRTATTAHCTSAPRRREPARRPDLAPPPPCCSFSPPRPCIFEIIIS

SEQ ID NO: 180689 - protein, 37 aa, Oryza sativa
  Clone ID: PAT_MRT4530_78036C.1.pep
MAADAVVHCCLPWICGSNFHSLDVMTSHPAIYSSKNI

SEQ ID NO: 180690 - protein, 56 aa, Oryza sativa
  Clone ID: PAT_MRT4530_78037C.1.pep
HRATATPHRRHLKPHWLPHRHRCRADANASSSLAATVSRCSSTSSSIYHSLLVVTV

SEQ ID NO: 180691 - protein, 34 aa, Oryza sativa
  Clone ID: PAT_MRT4530_78038C.1.pep
QKKPSSTPKPRNVWKEKPKTPAPSPPETGGKSTN

SEQ ID NO: 180692 - protein, 183 aa, Oryza sativa
  Clone ID: PAT_MRT4530_78039C.1.pep
MAGKRAGGRRVVAAGAGGRRADLPPPSSRVMAARGSALPNLRSVDSGSGRPARGSAVSPPTVTSRSAAPALVATAECGFAAPNLGSRRHIWHRRPRERSQPRRRLKAICETKLCLDIDVKSVMVILLLADQHQCDMLKQACFSFIANPNTLETVTGTPEYHQFKSLYPILLIEVLENVCILRK

SEQ ID NO: 180693 - protein, 146 aa, Oryza sativa
  Clone ID: PAT_MRT4530_7803C.1.pep
MPARSIGQNPMPVRMPVGHGHARWVPIRPAYAVRHHRRRAMPPPSCVAANAVVRHRLSRAPCDAACSCAPPPAVQTPQTPAASPRRHRHQPSWRLGAGMPTGKILHPCPPMPIGPDIRGYPDLMVVIMSTNKFDVAGVHMCDTKFF

SEQ ID NO: 180694 - protein, 370 aa, Oryza sativa
  Clone ID: PAT_MRT4530_78040C.1.pep
MGTEPLPMSRKLSSGGGWFDGEDPVEEGVLGDDAAKADAGGVGGGEELYSAASACVNITRNLSLPIKTNPEHDISSCEQGLLSEPHGKIPFLFSEIFSHHFKLFNSSPLSPFLPPPLLSFALSFSPLFASSPSATRDDYGTNDGGQAGGRPAGGGGGSGRPASGSATPVLESDGGARICFTQPQECRQREWETSAWIRRLPANGDEQICSPRPRSDRGVRICRPQPREQATYLAPPPSGAITATATPGWIYQQQEQLEQVMDSSMNPSPLMWFDNTTHNLLRAADCYGLERLKAICETKLCLDIDVKSVMVILLLADQHQCDMLKQACFSFIANPNTLETVTGTPEYHQFKSLYPILLIEVLENVCILRK

SEQ ID NO: 180695 - protein, 277 aa, Oryza sativa
  Clone ID: PAT_MRT4530_78041C.1.pep
MAADLAFEATELRLGLPGGGGDGDAAAAAARSSSGKRGFAETIDLKLKLEPAAAAVDDDDDKEEAAADDREKKVDIVGADNDDASPPAAAAAGGMKRSPSQSSVVTAAADPEKPRAPKAQVVGWPPVRSYRKNILAVQADKGKDAADGGGDKSGAGAAAAAFVKVSMDGAPYLRKVDLKMYKSYLELSKALEKMFSSFTIGNCGSHGVNGMNESKIADLLNGSEYVPTYEDKDGDWMLVGDVPWEMFVESCKRLRIMKGSEAIGLAPRAMEKCKNRS

SEQ ID NO: 180696 - protein, 47 aa, Oryza sativa
  Clone ID: PAT_MRT4530_78042C.1.pep
MGTFAWSTDPNVEPLVVKPGINHTQGRSAAPGTPRLDSADMMSIDTG

SEQ ID NO: 180697 - protein, 90 aa, Oryza sativa
  unsure (1)..(90): unsure at all Xaa locations
  Clone ID: PAT_MRT4530_78043C.1.pep
PWGVAGESMPXGCRGGDYDPGMVHCGELCCARGIVTVPFRGTVVVLRRMVTYRGAVSCGYSVAYLLCGLLSMSYAHSCNIHSSEEEYFSE

SEQ ID NO: 180698 - protein, 585 aa, Oryza sativa
  Clone ID: PAT_MRT4530_78044C.1.pep
MSPAARSLLLSAARRQRRRFSTEAPSSTPQQQLLPKGKRWDAVVIGGGHNGLAAAAYLARAGRSVAVLERRGVIGGAAVSESDLVPGFRFSRCSYLLSLLRPALIQELELERHGLKLLPRSPSSFTPCLDGRYLLLGPDAELNHSEISKFSENDAGAYPRYEEKLEKFCKLMDFVIDSPPPEMRHEYHLSMVDRMKDKVDKSVFWSKLLGIVMQQGQKDMVDFFDLLLSPASKILNNWFEGDVLKATLATDAVIGSMAGVHTPGSGYVLLHHVMGETGGQRGVWAYVEGGMGSVSSAISKAALEAGVEILTNAEVSQISVHHTSGKVQGVVLADGTEVLTSVVLSNATPYRTFVDLVPANVLPDNFLSAIKTADYSSATTKINVAVDRLPQFSCCKDFNPEGGPEHMGTIHIGSESMEEIDLAYREAANGVSSTRPVIEMTIPSVLDKTISPPGQHVINLFVQYTPYKLSEGSWQDSNVRKSFAERCFSLIDEYAPGFSSSVVGYDMLTPPDLEREFGLTGGNIFHGAMGLDSLFLMRPAKGWSDYRTPVKGLYLCGSGAHPGGGVMGAPGRNAASVVLEDLRTK

SEQ ID NO: 180699 - protein, 110 aa, Oryza sativa
  Clone ID: PAT_MRT4530_78045C.1.pep
MVLPAARRQDAAETWDNDGWWLGGRTAGSPRKLLLLATTSMASDQDYSSKIAYYGIEDDDDGCLIWQKEDTNKIDTLMSTKDGEEEDVLTFGKIWHILSVKEKVKTEIMA

SEQ ID NO: 180700 - protein, 279 aa, Oryza sativa
  Clone ID: PAT_MRT4530_78046C.1.pep
MDLLHGESVQTTVAIAVAVVAVAAGGAFLLLRSRKPKGCLDPENFKKFKLVEKKQISHNVARFKFALPTPTSVLGLPIGQHISCRGQDATGEEVIKPYTPTTLDSDLGHFELVIKMYPQGRMSHHFREMKVGDYMSVKGPKGRFRYQVGQVRAFGMLAGGSGITPMFQVARAILENPNDITKVHLVYANVTHDDILLKEELDNMAKTYPDRFKIYYVLNQPPEVWNGGVGFVSQDMIKAHLPAPAEDIQILRCGPPPMNKAMAAHLDELGYTKEMQFQF

SEQ ID NO: 180701 - protein, 129 aa, Oryza sativa
  unsure (1)..(129): unsure at all Xaa locations
  Clone ID: PAT_MRT4530_78047C.1.pep
PGRPTRAFLLRLFLSVTGVSCSRAGATTRARGGSGPINTEDPLNWGAAAAEMVGSHLYXVKHMVAHFREPLVKIQGATLRIGHVCGVAHAKDAVRRGDQLDEEGRPRVKASSEWILNCIGHSGDIYSGT

SEQ ID NO: 180702 - protein, 175 aa, Oryza sativa
  Clone ID: PAT_MRT4530_78048C.1.pep
MEWHTVEFRHGGGNEGEPERARATRSDASWAVPMPSRCLDLKPPGLLRTWTDDGDDVHWDQKRGNGVPPSKGRCIRSRGRVDAVSKGLRRRGGVASVWQRRAYGRIRFVVQRRGYNNNERYVIGALMTFHVRADNGGALGNAIPLEGVRCCDASFSLWRYESKFDKQRDLLGDVI

SEQ ID NO: 180703 - protein, 65 aa, Oryza sativa
  Clone ID: PAT_MRT4530_78049C.1.pep
PYGPSSPQYAAQTSSAMELHMPSAPPPPLQFPPPITRYATDLGGLGGKLTIRRRSGRGARRRRRP

SEQ ID NO: 180704 - protein, 77 aa, Oryza sativa
  Clone ID: PAT_MRT4530_7804C.1.pep
FFFFFFYIFPCSCLISCRIVQVWKDHPSILITMQTCPQEPLWSQQPTTDHICIHDCWHLLPQRSGFQFTHHELFRPL

SEQ ID NO: 180705 - protein, 519 aa, Oryza sativa
  unsure (1)..(519): unsure at all Xaa locations
  Clone ID: PAT_MRT4530_78050C.1.pep
LAWLARQGEGEQGAAGGGGGGERDGIGGGVGGGEGEGXEAAVPVPMSPAGRLFRETNFNCYIVAVIGLGARVDVAAARAGLEATLVRHPRFCSVQVSDEASKRAKPRWVRTTVNLDDHLIFPELDPTATSASPDQVIEDYMSTLSTQPMDHSRPLWELHVLDFPTSEAAATVAVRMHHSLGDGISLLSLLIACTRSAADPARLPALPPAPARRDGPVYARRRPPLSAGIVALAAWAWSYLVLALHTLVDVACFVATSLFLRDARTPLMGTEGVEFRRKRFVHCTLSLDDVKLVKNAMKCTVNDVLVGVTSAALSRYYFRKENDTNSEKRTRRKHIRVRSALLVNIRKTPGLHVLAEMMNSNKNNVARWGNLIGYIVLPFRIAMFHDPLEYIRQGKRTVDRKKSSLEAIFTYWSGNLIVKLFGIKTAAALCHGMLANTTLSFSSMVGPAEKVEFYGHPIEYIAPSVYGHPHALTVHYQSYMNIIKLVLAVDDAQFPDAHQLLDDFAESLRLIRQAASTKS

SEQ ID NO: 180706 - protein, 167 aa, Oryza sativa
  Clone ID: PAT_MRT4530_78051C.1.pep
MKCHQGAYNIPLIVVVTSTLHHKPNSAICPSLPHRCYSTCYFSSDKELHCIDDPSSAPLQHPSSRGPLTPKVYATLSVDTKQRAPLSPTLILLCHHRVTSTMSPSHRKAPLLSCRVTTPSQALAHRIHPSPAADTTTLARRHPVASFLVPMHIISIVGPRSQQPGRL

SEQ ID NO: 180707 - protein, 129 aa, Oryza sativa
  Clone ID: PAT_MRT4530_78052C.1.pep
KGQIPPNPVGAGPEKNPGGPSFSAGLGPAQPELFSKKKDRRGAKPGGPPPPPGGPRGGAPTPLDRGLGPLVLRDGGKGPRGALGLESLPRGNNNPWGGGLRGEGGKTGPGGVPPPRGKAGKKLARENPR

SEQ ID NO: 180708 - protein, 97 aa, Oryza sativa
  Clone ID: PAT_MRT4530_78053C.1.pep
MATAASCLSVFAGAAATTVAASSRLMSRRAVACAGYAGMDDGGGGEGMMIMARRRRLVVPGIIATAGGGVRLRPATKGAYTCARAQRARGYTPSVSY

SEQ ID NO: 180709 - protein, 51 aa, Oryza sativa
  Clone ID: PAT_MRT4530_78054C.1.pep
YHGSGVPSLLQTKLSRGRARKRSQKKDFQKDILPNLAFLSKHEVLEDLYTL

SEQ ID NO: 180710 - protein, 65 aa, Oryza sativa
  Clone ID: PAT_MRT4530_78055C.1.pep
MASHPPHPSPWRRRCWQLATTTELKKELRRISVEVYGTKASVLNTDCAICLGDFADIDKNIDKYI

SEQ ID NO: 180711 - protein, 726 aa, Oryza sativa
  Clone ID: PAT_MRT4530_78056C.1.pep
MGLPQVPAIKEEVLPTMSASLIVRPHFAGNSTCHLGKLPAESSSNRASPCSYISDFKRNDVLDSLNGFDGNFRASHAAYGPAGFQGLKPDTGDVGSRSGPKLGSNVQMPAMRIVGFESGFANSTGGPDTMVADNTDSPLVIDNCHSLIEQHGPHARKRVLSPLNNALPGHFRGDALNIGSGDAKIQHSDCARRLYTSGFQDRKKANTAILDSFEAPTWPASRYSNWSTEQGVDKFSGSTFTDGPLLESRESFPCSDHLEALESVAVPLAKLAHPPLLNLSPLGPTWMHGTNTVGSHGESLRETEGSTCEGYSEGHGRSRIRDAFEKTNILHDDFDMRIPKKSSDRKSQNWGPESASVSPRIGCIRSIGLLPVRRSLIGSFEESLLSGRYSCGKDNQNIDGFLAVLNVTGGNFSPPTQKLPFSATSIDENSSLLYYSSIDLVGRLPMSSSKSPKLKRSLSNHDSRSAKSRLRIPVKGRVQLVVSNPEKTPLHTFFCNYDLSDMPAGTKTYTLVVTANVSALSWSSYDGIFIIAYMDNAASHLIHAGHIDVLYTIHELLISGCKGCRPGQNCNLIDDSEKGGRKNMTCCSMECDIRESNDSSSLETSENGSSTNVCCCQSDTFPLGEKKYCCRSSKINDPAGGALRYALHLRFLSPFAKKPSRSMQRCKSDLSSEPYNHSSGPEEDRRFYLYNDLRVVFPQRHSDADEGELRVEHDFPADPKYFDISN

SEQ ID NO: 180712 - protein, 57 aa, Oryza sativa
  Clone ID: PAT_MRT4530_78057C.1.pep
NHNEKVKQNYKTSPRRAFSANQLHELAKNLASLEIVRLKNAMDDSAQIMRTRGRTRG

SEQ ID NO: 180713 - protein, 242 aa, Oryza sativa
  unsure (1)..(242): unsure at all Xaa locations
  Clone ID: PAT_MRT4530_78058C.1.pep
RLRIPVKGRIQLVVSNPEKTPLHTFFTRXDLTDMPSGTKTFMRQKVTLSPTLSSSNPMKEGSNAGDINIGPKAESVSCGEVTERESSECSSDGSEEKDANAKRCSLDSNMMESNKHNSPVNKKNNTDSDDCCCQMDNLGGKNYCCASSRINDSSGGGVIRYALHLRFLCPSSKKSSKSMLRCKSDPSSVPYDSNAAKEDDRRFYLYNDLRVVFPQRHSDADEGELRVEHDFPADPKYFDISN

SEQ ID NO: 180714 - protein, 269 aa, Oryza sativa
  Clone ID: PAT_MRT4530_78059C.1.pep
MRSPAALLPVVADGGGGVGVEEEMDVDEDMAMCGGRGGGGGEKKRRLSVEQVRALERSFETENKLEPERKARLARDLGLQPRQVAVWFQNRRARWKTKQLERDYAALRQSYDALRADHDALRRDKDALLAEIKELKGKLGDEDAAASFSSVKEEEDPAASDADPPATGAPQGSSESDSSAVLNDAEILPHKPAPAAAADAAASEETEAVVTGAALLHHAEVFFHGQLLKVDDDEAAFLGDDGAACGGFFADEHLPSLPWWAEPTEQWTT

SEQ ID NO: 180715 - protein, 788 aa, Oryza sativa
  Clone ID: PAT_MRT4530_7805C.1.pep
MTPLNNLCNFRVKKQYYNPRCLIPAVSLLLFVVILTVSNTYFPFPTTKSRTLSYSSFSSSPGGQKAADEACNIFRGEWVPDPDAPYYTNNTCSVIHEHYDCMKYGKPDLGFVQWRWRPDSCDLPRLDPARFLSSMRGKTLAFIGDSLARNHMNSLICLLTRVAEPTTSWPSSEHTVYHYGGGYNFTVLSFWAPFLVQNELVDADGPAHTGLWNLYLDEPDAVWAPHVPAFDYAVVSASSWFYRPSMLYEAGRLVGCHHCLLPNVTDLTLRYALRMATRAALRAVVGGGGGGGVTAVLRTVSPSQYEGGEWNKDGNCVRTRPYRRGEKTLQGVELDFHTLQVEEFEAAKRAASGGGARMMLMDTTEAMILRADAHPSRYRGWTRRKGWMKEYFTISNDCVHWSMMKFHEVIKLPSIAHYGLRYVLPAAAVAACVLVLATVSLPGRVPLPLLLAPEVMTKTADGVGGDTSGCDIFKGEWVPDMAGEPPPYTSESCPVIHGHYDCMRYGRPDLGYVRWRWRPDGGCELLRFDAARFLAAMRGSYAYRFERHGLTVTAFWSPFLVRAVETDPDGPTGSGSGLWSLHLDEPDAGWAAHVGAFDYVVVSAGSWFYRPSMFYDRRGRLVGCNTCLSPNVTDLTLRYSLRMAFRSALRAAATGSHRHATRRTVIVRTISPSHYENGTWNGDGDCLRTRPARRGEWELNAMEKDMHRIQVEEFAAAAEETAGKRGKEAARMLLMDATEAMAQRPDGHPSKYRLWQPDKFKVSRDCVHWCLPGAMDACNDMLFHMLIG

SEQ ID NO: 180716 - protein, 35 aa, Oryza sativa
  Clone ID: PAT_MRT4530_78060C.1.pep
GDAYQGKKRRHNCHTLVLSTAIRALTIRAYFTEHD

SEQ ID NO: 180717 - protein, 42 aa, Oryza sativa
  Clone ID: PAT_MRT4530_78061C.1.pep
KLFFFRAICSLSESHTLIRLCKKNEFWTQIKIISNLTLCTKI

SEQ ID NO: 180718 - protein, 79 aa, Oryza sativa
  Clone ID: PAT_MRT4530_78062C.1.pep
KCPACVNHWINRAPSQTPARKILHLATFGLFKAHTLAQKTRVFMLKPCASVSDLVARIWWPKGGEKKLRNRRDHNNLVL

SEQ ID NO: 180719 - protein, 68 aa, Oryza sativa
  Clone ID: PAT_MRT4530_78063C.1.pep
ARVVLEDFGVLLWKGGEITTGGGGGLVHHAVSYSGFLQSTIWLIILNQKLNCLEQLLVLEFTVAARSS

SEQ ID NO: 180720 - protein, 58 aa, Oryza sativa
  Clone ID: PAT_MRT4530_78064C.1.pep
VTLSCIHLSFIWYQSLKVRRDGRFLVKHCLHQSSYALWSAQVLAAIRGARLDGHITGA

SEQ ID NO: 180721 - protein, 104 aa, Oryza sativa
  Clone ID: PAT_MRT4530_78065C.1.pep
GRVGLVGLDDTLREAHELVISFQEKNAMHRLVMAGRQAEKFREVQSRIDSFLFVIPIIGYIGVTRRLDRIYRVLLPSDTSVPSASTGSRTHELAHISASAKWTP

SEQ ID NO: 180722 - protein, 210 aa, Oryza sativa
  unsure (1)..(210): unsure at all Xaa locations
  Clone ID: PAT_MRT4530_78066C.1.pep
QVCLKRGHVAAECWHRYDETYVPDERSAAAAAAYGIDTNWYLDTGATDHITNELDKLDVREKYKGGDKIHTASGAGXATRNTILKGRCRRRLYSLPTSPAKQVHAATTPSFSRWHSRLGHPAVPIVTRVLSKNNLPCSTVANKDSICDACQKGKSHQLPYPKSSSVSSQPLELIFSNVWGPAPISVGGKKFYVSFIDDYSKFTWVYLLKH

SEQ ID NO: 180723 - protein, 1406 aa, Oryza sativa
  unsure (1)..(1406): unsure at all Xaa locations
  Clone ID: PAT_MRT4530_78067C.1.pep
MAGSSSSTASTNPLFGVQVSEKLTKGNYALWSAQVLAAIRGARLDGHITGATAAPSMEIEKTASDKTTEKIVNPAYQEWFASDQQVLGFLLSTLSRDILTQVATASTAAQAWQQVCAMFTAQTKARSLNVRLTLTNTQKGNMSISEYCGKMKALADEIASSGKPLDEEDLVAYVLNGLDDDFEPVVSAIVARNESTTMAEVYSQLLNFENRQALRQAHASANAAVVVXQRGRSGGRGTRGRSNPAAPGRGRGTGGNQTRXRGHVAAECWHRYDETYVPDERSAAAAAAYGIDTNWYLDTGATDHITNELDKLDVREKYKGGDKIHTASGAGMEIKHIGDSVIHTPTRELHLKNILHVPQAKKNLISAHRLAMDNFAFLEVHSNYFLIKDRATRNTILKGRCRRRLYSLPTSPAKQVHAATTPSFSRWHSRLGHPAVPIVTRVLSKNNLPCSTVANKDSICDACQKGKSHQLPYPKSSSVSSQPLELIFSNVWGPAPISVGGKKFYVSFIDDYSKFTWVYLLKHKSEVFQKFQEFQTLVERFFGHKILAVQTDWGGEYQKLNTFFAKIGISHHVSCPYAHQQNGSAERKHRHLIEVALTLLAHASMPIKFWDEAVLAAAYLINRTPSKVINFACPLEQLFKEKPNYTALRIFGCAVWPNLRPYNKHKLAFRSKRCVFLGYSNLHKGFKCLEIATGRVYVSRDVTFDESIFPFSELHSNAGARLRAEISLLPPSLVPHLSSLGGEQNNHVLNYPPNVTDQFGEENAEIGEEIVANGEENAAAAADENAAAAANGGAQDDVHGVAYDASPEHSSPVTDDAMASAAEQHGNPIQEEHLVQASPQTASSTSPSVASSAGVHDDVTTDQSDQTDQAMPEAAVAPIRPKTRLQSGIRKEKSLEEAVNNKHWKEAMDAEYMALIENKTWHLVPPQKGRNVIDCKWVYKVKRKADGSLDRYKARLVAKGFKQRYGIDYEDTFSPVVKAATIRIVLSLAVSRGWSLRQLDVKNAFLHGVLEEEVYMKQPPGYEKKSMPNYVCKLDKALYGLKQAPRAWYSRLSTKLSELGFVPSKADTSLFFYKKGQVSIFLLIYVDDIIVASSVPDATSTLLQELSKDFALKDLGDLHYFLGIEVHKVKDGLMLSQEKYASDLLRRVGMYECKPVSTPLSTSEKLSVNEGTLLGPQDSTQYRSVVGALQYLTLTRPDISFSINKVCQFLHAPTTTHWAAVKRILRYVKYTVDTGLKFCRNPSLLVSGFSDADWAGSPDDRRSTGGFAVFLGPNLVSWSARKQATVSRSSIEAEYKALANATAEIMWVQTLLQELGVESPRAAKLWCDNLGAKYLSANPIFHARTKHIEVDFHFVRERVARKLLEIAYISTKDQVADGFTKAIPVRQMEMFKNNLNLERVKIEEEC

SEQ ID NO: 180724 - protein, 615 aa, Oryza sativa
  Clone ID: PAT_MRT4530_78068C.1.pep
MRRSSWAEQKIRATRRNAMHRRRRGGRCGPRQIKDSLASNETRRRCQRPRHTRQQVKGGFGRVNAGGLDSARESETEVKSQNRPCQGINLSGLAYAFHPVASALTGATIQCAVFPHAKENPTCPSTACMAPCDGMRWDEMRFDLRASKSGVICKSGVMAGSSSSTASTNPLFGVQVSKKLTKGNYALWSAQVLAAIRGARLDGHITGATAAPSMEIEKTASDKTTEKIVNPAYQEWFASDQQVLGFLLSTLSRDILTQVATASTAAQAWQQVCAMFTAQTKARSLNVRLTLTNTQKGNMSISEYCGKMKALANEIASSGKPLDEEDLVAYVLNGLDDDFEPVVSAIVARNESTTMAEVYSQLLNFENRQALRQAHASVNAAARCRGVFQRGRGGGRGTRGRSNPAAPGRGRGTGGNQTRGGNDRPICQVCLKRGHVAAECWHRYDETYVPDERSAAAAAAYGIDTNWYLDTGATDHITNELDKLDVREKYKGGDKIHTASGAEIGEEIVANGEKNAAAAADENAAAAANGGAQDDVHGVAYDASPEHSSPVTDDATASAAEQHGNPIQEEHLELSKDFALKDLGDLHYLLGIEVHKVKDGLMLSQEKPKSCIMEC

SEQ ID NO: 180725 - protein, 102 aa, Oryza sativa
  Clone ID: PAT_MRT4530_78069C.1.pep
QHVTLVELGSHHSSQYRRSNRLTKRNRALSSTPYQWDNIPVRYFDLIYYHHYPKLNHCVRRHRVSINISSRSIHSVSLFFIGRSGAQCGANPTGPIHSVCHV

SEQ ID NO: 180726 - protein, 130 aa, Oryza sativa
  Clone ID: PAT_MRT4530_7806C.1.pep
SLQFSCQEAVLQPQKAADEACNIFRGEWVPDPDAPYYTNNTCSVIHEHYDCMKYGKPDLGFVQWRWRPDSCDLPRLDPARLLSSMRGKTLAFIGDSLARNHMNSLICLLTRVAEPTTSWPSSEHTVYHYG

SEQ ID NO: 180727 - protein, 1398 aa, Oryza sativa
  Clone ID: PAT_MRT4530_78070C.1.pep
MCGKIPRQKLTNAWSTNTLATEAERLHDSHRVLLVARLWPLRRFASCHRRSSRTSILDAKLQDAAVAHEDEVTISAMDAEVAPEDDMTTGSIVDHLTQEDAMDAEVALEDDMMTDGIVDHLAQEDNSADAMEVEQLTQVCVHCSRVHENGLDEIKSNPIWGGSKFRSKPIASKSGVICKSGVMAGSSSSTASTNPLFGVQVSEKLTKGNYALWSAQVLAAIRGARLDGHITGATAAPSMEIKKTASDKTTEKIVLGFLLSTLSRDILTQVATASTAAQAWQQVCAMFTAQTKARSLNVRLTLTNTQKGNMSISEYCGKMKALADEIASSGKPLDEEDLVAYVLNGLDDDFEPVVSAIVARNESTTMAEVYSQLLNFENRQALRQAHASANAAARGRGGFQRGRGGGRGTRGRSNPAAPGRGRGTGGNQTRGGNDRPICQVCLKRGHVAAECWHRYDETYVPDERSAAARAAYGIDTNWYLDTGATDHITNELDKLDVREKYKGGDKIHTASGAGMEIKHIGDSVIHTPTRELHLKNILHVPQAKKNLISAHRLAMDNFAFLEVHSNYFLIKDRATRNTILKGRCCRRLYSLPTSPAKQVHAATTPSFSRWHSRLGHPAVPIVTRVLSKNNLPCSTVANKDSICDACQKGKSHQLPYPKSSSVSSQPLELIFSDVWGPAPISVGGKKFYVSFIDDYSKFTWVYLLKHKSEVFQKFQEFQTLVERFFGHKILAVQTDWGGEYQKLNTFFAKIGISHHVSCPYAHQQNGSAERKHRHLIEVALTLLAHASMPIKFWDEAVLAAAYLINRTPSKFGEENAEIGEEIVANGEENAAAADENAAAAANGGAQDDVHGVAYDASPEHSSPVTDDAMASAAEQHGNPIQEEHLSLEEAVNNKHWKEAMDAEYMALIENKTWHLVPPQKGRNVIDCKWVYKVKRKADGSLDRYKARLVAKGFKQRYGIDYEDTFSPVVKAATIRIVLSLAVSRGWSLRQLDVKNAFLHGVLEKEVYMKQPPGYEKKSMPNYVCKLDKALYGLKQAPRAWYSRLSTKLSELGFVPSKTDTSLFFYKKGQVSIFLLIYVDDIIVASSVPDATSTLLQELRKDFALKDLGDLHYFLGIEVHKVKDGLMLSQEKYASDLLRRVGMYECKPVSTPLSTSEKLSVNEGTLLGPQDSTQYRSVVGALQYLTLTRPDISFSINKVCQFLHAPTTTHWAAVKRILRYVKYTVDTGLKFCRNPSLLVSGFSDADWAGSPYDRRSTGGFAVFLGPNLVSWSARKQATVSRSSTEAEYKALANATAEIMWVQTLLQELGVESPRAAKLWCDNLGAKYLSANPIFHARTKHIEVDFHFVRERVARKLLEIAYISTKDQVADGFTKAIPVRQMEMFKNNLNLERVKIEEEC

SEQ ID NO: 180728 - protein, 1440 aa, Oryza sativa
  Clone ID: PAT_MRT4530_78071C.1.pep
MAGSSSSTASTNPLFGVQVSEKLTKGNYALWSAQVLAAIRGARLDGHITGATAAPSMEIEKTASDKTTEKIVNPAYQEWFASDQQVLGFLLSTLSRDILTQVATASTAAQAWQQVCAMFTAQTKARSLNVRLTLTNTQKGNMSISEYCGKMKALADEIASSGKPLDEEDLVAYVLNGLDDDFEPVVSAIVARNESTTMAEVYSQLLNFENRQALRQAHASANAAARGRGGFQRGRGGGHGTCGRSNPAAPGRGRGTGGNQTRGGNDRPICQVCLKRGHVAAECWHRYDETYVPDERSAAAAAAYGIDTNWYLDTGATDHITNELDKLDVREKYKGGDKIHTASGAGMEIKHIGDSVIHTPTRELHLKNILHVPQAKKNLISAHRLAMDNFAFLEVHSNYFLIKDRVTRNTILKGRCRRRLYSLPTSPAKQVHAATTPSFSRWHSRLGHPAVPIVTRVLSKNNLPCSTVANKDSICDACQKGKSHQLPYPKSSSVSSQPLELIFSDVWGPAPISVGRKKFYVSFIDDYSKFTWVYLLKHKSEVFQKFQEFQTLVERFFGHKILAVQTDWGGEYQKLNTFFAKIGISHHVSCPYAQQQNGSAERKHRHLIEVALTLLAHASMPIKFWDEAVLAAAYLINRTPSKVINFACPLEQLFKEKPNYTALRIFGCAVWPNLRPYNKHKLAFRSKRCVFLGYSNLHKGFKCLEIATGRVYVSRDVTFDESIFPFSELHSNAGACLRAEISLLPPSLVPHLSSLGGEQNNHVLNYPPNVTDQFGEENAEIGEEIVANGEENAAAAADENAAAAANGGAQDDVHGVAYDASPEHSSPVTDDATASAAEQHGNPIQEEHLVQASPQTASSTSPSVASSAGVHDDVTTDQSDQTDQAMPEAAVAPIRPKTRLQSGIRKEKVYTDGTVKWLNFTSSGEPQSLEEAVNNKHWKEAMDAEYMALIENKTWHLVPPQKGRNVIDCKWVYKVKRKADGSLDRYKARLVAKGFKQRYGIDYEDTFSPVVKAATIRIVLSLAVSRGWSLRQLDVKNAFLHGVLEEEVYMEQPPGYEKKSMPNYVCKLDKALYGLKQAPRAWYSRLSTKLSELGFVPSKADTSLFFYKKGQVSIFLLIYVDDIIMASSVPDATSTLLQELSKDFALKDLGDLHYFLGIEVHKVKDGLMLSQEKYASDLLRRVGMYECKPVSTPLSTSEKLSVNEGTLLGPQDSTQYRSVVGALQYLTLTRPDISFSINKVCQFLHAPTTTHWAAVKRILRYVKYTVDTGLKFCRNPSLLVSGFSDADWAGSPDDRRSTGGFAVFLGPNLVSWSARKQATVSRSSTEAEYKALANATAEIMWVQTLLQELGVESPRAAKLWCDNLGAKYLSANPIFHARTKHIEVDFHFVRERVARKLLEIAYISTKDQVADGFTKAIPVRQMEMFKNNLNLERVRIEEEC

SEQ ID NO: 180729 - protein, 93 aa, Oryza sativa
  Clone ID: PAT_MRT4530_78072C.1.pep
MQAIEFSLLARSIAANPVPQPKDNVLCGYYSCEFLRVNEKYTTNAEDKLCSFIASSPTNPVLWKTVLTAVNTSDNTDTEISPSRHADAVIISR

SEQ ID NO: 180730 - protein, 97 aa, Oryza sativa
  Clone ID: PAT_MRT4530_78073C.1.pep
RAIAAAKPFSCIWLGHGAWGRSGTGTLGGEEKWAARRRSLREQLPPLQPPVAAAAATAAASSKRGRSCSRRHAQPQPPLPSPGAAGSRTPLPPPGSA

SEQ ID NO: 180731 - protein, 37 aa, Oryza sativa
  Clone ID: PAT_MRT4530_78074C.1.pep
GKESSGSSMKSPLKDYLRLKFMLILQLASLWIKRALM

SEQ ID NO: 180732 - protein, 55 aa, Oryza sativa
  Clone ID: PAT_MRT4530_78075C.1.pep
MEVEGDDVRKGDDERRARGGEGLQQLWGGDELTMARGGDGAAGAAELWARCACPG

SEQ ID NO: 180733 - protein, 212 aa, Oryza sativa
  Clone ID: PAT_MRT4530_78076C.1.pep
MACINTFQSCSVLKGAKINGTKIGGGRGSPTFRCRASTFMDGSLRLEIDENPEAIISGEWPENFSLLSYDDLRAYLQSQEAAAQADNQRVALLSEAMSAPVLVATAEQTLEEVECHFETVSGLPVIDASLRCVGVIVKSDRARASHGSKTKIAEVMTSPAITLPSDKTVMDAAALMLKKKIHRLPIVNQDRQVIGIVTRADVLRELEALLEV

SEQ ID NO: 180734 - protein, 85 aa, Oryza sativa
  Clone ID: PAT_MRT4530_78077C.1.pep
EALARSARQWTPAQAPTWLHSGAPHAGQFTNHATSSEFSKILRRRSTVGDLKKKNLCIYGVISAPGCRLEQRPPVTGGRRGDRRS

SEQ ID NO: 180735 - protein, 104 aa, Oryza sativa
  Clone ID: PAT_MRT4530_78078C.1.pep
TNRHAFIFHLGDCPKSGLVHTHYATLATYSHGLDLTAHQSLLLNTALHMLVHWLYTHIRVVNESGGLSHTETPLLYPLYINEPWDTTEGTIHACKELSYTPSNT

SEQ ID NO: 180736 - protein, 43 aa, Oryza sativa
  unsure (1)..(43): unsure at all Xaa locations
  Clone ID: PAT_MRT4530_78079C.1.pep
CVVVMXLAPLSVFVSTYRVEGSETQHTYCTNRRKKISHDLLSL

SEQ ID NO: 180737 - protein, 374 aa, Oryza sativa
  Clone ID: PAT_MRT4530_7807C.1.pep
MALLNNLCNFLVKTQYYNGRGEWVPDPDAPYYTNDTCSFIHEHYDCMKYGKLDLGFVQWRWRPDGCDLPRLDPLRFLSAMRGKTLAFIGDSLAKNHMNSLICLLTRVAKPTTSWPSSEHTVYHYGGGYNFTVLNFWAPFLVRSELVDADGPAHTGLWNLYLDEPAAVWAPHVPAFDYAVVSASSWFYRPSMLYEAGRLVGCHHCLLPNVTDLTLRYALRMATRAALRAVVSSDGGGVTAVLRTVSPSQYEGGEWNKDGNCVRTRPYRRGEKTLQGFELDFHTLQVEEFEAAKRAASGGGVRMMLMDTTEAMIRRADAHPSRYRGWTRRKEWMKEYFTIFNDCVHWCVPGAIDAWNDMLSHMLLTVSVTRWTQHN

SEQ ID NO: 180738 - protein, 237 aa, Oryza sativa
  unsure (1)..(237): unsure at all Xaa locations
  Clone ID: PAT_MRT4530_78080C.1.pep
CTMQYIDAEIIRXPISYLYPTRICQTQDAVTLQENSKHLENKTPKEIXNYMKGLHKTKLLTVAVYIGQAFLIFQDKRVIMAAXTLTXFYICFLLYLKYCTITCLDPLDYNHKPYRQFLTILESAYDYYKTKSGEQLATXEKLLCHKQHKDSVLFGYYTCELLRVNNWCLTNPKYNSLXLMECASNFNDKGIKNIXRDLCHFIHCKCSHKDGLFFDXEGSLAMIEEYKSLWKWSHVLV

SEQ ID NO: 180739 - protein, 219 aa, Oryza sativa
  Clone ID: PAT_MRT4530_78081C.1.pep
MARFEVYENNGGTCVAVAGADYCVVAADTRLSVGYSILSRDSSKIAHLADKCVLASSGFQGDVKALQRNLTAKELLYEHNHNKKMSCPAMAQLLSNTLYYKRFFPYYAFNVLGGLDSEGKGCVFTYDAVGSYERTGYSAQGTGAALMMPVLDNQLKSPSPLLLPARDAVTPLSQSDAVDLVKDVFASATERDIYTGDKLEIVVINSAGSHREFIELRKD

SEQ ID NO: 180740 - protein, 931 aa, Oryza sativa
  Clone ID: PAT_MRT4530_78082C.1.pep
MAGLFASMAIEGALDSLSSLLQLQANNPTPPPATTAAVPPAETSHALENTREKSANLRLEEIKELAYDAEVEATAAQGGDGASSSSSSSRKRKIHKVHDEDYFIEAGIIPVPKELTVRARKVIQRFGEIEGYYGSFTLSENDGDRRIIPDINSLRQTSSFVFAPIIVGRDQDKENVIKKMMTLEGSRIGGCMSVLAIVGMGGLGKTTLAQLVYNDPKNEQSDYWKSLCMPIFASTRCDIIVTTRSEAVASWLLFKQTAFVEHDNVSPANLVEIGQRIAKKCQGLPLALKTLGSVLRFETNVMKWRDVLQSELWDLERSQNEVLPALELSYKHMPMHLKLCFVSLSLYLKDTYFDESIVVWLWKSLHLLQCDGTDNSNEIGGLYFTQLVQRSLIQQVDTHGRMAIHDLVHDLACFLAGEEFFRLEEDGYVEIPKGARCMSIMPHPQCKRSTQISNASQSLRVIILIRRINIKNPEALFMNCKKFQIIQVIDDSFANVLLDFMGDMKLLRHFRLIRSCNEVKLVISDSMSQQFNLQTLNCEAYSLHGIGRLANLQNLPNIHLWKCGCYLRELRNMNKIRRLHIYGLCNVSSIQDVNEAHLHSKKDLEILELDFESGGICKVHKEEADVNQAISTVSGGSILESLRPHHQSLKVLRMKNLNEVNYPSWLGSASFSKLTKLRLENCQSQHLPTLGELPSLKSIDIRQMEYVENIGRVFCSLDPSVKGFRSLAHLRFQDMNRFSEWSEVHDGEFSSLETLLIWSASELSSLPSVPFSSLRSFELCDCKNLVTFPASATLQILSISSCEKLKELPALPSLRSLKLSGCESLVAVGHFPSLTVLHMSTEFEEEVLHKLMNLHLKLEELSISSDTMKLINLEPHSLPLLRELELVCPNLQNCDALASLSSLEILCVNRCSPQLRVPNSLQSQLEKLYSP

SEQ ID NO: 180741 - protein, 86 aa, Oryza sativa
  unsure (1)..(86): unsure at all Xaa locations
  Clone ID: PAT_MRT4530_78083C.1.pep
EHTGTNHRKSYLKRTKYEACRIFQSSIRIGXKLLATKTEFCKRNLAILNLPNPAKMGRIGCNFFCRCPWIYYKPNFESANMHAASR

SEQ ID NO: 180742 - protein, 53 aa, Oryza sativa
  Clone ID: PAT_MRT4530_78084C.1.pep
MAAPREGEGMRVHGGEHCWPEERGMVELTGERGRRVPMLRNGDQPVAERLIGD

SEQ ID NO: 180743 - protein, 75 aa, Oryza sativa
  Clone ID: PAT_MRT4530_78085C.1.pep
MQKVAGGKDGVVGRWSWDRFDSEKARKNVCWPSAELEEGLWDCLPPGFLCIIVGHRVPLTAMASCASRRPSDPAA

SEQ ID NO: 180744 - protein, 189 aa, Oryza sativa
  Clone ID: PAT_MRT4530_78086C.1.pep
MATLTLPATGAAAQPGQEDPSGIKNPGDGAGDSSGIDSGWVVLGKSDIVPADLAAAAADAGHRQLGFSPLPMLPIWVQMVLGGVVYTAVPFYNRARKAEDEVTKNVETALEVVEHAAEVTEKLAANVANALPENGTLHKLAEEVEYIAEIVDKDAQKVEIIIKKIEDVSNRIDAAVEPVIEELEKEFKP

SEQ ID NO: 180745 - protein, 666 aa, Oryza sativa
  Clone ID: PAT_MRT4530_78087C.1.pep
MASSSAAAASSAHGVGVVQRLWLEEQERKPPPKRGGGKRRWAWAPLEPRRAGWWAREWDRAYLLACAAGLMVDPLFLYAVSVSGPLMCVFLDGWFAAAVTVLRCTVDAMHAWNLLMRLRAAVRPPEEDDGADEEVAAERGAGGNGGGPAPAQVARPVSRKGLMLDMFVILPVMQVIVWVAAPAMIRAGSTTAVMTVLLVSFLFEYLPKIYHAVRLLRRMQNTYVFGTIWWGIALNLMAYFVAAHAVGACWYLLGAQRATKCLKEQCAQGGSGCAPGALACAAPLYYGGAVGGVGADRLAWALDASARGTCLDSGDNYQYGAYKWTVMLVANPSRLEKILLPIFWGLMTLSTFGNLASTTEWLEIVFNIITITGGLILVTMLIGNIKVFLNAATSKKQAMQTRLRGVEWWMKRKKLPQSFRHRVRQHERQRWAATRGVDECRIVRDLPEGLRRDIKYHLCLDLVRQVPLFQHMDDLVLENICDRVKSLVFPKGEIIVREGDPVQRMLFIVRGHLQSSQVLRTGATSCCTLGPGNFSGDELLSWCMRRPFLERLPASSSTLVTMESTEAFGLEAADVKYVTQHFRYTFTNDRVRRSARYYSHGWRTWAAVAVQLAWRRYKHRKTLASLSFIRPRRPLSRCSSLGEEKLRLYTAILTSPKPNPNQDDLV

SEQ ID NO: 180746 - protein, 78 aa, Oryza sativa
  unsure (1)..(78): unsure at all Xaa locations
  Clone ID: PAT_MRT4530_78088C.1.pep
GASKSRRVDIEELKQRDASSAAQHAVAMAKLXREKAHLLMHKADLALHKATVALMMADAIKASSRDSSRDGRRDFRDD

SEQ ID NO: 180747 - protein, 72 aa, Oryza sativa
  unsure (1)..(72): unsure at all Xaa locations
  Clone ID: PAT_MRT4530_78089C.1.pep
MEVAVREIATVYWFENQRASRIISRTPMEVAVREIATVYWFENQRXRIISRTPMEVAVREIATVYWFKNQRV

SEQ ID NO: 180748 - protein, 65 aa, Oryza sativa
  Clone ID: PAT_MRT4530_7808C.1.pep
RGTKFAPPAKDFMFNKGGLFGYSTKWNFSKFLVSKKGRVVVSYAPPPPPFCFWRDFKKLFGGFLP

SEQ ID NO: 180749 - protein, 59 aa, Oryza sativa
  Clone ID: PAT_MRT4530_78090C.1.pep
LSDVTSLFTQSTTQDIGSVGAVCYRWGSWFHFSGKNSKVLNSLFGSTGISSYLSWLPDR

SEQ ID NO: 180750 - protein, 284 aa, Oryza sativa
  Clone ID: PAT_MRT4530_78091C.1.pep
MAIAQSAAAVSSAARASRPRPTRAAPRRIAASASSVAPPEPAARRLVAAFDPAVPLASAVTPPSGWYTDPDFLRLELDRVFLRGWQAVGHIWQVKNPNDYFTGSRLGNVEFVICRDANGELHAFHNVCRHHASLLACGSGQKTCFQCPYHGWTYGLDGVLLKATQISGIKNFNKNDFGLIPIKVATWGPFVLAKFDSGFSQETADNTVGDEWLGSASDLLSRNGIDTSLPHICRREYIIECNWKVFCDNYLDGGYHVPYAHGTLASGLQLQSYETHTYERVSVQ

SEQ ID NO: 180751 - protein, 699 aa, Oryza sativa
  unsure (1)..(699): unsure at all Xaa locations
  Clone ID: PAT_MRT4530_78092C.1.pep
MDSTKQDFQPRTFSIKLWPPSESTRLMLVERMTKNLSTESIFSRKYGLLGKEEAHDNAKRIEEVCFASADEHFKEEPDGDGSSAVQLYAKETSKLMLEVLKRGPRTTVEPEVPVADTPLEPADSVFDISGGKSACVWAGGAIVRRIAMNLRGSAFDHICCSTSSLGIGSGSCAGPRXEDQADGDPHRRSFQALLLAHVEMVHVLGNLDPYRFLSSSXRSFGTFALPGCICTLTFQQKHVQTDSLXRGDSSLPVKLTIXEFVSCISNSLVSQDLRSAVAVSXSNTLKQSAPQLEVLEMAGNEINAKASQALAECLTAMQSLKKLTLAENELKDDGAVVIAKSLEDGHQDLKELDVSTNMLQRVGARCFAQAIANKPGFVQLNINGNFISDEGIDEVKDILKSGENSVEVLGPLDENDPEGEAEDDEEEEEEEEDDDQRRGLRHRSPHPHPPPPLAITLQQIGNLAGGGGGGAGKRADTGDEREEEEEEEGEDGGDAVAARRRDRPRDGHRRGIHRLRWEDKLPRLPPQGGSPRHLQRGRLHTPLQHHQRHAFCCIXQQGLVFAVAMEGGAIKLFDSRSYDKGPFDTFLVGGDTAEVSDIKFSNDGKSMLLTTTNNHIYVLDAYGGDKRCGFSLESSPNVATEAAFTPDGQYVISGSDCLLEQSHRSYHCFEVGSPSSNVCNCVNCPNFLDSQQFQFELGA

SEQ ID NO: 180752 - protein, 66 aa, Oryza sativa
  Clone ID: PAT_MRT4530_78093C.1.pep
MAVWESSSNSKQGRGRRLTNGNDSSTMVTTSFQGRGREGMAVSSGKTGGGWRSTWAVGNGDATEAV

SEQ ID NO: 180753 - protein, 264 aa, Oryza sativa
  unsure (1)..(264): unsure at all Xaa locations
  Clone ID: PAT_MRT4530_78094C.1.pep
GLQDSARARAEDGGTXXPLLQXXNHTDVPVRKAAVYALEKLSVSSIVCEQIKTDGGLKLLADIVKDPNTPVEQLEKIIIMLSRIFNTGISMVAVPDSSAINGSEDTMHSEKSNGSCGDIDGGTNGTSFAYLKQEETSSVSIIDFDVISRLTRVLREASPSLQEQVASVLEHLAAFDQHATAMTAARIESVIEAVLEMGVIHGTMGDPENFDELPTVVIEQVSRAVSATVRLLTKLLDFDIFVRSINTRXCIALLRKMFKSKYSS

SEQ ID NO: 180754 - protein, 76 aa, Oryza sativa
  Clone ID: PAT_MRT4530_78095C.1.pep
PGFVQLNINGNFISDEGIDEVKDILKSGENSVKVLGPLDENDPEGEAEDDEEEEEEEEDDGELDSKLQSLKVEQDD

SEQ ID NO: 180755 - protein, 89 aa, Oryza sativa
  Clone ID: PAT_MRT4530_78096C.1.pep
MGLGRKSFAEFLYVHYRIRALGEVRWRHYRSLLVAAEARRMREKEAEASNALQQVAVAAQARGKAVEDDNNNIGAANNAESGFIDPDRV

SEQ ID NO: 180756 - protein, 157 aa, Oryza sativa
  Clone ID: PAT_MRT4530_78097C.1.pep
PRVRTRIGSDGGVALAEALGTCTRLKKLDLRDNLFGVEAGLALSKTLSKLPDLVELYLSDLNLENKGTVAIINTLKQSAPQLEVLEMAGNEINAKASQALAECLTAMQSLKKLTLAENELKDDGAVVIAKSLEDGHQDLKELDVSTNMLQRVGAWCF

SEQ ID NO: 180757 - protein, 157 aa, Oryza sativa
  unsure (1)..(157): unsure at all Xaa locations
  Clone ID: PAT_MRT4530_78098C.1.pep
SLSQRIKIAVDIADALXLHHDCENPIIHCDLKPSNVLLDDDMTAHLGDFGIAHFYLKSKSPAVGDSSSICSIGLKGTIGYIAPEYAGGGFLSTSGDVYSFGVVLLELLTGKRPTDPLFCNGLSIVSFVERNYPDVIDHIIDTYLRKDLKELAPAMLD

SEQ ID NO: 180758 - protein, 108 aa, Oryza sativa
  unsure (1)..(108): unsure at all Xaa locations
  Clone ID: PAT_MRT4530_78099C.1.pep
CEMASPEPAAGADGASASQTAVVEPIRLPTPEEIKGQDIWNNCAVRSVVSGVMGGGLGVLMGLFFGALENPSTANEMTARXIQIAYQAKQMGRRSIKQCXTFAVMGPD

SEQ ID NO: 180759 - protein, 202 aa, Oryza sativa
  Clone ID: PAT_MRT4530_7809C.1.pep
MKFHEAIKLPSIAHYALRYVLPAAAVAACVLVLAAVSLPGRVPLPLLLMTNTADGVGGDTSGCDIFKGEWVPDMAREPPPYTGESCPVIHGHYDCMRYGRPDLGYVRWRWRPDGGCEMRRFDAARFLAAMRGRSVAFVGDSLVCLLSRAERPAPWTNGSYAYRFERHGLTVAAFWSPFLVRAVETDPDGPTGSGSGLWSLHL

SEQ ID NO: 180760 - protein, 285 aa, Oryza sativa
  unsure (1)..(285): unsure at all Xaa locations
  Clone ID: PAT_MRT4530_780C.1.pep
MVGGVTFTFTNRCGGTVWPGVLSNSGSSALGTTGVXLGAGDTRSLAAPAGWSGRFWARTGCTFDDDGKGTCATGDCGSGEVECRGAGATPPATLVEFTLGTGAAXGKDYYDVSLVDGYNLPMVVEAAAAGCPATGCVVDLNQRCPAELKAGHGQACRSACEAFGTPEYCCSGDHGNPDTCHPSVYSQMFKRACPRSYSYAYDDATSTFTCTGTDYSITFCPRPGNPNSQKSSNDPSPRPKDPQLEDDSWLASLATGEVDGAAPASTSLLLQATLAVAVMALLVLH

SEQ ID NO: 180761 - protein, 193 aa, Oryza sativa
  Clone ID: PAT_MRT4530_78100C.1.pep
MAATLSQLDDGIVRGMAIGAVFTDYAGKINCLDFHRKEDLLVTSSEDDSIRLYNITSATLLKTTYHRKHGADRVCFTHHPSSILCSSRYNLESAESLRYLSLYDNRCLRYFKGHKDRVVSLCMSPVNDSFMSGSLDHSVRIWDLRVNACQGILRLRGRPSVAYDQQGLVFAVAMEGGAIKLFDSRSYDKGPFD

SEQ ID NO: 180762 - protein, 853 aa, Oryza sativa
  Clone ID: PAT_MRT4530_78101C.1.pep
MAVGEVVVVGLCLCSPVAVKNKAEPKADGGAASKKKGFGVDEGEGAPVVDRLGEGVDKDSGVAAKPVRAAPRRGDVPSGARARRRRATAAAWIRGPHGLRTPGSSSRPPLPRSSSQAAATAVVYAVSPNPRRPPLPPRCLRWPPAATMVHGLWQLDLSQIHGEVALNFRRSALLHLADPSAVDHCFFLPYGAPVPCTRGADIMRGHSSFVFSTTLCIRVYMNAKIPHKGTSKQHMELGMFIPCTLVLLLLSYGAGGIKGGASTQDGDVNGTDLASLLDFKRAITNDPFGAMSSWNTNTHLCRWKGVTCDQRAHRVVALDLVGQTLTGQISHSLGNMSYLTSLSLPDNLLSGRVPPQLGNLRKLVFLDLSGNSLQGIIPEALINCTRLRTLDVSRNHLVGDITPNIALLSNLRNMRLHSNNLTGIIPPEIGNITSLNTVILQGNMLEGSIPEELGKLSNMSYLLLGGNRLSGRIPEVLFNLSHIQEIALPLNMLHGPLPSDLGNFIPNLQQLYLGGNMLGGHIPDSLGNATELQWLDLSYNQGFTGRIPPSLGKLRKIEKLGLDMNNLEARDSWGWEFLDALSNCTRLKMLSLHQNLLQGVLPNSVGNLSSSMDNLVLSNNMLSGNNFTGNIPDAIGNTSQMSELFLSNNQFHGLIPSSLGKLRQLSKLDLSYNNLEGNIPKEVFTVPTIVQCGLSHNNLQGLIPSLSSLQQLSYLDLSSNNLTGEIPPTLGTCNDFKALVYKFMPNGNLDTWLHPASGKRPTDPLFCNGLSIVSFVERNYPDVIDHIIDTYLRKDLKELAPAMLDEEKAAYQLLLDMLGVALSCTRQNPSERMNMREAATKLQVINISYISGM

SEQ ID NO: 180763 - protein, 153 aa, Oryza sativa
  Clone ID: PAT_MRT4530_78102C.1.pep
LRKIEKLGLDMNNLEARDSWGWEFLDALSNCTRLKMLSLHQNLLQGVLPNSVGNLSSSMDNLVLSNNMLSGLVPSSIGNLHRLTKFGLDFNSFTGPIEGWIGSMVNLQALYLDSNNFTGNIPDAIGNTSQMSELFLSNNQFHGLIPSSLGKLR

SEQ ID NO: 180764 - protein, 73 aa, Oryza sativa
  Clone ID: PAT_MRT4530_78103C.1.pep
MGKKRHRLEEGRKHSVEGRESRAPGGEEGRRRRTEKKTAGPAIDNVGLVIVYTLVISLVQGVVWMKSSRDVGP

SEQ ID NO: 180765 - protein, 112 aa, Oryza sativa
  Clone ID: PAT_MRT4530_78104C.1.pep
MAMGKYAAYGDLLGMTARVAVRAYSHCPQTARMYYKPPPTATATTAASGDKRSASAATASSSRSSSFGADNAGSSTGAAASPCASTKQQAAAAARVAFDGAGFILYGVERAA

SEQ ID NO: 180766 - protein, 774 aa, Oryza sativa
  Clone ID: PAT_MRT4530_78105C.1.pep
MPDLPCDGDGVCMVCRVASPPEVDLLRCSTCATPWHSPCLSKPPALADAAQWSCPDCSGDSTDAPPPAPAPLAPGSAGQLVAAIRAIECDATLSDQEKARRRQELLGGAAPAGADADDDEGDDVLEVIGKNFSCAFCMKLPERPVTVSTLAGPFPHCFQKWIHSGKRTCGKCRAQIPAKMAEQPRINSALVSVIRMAKVSKNANSAVSAAAYHYIRNDDRPDKAFTTERAKRAGKANASSGQIFVTIPPDHFGPILAENDPKRSIGVLVGDTWEDRLECRQWGAHFPHVAGIAGQSTHGAQSVALSGGYVDDEDHGEWFLYTGSGGRDLSGNKRTNKEQSSDQKFEKLNAALRISCLKGYPVRVVRSHKEKRSSYAPEAGVRYDGVYRIEKCWRKISVQGKFKVCSDIYGDRPRPLPKVDELKGATDISERKGTPSWDFDEKEGWKWVKPPPISRKPNLSGDPATDKEIRRVARRAQMSVTERLLKEFGCSICKQVMKEPLTTPCAHNFCKLCLVGTYGSQSSMRERSRGGRTLRAQKIVKKCPSCPTDICDFLENPQINREMMDLIESLQRKAVEEGDTKTSSDVSNGAESSGDDGNNEALEKGEDDSSLKDDGSLKDDGKVVKAVVVIKEEDLQPKKSKGEDEKEQGDKKMDSADVVDIAVEKKQATKRASEKAEKKQARKRKGDAVATNDGKRMKTGGDAMETAAEEDAPLSGGTPVKRNSRKSSEVDAKGGGGSPVVSSPRRVTRSNAKASGEADGSPATRTRRATRAEA

SEQ ID NO: 180767 - protein, 83 aa, Oryza sativa
  Clone ID: PAT_MRT4530_78106C.1.pep
MLGGHGFVKLPPLEDQLCFDADASAANGLAYYSTAAIRLLGGANGGVIGSDDDLWSFMQSAPPAPLPSAPLFPSHTATAASRP

SEQ ID NO: 180768 - protein, 178 aa, Oryza sativa
  Clone ID: PAT_MRT4530_78107C.1.pep
QKFEKLNAALRISCLKGYPVRVVRSHKEKRSSYAPEAGVRYDGVYRIEKCWRKISVQGKFKVCRYLFVRCDNEPAPWTSDIYGDRPRPLPKVDELKGATDISERKGTPSWDFDEKEGWKWVKPPPISRKPNLSGDPATDKEIRRVARRAQMSVTERLLKESGCSICKQVMKEPLTTPC

SEQ ID NO: 180769 - protein, 628 aa, Oryza sativa
  Clone ID: PAT_MRT4530_78108C.1.pep
MDYRTGSSSASASASSHPSGSPAPNSATDLSRGTSGPARASNLLNACRVIPPNDNENKPLWRYVELMEKTGKGQGGNVRFRCRLCGNIMHGSYSRVKAHLLKVGSNGVAPCPKVTIDVLSQLHDEMARAAAVAERNLPKDIPLPAEGASRGKRRAVSAIESSFNSDTRSNLDALIARMFYTAGIPFNVARNPYFRKAFMFACNNALGGYSPPSYNKLRTTLLVQEKTHVERLLNPLKSTWPVKGVSIVSDGWSDAQRRPLLNFLAVTEDGPMFLRAINTEGEIKRKEYIAEKMIAVIEDVGPKNVVQVITDNAANCRAAGLIVEQRYSHIFWTPCVVHTLNLALKNICAAKSSSGDAYEEFQWITEVAADSSFIKNFIMNHSMRLSMFNEFRKTIKFKHSKSKRRYYCESWLAEVPTREAPHMDAEISEMRNKCFRRYFAGDELRKIKQQFADFSLFGNGFNSFDSIKDRAHLDAKQWWGIYGNSAPELKKLALKLLGQPTSSSCAERNWSTYGLIHNSMRNKFCSFSYLVNFLLNPGRAEDLVFVHQNLRLLSRKSEEYCTGPSRMWDVGGDSFEMFEGGADFLQEAALSLDEPDLERVLEDLGALDLSADAEPSATSVTMIDTSSN

SEQ ID NO: 180770 - protein, 141 aa, Oryza sativa
  Clone ID: PAT_MRT4530_78109C.1.pep
PPALADAGQWSCPDCSGDSTDAPPPAPAPLAPGSAGQLVADIRAIECDATLSDQEKARRRQELLGGAAPAGADANDDEGDDVLQVIGKNFSCAFCMKLPERPVTTPCGHNFCLKCFQKWIHSGKRTCGKCRAQIPAKMAEQ

SEQ ID NO: 180771 - protein, 109 aa, Oryza sativa
  Clone ID: PAT_MRT4530_7810C.1.pep
LRVRILATIFMEDIAVDMTIELTTKDTTIVCMLLLNYCVTYSDNLTTILTTKHTIALTLHVLGSAKGAVSVVVSMIILTSTVSVTEMLTYTVTVIGVKLYSECKTRILH

SEQ ID NO: 180772 - protein, 65 aa, Oryza sativa
  Clone ID: PAT_MRT4530_78110C.1.pep
PLYWTLHSVLKHTSYLCKIQPAYHNLRYNYNIFTIGIFCFLSGYSFHDLGIFCFEFMCHQIKLIY

SEQ ID NO: 180773 - protein, 883 aa, Oryza sativa
  Clone ID: PAT_MRT4530_78111C.1.pep
MVDWKGKGKGKAPQPSGNSNRHCNRCGSDYHVAKDCRIPTTSFLLYQKSLKEKKSSEELRFEAHFNLTKERPEVESFYQAPIEPENNLALLPEDTTALSTMDDMLIEYCSTNPLGDLLLYDLLVIRMSKDITPIGEELCLVDSSTTNSILREIKYFQTLKKREGKVLTIAGCDTVIVGSGRAIITLPMGTQITIEDALLYPDSTRTLLSYRDIRQNGFHIETHMDNREEFLLLTKQNGYGKRICEKIPSLTSGLYYTYIKPIAHVAYKVIFQNVDAFHTWHDRLGHPSIGMMRKIIGNSIGHHLITDKFPKSSDYVCTACATEKLILRPSYLKIRAEPLKFLERVQGDICGLIVPRSGPFRLKANYPEHRIQSIRMDNAAEFTSHAFDDYCMALGIQVQHSVPYVHTQNGLAESLIKRIKLIARPLLMNCKLPSSCWGHAVLHAADLVQLQPTAYHETSPMQLVCGNPPSISHLHAFTNYKGVTKSFIPAQNAPKRVEVPNKTTQLLLTKKRGSMATQRETIANKQRKTVNANQPLVGTHQIDTIYQADHDSLQPSSVVHNAKTRNSEDHRHIVSGDHDESIRVDEIAINYSETGESFDRRATIVDINFSEQIADCLQVDPEPRSIKECQKCSDWNKWKDAIDAVLASLYKRDVFSAVMPTPRGIFPVGYKWVFVRKWNENNVVLMDVVTAYLYGSLDSDIYMKVPDGIDIPNQKTEFEMKDLGQTKFCLGLQLEHLSSGILVHQDFPYLSAIGALMYLANSTRPDIAFSVNLLVRYSAALTKRHWTGVKNVFRYLNGTRDLGLFFKKNQDSTLIGYTDAGYLSDPHNARSQTEFVFLQGGTTISWKSSKQTLVATSTNYSEIIALYEASRECVWLRRMVNHI

SEQ ID NO: 180774 - protein, 735 aa, Oryza sativa
  Clone ID: PAT_MRT4530_78112C.1.pep
MVDRKMSKDIAPIGEELCLVDSGTTNSILREIKYFQTLKKREGKVLTIAGRDTVLVGSGRAIITLPMGTQITIEDALLYPDSTRTLLSYRDIRQNGFHIETHMDNQEEFLLLTKQNGYGKRICEKIPSLTSGLYYTYIKPIAHVVYKVIFQNVDAFHTWHDRLGHPGIEMMRKIIGNSIGHHLITDKFPKSSDFVCTACATGKLILRPSYLKIRAEPLKFLERIQGDICGPIVPRSGPFRYFMVLIDASTRWSHVCLLSTQNHAFAKLMSQIIRLKANYPEHRIQSIRMDNAAEITSHAFDDYCMALGIQVQHSVPYVHTQNGLAESLIKRIKLIARPLLMNFKLPSSCWGHAVLHAADLVQLRPTAYHETSPMQLVRGNPPSISHLRKFGCAVCIPISPPQRTAMGPHRKVGIYVGFKSPLIIKYLEPLTGDLFTARFADSIFDEEHFPALGEDFKYQKECQEIDWDAQDAFTNYKGVIKSFIPAQNAPERVEVPNKTTQLPLTKKRGRSMATQQETIANKQRKTVNANQPLVGAHQIDTIYQADRDSLQPSSVVHNTKTRNSEDHRHIVSRDHNESIRVDEIAINYSETGESFDRRATIVDTNFSEQIADCLQVDPEPRSIKECQKRSDWNKWKYAIDAELASLYKSDVFSAVMPTPRGIFPVGYKWVFVRKRNENNEVLMDVVTTYLYGSLDSNIYMKVPDGIDIPNQKKSLYGLKQSGRMWYNRLSEEYIT

SEQ ID NO: 180775 - protein, 836 aa, Oryza sativa
  unsure (1)..(836): unsure at all Xaa locations
  Clone ID: PAT_MRT4530_78113C.1.pep
MGTQITIEDALLYPDSTRTLLSYRDIRQNGFNIETHMDNREELLLLTNQNGYGKRICEKIPSLTSGLYYTYIKPIAHVAYKVIFQNVDAFHIWHDRLGNLDIGMMRKIIGNFIGHHLITDKFLKSSDFVCTACATGKLILRPSYLKIRAEPLKFLERIQGDICGPIVPRSGPFRIQSIRMDNAAEFTSHAFNDYCMALGIQVQHSVPYVHTQNGFAESLIKRIKLIARPLLMNCKLPSSCWGYAVLHAADHVQLRLTAYHETSPMQLVRGNPPSTSHLRKFGCAVYIPISPPQRTAMGPHRKVGIYVGFKSPSIIKYLEPLTGDLFTARFVDSIFDEEHFPALGGDFKYQKECQEIDWDAQGILAPDPRTTEIELQVQKIIHLQRHANNLPNAFTNYKGVTKSFIPAXNKTTQLPLTKKRGRSMATQRETIANKQRKTVXTIVDINFSEKIADCLQVDPEPRSIKECQKRSDWNKWKDAIDAELASLYKRDVFSAVMPTPRVQNRLFMHLMDIVTAYFYGSLDSDIYIKVPDGINIPNQKKSLYGLKQSCRMWYNRLSEFLSLKEYTKNDDCPCVFIKKSPTGFCIISVYVNDLNIIGNTQDINEARHYLKTEFEMKDLGQTKLCLGLQLEHLPSGILVHQSAYTQKILEKFNMDKSYPSKTPMVVRSLNVEKDPFRPKEDGEDVLGPDFPYLSAIGALMYLANSTRPDIAFSVNLLARYSAAPTKCHWTGVKNVFRYLNGTRDLGLFFRKNQDSTLIGYTDAGYLFDPHNAKSQTGFVFLQGGTAISWKSSKHTLVATSTNHSEIIALYEASRECVCLRRMVNHILTSCGIGSLE

SEQ ID NO: 180776 - protein, 78 aa, Oryza sativa
  Clone ID: PAT_MRT4530_78114C.1.pep
MAGRRLAEVAAAAAAGTPPMAGGWLAEAAAAGRQRGGGELPSARSGARGASGEAAGSRLAEAAAAQLGGSSGRTLPMR

SEQ ID NO: 180777 - protein, 710 aa, Oryza sativa
  Clone ID: PAT_MRT4530_78115C.1.pep
MKWSIRKEKGRVRHHNLVAIATSIATGVDLTIMSLKIAASQQHLVLLYQKSLKEKKSYEELRFEAHFNLTKERPEVESSHLAPIEPENNLVLFPEDTAALSVVDDMLIEYCSTDPLGDLLAEPPKFLERIQGDICGPIVPRSGPFRLKANYPEHRIQSIRMDNAAKFTSHAFDDYCMALGIQVQHYVPYVHTQNGLAESLIKRIKLIARPLLMNCKLPSSCWGHAVLHAADLVQLRPTAYHETSPMQLVHGNPLSISHLRVTKSFIPAQNAPERVEVPNKTTQLPLTKKRGRSMATQRETIANKQRKTVNANHPLVGTHQIDTIYQADRDSLQLSSVVHNAETRNSEDHRHIVSGDHDESIGVDEIAINYSETGESFDRRATIVDINFSEQIADCLQVDPEPRSIKECQKCSDWNKWKDAIDAELASLYKRELMDVVTAYLYGSLDFDIYIKVPDGIDIPNQKKILEKFNMDKSYPSKTPMVVRSLDVEKDPFRPKEDGEDVLGPDFPYLSAIGALMYLANSTRPDIAFLNHDSTFIGYTDAGYLSDPHNARSQIGFVLLQGGTAISWKSSKQTLVATSTNHSEIIALYEASRECVWLRRMVNYILTSCGIGSLESPTIIYEDNAACVVQMETVYIKSNITKHIAPKLFYPHELQQHGEINTLQTKSCDNLDDLFTKSLPYSTFFKCVKGISMRRLKNLQDSGGVSSSGK

SEQ ID NO: 180778 - protein, 96 aa, Oryza sativa
  Clone ID: PAT_MRT4530_78116C.1.pep
ITFSVRTNRLLLLHMSPTAVHQRFGVNFHRRWKPRTPRSSATVAKSKPTHLIYHVPLMLNHQIDGCCALDRCCPYEEEEAVVAMPYLMPPCGCSVD

SEQ ID NO: 180779 - protein, 61 aa, Oryza sativa
  Clone ID: PAT_MRT4530_78117C.1.pep
PILVYVSLVSLNAPPHYLHFLCISGLYIFNFLFFFFLISSSHVISSTFHVHTWIHPTFVNN

SEQ ID NO: 180780 - protein, 60 aa, Oryza sativa
  Clone ID: PAT_MRT4530_78118C.1.pep
ENMSLIPYNAIISPEIQTDPRFYVPLKFRIHDIDVQQEFRITRKKYDITGSSSSIINRGI

SEQ ID NO: 180781 - protein, 521 aa, Oryza sativa
  Clone ID: PAT_MRT4530_78119C.1.pep
MAYFGVSTNLVNYLKYRLHEGSKSAANNVTNWEGTGSIAPLVAGYLADAFLGRYWTIVLSMVISAVGYGVLAASASVIRLESAALYAGMYLVALGGVLEPIMAPFGADQFDDGEDDQRGRRQSSFFNWFYLSLNCGSLVGGTVLVWVQTSVGWGVGYGVPAIFSALSVAVFLAGTATYRRDQPPGGSPLTRIAQVVVAAVRKFDVEIPSDSSMLYESDAVDGMPAIHGRRRLLHTGQFRFLDRATVKTAGEKAAQSPWRLCTVTQVEELKCVLRLLPVWATGIIYAAAYTQVTTTFILQGDTLDRSLGRFKVPAAALSIFHTLSVILWVALYDRAIVPLARRVTRHDGGFTQLARMGVGLVILTVAMAAAGALEAARRRLIARPSVFWQVPQYAVVGASEVFTLIGQMEFFYDQAPDAMRSLCSALSSTSFALGDYASSALVVVAARRGGAPGWIPDDINRGHLDYFFWLLTALCVANFAAYLLIARCFLSGQSKNRRKFPSPWNTSVQQTRSLICLVLIY

SEQ ID NO: 180782 - protein, 210 aa, Oryza sativa
  unsure (1)..(210): unsure at all Xaa locations
  Clone ID: PAT_MRT4530_7811C.1.pep
TTTSSPPGSWFYRPSMFYDRRGRLVGCNTCLSPNVTDLTLRYSLRMAFRSALRAATGARRRGGRGARTVIVRTISPSHYENGTWNGDGDCLRKRPARRGEXELNAMEKDMHRIQVEEFAAAAAAEGETARKRGKEAARMLLMDATEAMAQRPDAHPSKHRLWQPDKFKVSRDCVHWCLPGAMDACNDMLFHMLRHGERSEMMAQTRMRAS

SEQ ID NO: 180783 - protein, 436 aa, Oryza sativa
  Clone ID: PAT_MRT4530_78120C.1.pep
MGTQITIEDALLYHDSTRTLLSYKDICQNGFHIETHMDNREEFLLLTKQNGYGKRICEKIPSLTSGLNYTYIKPIAHVAYKVIFQNVDAFHTWHDRLGHPGIGMMRKIIDNSIGHHLITDKFPKSSDFVCTACATGKLILRPSYLKIRAEPLKFLERIQGDICCLIVPRSGPFRKVGIYVGFKSPSIIKYLEPLTGDLFTARFADSIFDEEHFPALGRDFKYQKECQEIDWDVQGIPASDPRTTETELQVQKIIHLQRLANNLPDAFTNYKGVTKSFIPAKNAPERVELMDVVTAYLYGSLDYDIYMKVPDGIDIPNQKKSLYGLKQSGRMWYNRLSEFLSLKGYTKNDDCPCIFIKKSPTGFCIISVYVDDLNIIGNTQDINEARHHLKTEFEMKDLGQTKFCLGLQLEHLPSGILVHQSAYTLQIVRGQILLSR

SEQ ID NO: 180784 - protein, 571 aa, Oryza sativa
  Clone ID: PAT_MRT4530_78121C.1.pep
MSSWPSQLYRSLQTVQCRESCNGRHADADDRRTSKKDRRTTWASAFILVNNFMQYTAYFGVSTNLVNYLKYRLHEGSKSAANDVTNWQGTGSITPLVAAYLADAFLGRYWTILLFMAISVLGYGVLAASAAAPALLHGGAAAFYAGLYLVALGSGLLVVMAPFGAGQFDEADEGERRRQSSFFNWFYLSLNFGSLVGGTVLVWVQTSVGWGIGYGVPAIFSALSVAVFLAGTAAYRRCQPPGGSPLTRIAQVVVAAARKHDVEVPADASLLHECCDAVDGMSAIQGSRRLVHTDQFRFLDKAAVETAGDKAEPSPWRLCTVTQVEELKCVLRLLPVWASGIIFAAAYTQMTTTFVLQGDTLDPRIGGFKVPAAVLSVFDTLSVMLWVPLYDRAIVPLARRVTGHDRGFTQLARMGVGLVILTVAMLVAGTLEVARRRVIARHGLYGDDGDGGYLPLSIFWQVPQYVVVGASEVFTFIGQMEFFYDQAPDAMRSLCSGLSSTSFALGNYASSAIVVVVARATARGGRLGWIPDNINRGHLDDFFWLLAVLCVANFAAYLLIARWYTYKKTVD

SEQ ID NO: 180785 - protein, 1087 aa, Oryza sativa
  unsure (1)..(1087): unsure at all Xaa locations
  Clone ID: PAT_MRT4530_78122C.1.pep
IGDELCLVDSGTTNSILREIKYFQALKKREGKVLTIAGRDTVIFGSGRATITLPMDTQITIEDALLYPDSTHTLLSYRDIRQIGFHIETHMHNREEFLLLTKQKGYGKRICEKIPSLTLGLYYTYIKPIAHVVYKVIFXNVDAFHTWHDRLEHPXIGMVRKIIDNSIGHHLITDKFPKYSDFVCTACATGKLILRPSYLKIRAEPLKFLERIQGDICGPMVPRSRPFRLDNAAEFTSHAFDDYCMALGIQVQHSVPYVHTQNGLAESLIXRIKLIARPLLINCKLPSLCCGHVVLHTADLVQLRPTALRKLXYRETSPMQLVRGNPPSISHLCKFGCIVYILISPPHRTAMGPHRKVGIYVGFKSPSIIKYLKPLIGDLFTARFADSIFDEENFPALAGDFKYQKEXQEIDWDAQGIPASHPRTTETELQVXEIIHLQRLANNLPDAFTNYKGVTKSFIPAQNALERVEVPNKTTQLPLTKKRGRSLATQRDTVASKKRKTINANQPXVGTHQIDTMYQADRDNLQPSPVVHNAETRNSEDHRHIVLGNHNESIRVDEIAINYSETGESFDRRATIVDINFSEXIADCLQVDPEPRSIKECQKRSDWNKWKDATDAELASLYKRDVFSAVMPTPRGIFPVGYKWVFVWKRNENNEVVRYKARLVAQSFTQKHGVDFNXTYSPVMGGITFRYLISLIVQNRLFMQLMDVVTAYLYGSLDSNIYMKVPDGIDMPNQKVNRNMYCVKLQKSLCGLKQSGRMWYNRLSKFLSLKRYTKNDDCPCVLIKKSPTGFCIISVYVDDLNIIGNTQDINEARHHLKTEFEMKNLGQTKFCLGIQLEHLPSGILVHQSAYTXKILEKFNXMDKSYLSKTLMVVRSLDVEKVPFRPKEDGEDVLGPDFPYLSAIGALMYLANSTRPNIAFSVNLLARYIAAPTKRHSTRVKNVFRYLNSTRDLRLFFKKNQDSTLIGYTDAGYLSDPYNAKSQTGFVLLQGGTAISWKSSKQTLVATSTNHFEIIALYEASRECLWLHRMINHILTSCGIGSLESPTIIYEDNAACVVXMETGYIKSNITKNIAPKLFYPHELQQHGE

SEQ ID NO: 180786 - protein, 591 aa, Oryza sativa
  Clone ID: PAT_MRT4530_78123C.1.pep
MSKDITPIGEELCLVDSGTTNSILREIKYFQTLKNREGKVLTIAGHDTVIVGSGRAIITLPMGTQITIEDALLYPDSTRTLLSYRDIRQNGFHIETHMDNREEFLLLTKQNGYGKRICEKIPSLTSGLYYAYIKPIAHVAYKVIFQNVDAFHTWHDRLGHPGIGMMRKIIGNSIGHHLITDKFPKSSDFVCTACATGKLILRPSYLKIRAEPLKFLERIQGDICGPIVPRSGPFRLANNLPDVFTNYKGVTKSFIPAQNAPERVELMDVVTAYLYGSLDSNIYMKVPDGIDIPNQKKSFYGLKQSGMMWYNQLSEFLSLKGYTKNDDCPCVFIKKSPTGFCIISVYVDDLNIIGNTQDINEARHHLKTEFEMKDLGQTKFCLGLQLEHLPSGILVHQSAYTQKILEKFNMDKSYPSKTPMVVRSLDVEKDPFRPKEDSEDVLGPDFPYLSAIGALMYLANSTRPDIAFSDSTLIGYTDAGYLSDPHNARSQTGFVFLQGGTAISWKSSKQTLVATSTNHSEIIALYEASRECVWLHRMVNHILTSCGIGSLESPTIIYEDNAACIVHMETGYIKSNITKHIAPKLFYPHEL

SEQ ID NO: 180787 - protein, 117 aa, Oryza sativa
  unsure (1)..(117): unsure at all Xaa locations
  Clone ID: PAT_MRT4530_78124C.1.pep
GGNNNCRDAKHNSICIYRSCSGSRQHXNDRGGYVGHXSRLVYIYDAHKCKQWLEARRKNSSTXVNINKTMTVSPPHGMKMDEQAQMTPDELKEXVLDKQRESIFAHPALPAVYLCRH

SEQ ID NO: 180788 - protein, 92 aa, Oryza sativa
  unsure (1)..(92): unsure at all Xaa locations
  Clone ID: PAT_MRT4530_78125C.1.pep
TSHAFDDYCMALGIQVQHSVPYDHTQNGLASSCWGHAVLHAADLVQLRPIAYHETSPMHLVRGNPPSISHLXVYIPISPPQRTAMGPHRNVG

SEQ ID NO: 180789 - protein, 490 aa, Oryza sativa
  Clone ID: PAT_MRT4530_78126C.1.pep
MMRKIIGNSIGHHLITDKFPKSFDFVCTACATGKLILRPSYLKIRAEPLKFLERIQRDIYGPIVPRSGPFRIQSICMDNAAEFTSHAFDDYCMALGIQVQHSVPYVHTHNGLAESLIKRIKLIARPLLMNCKLPSSCWGHAVLHAADLVQIRPTAYHETSPMQLVRGNPPSISHLRKFGCAVYIPISPPQHTAMGPYREVGIYVGFKSPSIIKYLEPLTGDLFTTQFTDSIFDEEHFPALGGDFKYQKECQEIDWDAQGIPALDPRTTETELQVQKIIHLQRLANNLPDAFTNYKGVTKSFIPAQNAPERVELMDVVTAYLYGSLDYDIYMKVPGGIDISNRKKILEKFNMDKSYPSKTPMVVRSLDVEKDPFRPKEDGEDVLGPDFPYLSAIGALMYLANSTRPDIAFSMETGYIKSSITKHIAPKLFYPHELQQHGEINILQTKSCDNLSDLFTKSLPYSTFFKCVEGIGMRRIKNLQDLGGVSSSGK

SEQ ID NO: 180790 - protein, 317 aa, Oryza sativa
  Clone ID: PAT_MRT4530_78127C.1.pep
MATLTVPSAVPPVADDCDQLRKAFQGWGTNEALIISILAHRDAAQRRAIRRAYADTYGEELLRSITDEISGDFERAVILWTLDPAERDAVLANEVARKWYPGSGSRVLVEIACARGPAQLFAVRQAYHERFKRSLEEDVAAHATGDFRKLLVPLISAYRYEGPEVNTKLAHSEAKILHEKIQHKAYGDDEIIRILTTRSKAQLIATFNRYNDEYGHPINKDLKADPKDEFLSTLRAIIRCFCCPDRYFEKVIRLAIAGMGTDENSLTRIITTRAEVDLKLITEAYQKRNSVPLERAVAGDTSGDYERMLLALLGQEQ

SEQ ID NO: 180791 - protein, 81 aa, Oryza sativa
  Clone ID: PAT_MRT4530_78128C.1.pep
SCPVFRFQLPPGECYDSSKSARGGAAHSGGGRRLFHPAPRVHGGGLGRFPAVMQELRSILFHPLPGLTFGSRLHVHQPSDE

SEQ ID NO: 180792 - protein, 160 aa, Oryza sativa
  Clone ID: PAT_MRT4530_78129C.1.pep
MWKLKFGEGASNPLLRSSNGFLGRETWEFDPNGGSPEEHAVVERLRRDFTRNRFTQRECSDLLMRMQFAKENQVYSKHEVSNLKDSSEVTEEVLLTSLRRVLDQYSSLQAPDGYWPGGYSGILFILPLMIFALHVTKSLNDVLSSEHIREICRYIYNIQN

SEQ ID NO: 180793 - protein, 109 aa, Oryza sativa
  unsure (1)..(109): unsure at all Xaa locations
  Clone ID: PAT_MRT4530_7812C.1.pep
LTGDGPSSPSDPTAEAPEPXVGPEATTGEREALVGGHETTRTNGVGSPSEAPMDERPKAGTPDDKDRPRRKMXRPVYFVREALWDAKTRYHQTQKMLYAVLMASRKQRH

SEQ ID NO: 180794 - protein, 67 aa, Oryza sativa
  Clone ID: PAT_MRT4530_78130C.1.pep
LKILDAQLCSAFRLLYSLYSVTKLMCYLVTVDPYMVSSAQCEYPLPTALWCMGWSIPAVNPMKVFHF

SEQ ID NO: 180795 - protein, 91 aa, Oryza sativa
  Clone ID: PAT_MRT4530_78131C.1.pep
MVNQEETEVTTSQDSMIFDVRIAGVNTVIELAADGAQLDAAHTIIAKAKVQVEAGGKHPSQEVRQRSRQPIDPTPTRQSELQKTMLNEKTD

SEQ ID NO: 180796 - protein, 155 aa, Oryza sativa
  unsure (1)..(155): unsure at all Xaa locations
  Clone ID: PAT_MRT4530_78132C.1.pep
LDFCEAYMNVHGDWALETILSDATLRCELADCELAQLLMADAKDANPVDRRITPLTPKSDIYSIGSVXIRVLTGKQAASLPSAIWRATVQLXLWSLVHPTTAEWPMAEGRHLTXMRLKCLEASCTQLLTSETGRDLQQVHLTRGTRLVPSFLLCP

SEQ ID NO: 180797 - protein, 816 aa, Oryza sativa
  Clone ID: PAT_MRT4530_78133C.1.pep
MASSSSPSHLHLLILFFFAIAASSLLSTATSTRASPADTAVGGIAAKVYTKVCDATRFAGLGLNMTEFRYCDASLPYADRVRDLIGRMTVEEKVGALGDWTDGAARIGLPAYRWWSEALHGLSSTGPTTKFDDLATPHLHSGVSAVYNATVFANVINSAASFNETLWKSIGQAVSTEARAMYNMGKGGLTYWSPNINVVRDPRWGRALETPGEDPYVVGRYAVNFVRGMQDIPGHEAVAAGGDPNTRPLKTSACCKHYAAYDLDDWHNHTRFEFDARVDERDMVETFQRPFEMCVRDGDVSSVMCSYNRVNGIPACADARLLSQTIRRDWGLHGYIVSDCDAVRVMTDNATWLGYTGAEASAAALKAGLDLDCGESWKNDTDGHPLMDFLTTYGMEAVNKGKMRESDIDNALTNQYMTLMRLGYFDDIAQYSSLGRQDICTDQHKTLALDGARQGIVLLKNDNKLLPLDANKVGFVNVRGPHVQAPEKIMDGDYTGPPCRYVTPRQGVSKYVRFSHRANTTIYFGGLNLNIEREGNDREDILLPKNQTEEIIRVAKASPNPIILVILSGGGIDVSFAQNNPKIGAILWAGYPGGEGGNAIADVIFGKHNPSGRLPLTWFKNKYIYQLPMTSMDLRPVAKHGYPGRTYKFYDGPDVLYPFGYGLSYTKFLYEMGTNGTALIVPVAGGHCKKLSYKSGVSTAPACPAINVNGHVCTETVSFNVSVTNGGDTGGSHPVIVFSKPPAEVDDAPMKQVVAFKSVFVPAWSTVSVSFELNVCKAFGIVEKTAYTVVPSGVSTILVENVDSSVSFPVKIDFAI

SEQ ID NO: 180798 - protein, 266 aa, Oryza sativa
  unsure (1)..(266): unsure at all Xaa locations
  Clone ID: PAT_MRT4530_78134C.1.pep
RLENHHSPPSNLKNLCGGKDFLWHEKPPIKHLNLREIDLSGRQFTWANNLENPTYEKLDRVLMNTDWEQKYPLVTCQALPRAISDHSPIILRSGSHAHFGNQPPFRFELGWLERDGFFEMVAKEWQSVNKGKNPMERWKHKIVHLRQHLRGWARSLSGTYKKQKIKLLALIDTLNKKAEHITLSNTELASLKQAKNDLAKLLREEELYWYQRSKTNHLLXGDSNTKYYHLIANGLFGPPDHNHVSMIEGWTDDIPQVSDLENDILT

SEQ ID NO: 180799 - protein, 59 aa, Oryza sativa
  Clone ID: PAT_MRT4530_78135C.1.pep
NINTKQRWVFKALTTTPPLKQLHVKANLSYMTYLAHTNMHIMYHSTASSSRPPPPYPPP

SEQ ID NO: 180800 - protein, 103 aa, Oryza sativa
  Clone ID: PAT_MRT4530_78136C.1.pep
KLFLQVAGHRDFFKGDPYLKQRLRLRDAYITTLNVCQAYTLKRIRDPDYHVTVRPHLSKEVMDGSKPAAELVKLNPGSEYAPGLEDTLILTMKGIAAGLQNTG

SEQ ID NO: 180801 - protein, 698 aa, Oryza sativa
  Clone ID: PAT_MRT4530_78137C.1.pep
MANSKSLLLCWCSLLLLLLAAAAPPALALPLCTDSRAPVPLNGTTLGFCGGGGSGSSSCCGAADDAALRKRFEAMNVSDAACAGVVKSVLCAKCNPYSAELFNSSSKIRMVPVLCNGSASASSTQSKDSTQDYCKLVWETCKNVTILNSPFQSPLQGGATLPSSSSKLTDVWQSENDFCTSFGGSSDNQSVCLNGNEVSFSTSEPSPSPKGVCIERIGNGTYLNMAPHPDGSNRVFLSSQAGKIWLATVPEQGSGGILQFDEASPFIDLTDEVHFDSEFGLMGIAFHPKFATNGRFFVSYNCDRTQSSNCAGRCSCNSDVNCDPSKLGSDNGAQPCQYQVVVAEYSAKVSSSNVSEATSANPSEVRRIFTMGLPYTAHHGGQILFGPTDGYLYLMMGDGGNKGDPFNFSQNKRSLLGKIMRLDVDGVQSQSQIINQSLWGNYSVPKDNPFSDDRDLQPEIWALGLRNPWRCNFDSERPSYFYCADVGQDLYEEVDLISKGGNYGWRAYEGPYIYHPEWTPGGNTSLNSINAIFPVMGYSHSAINKNTGSASITGGFVYRGSSDPCLYGRYIYADLYASAMWTGTETPESSGNYTSTLIPFSCSKNSPIPCESASGSNQPSLGYIFSFGEDNNKDVFLLTYKGVYRVVRPSLCGYTCAAEKPETNNNGTSPSGSSSFASGRRIGKLAVVMAFVLCALFF

SEQ ID NO: 180802 - protein, 472 aa, Oryza sativa
  Clone ID: PAT_MRT4530_78138C.1.pep
MAMNKLVGAAVRRPGWADLPRDLLESVLGRLPVPDRLRFPGVCTAWQSADAASATARFRAAQPPWLMLPFNPTARRQSPSGGGGGDGRFLEARFLSLSDGRAYAIPQPAPPVSERLCVGSSDGWLVTADAASELHLLNPLTGAQVQLPSVTTLPFVDASRDADGRVASYDLRCCFGDGDNDGDEVLVPPESFAPDRLRYELYEKAILVAPPRRQTTPPGSWGGYAVLLICQPLYRLAIARAGDTKWTLLDMPSRCWVDAVRAASAPAADGHQAVYTLDSVGRVEAWDMDVTAAGTTPPPPREIAPPCCCSGRACSMSIPCSKYLVELSPGHLLQVHRLRDKAHARSKWEPRQERVEYTTVKAELFEWNAAGGGHGEWARVDGAGAGILAGRALFLGKSASLCVPADCCPEVKGNCVYFTDDGPWSHERCHEVVPDVGVLDLADGSYKVPRGAVRDLLWKWPPPVWVFPSCTN

SEQ ID NO: 180803 - protein, 169 aa, Oryza sativa
  unsure (1)..(169): unsure at all Xaa locations
  Clone ID: PAT_MRT4530_78139C.1.pep
RDVVVQRIRKVQRWIIFRTSDGDPSSHSPPLPLYPLPSRASRPPPPAPPPPAFSXPPARHRSPPASRNTNPLLPPPTPLHFLPHLRSGAPPXAVSSLLPPPPPVFPFGPDAGAGIHSFIRPSASRPPSPPPARRSLLAAHRLARTAAGRARAFSKNFRACRPSATMTPV

SEQ ID NO: 180804 - protein, 149 aa, Oryza sativa
  Clone ID: PAT_MRT4530_7813C.1.pep
MARLLSRTLALARADSAAVPSYGRLHVRGVSSKVEFIEIDLSSEDAPSSSSSSGVEGGGFGPREMGMRRLEDAIHGVLVRRAAPEWLPFVPGGSYWVPEMRRGVAADLVGTAVRSAIGAAWNAEAMTEEEMMCLTTMRGWPSEAYFVEG

SEQ ID NO: 180805 - protein, 1142 aa, Oryza sativa
  Clone ID: PAT_MRT4530_78140C.1.pep
MATASPSLFGQPVAEKLGRNNFLLWKTQVLPAVRGAQMMGYLDGTTVPPARLIDVKEGEKVVKATNPEYTKWVVADQQVLSYLLSSLAREILTQVVSIETAAELWRTLENMLCSQTENYHKMNSFSDEMAMTTTRKGKLCGKVGHMVADCWYRYNEDFVPEKSAAAAIHGYNIDTNWYADTAATDHITGELDKLSVRERYNDGEQIYTASGSELVYSDVWGPATDSVGRKNYYESLTGSLALTHINKMVLRSANIDTLLNPLHKGFKCLHVSTGRIYISRDVIFDENVFPFAKLHPNAGALLRKEIDLTPSLFLPFSGGDHVPNNANQNTVPENMSNGENSASFADDSVQISHEISAAIDAAEHQTDSAATNSVAGAESTSESSSATTDDPAADVWSAGGNSLASPSSAPASPNPPSPPPSPHAASTTVSSPSGTRTDEEELVSRSSVAEDTAANNPRPHTRLQSGVHKPKVYTDGCVRYGCFTSTGEPESLEEALKHKDWKVAMDSEFDALKQNKTWHLVPPEDGSNLIDCKWVYKCPEPPGEEHRNFLAEMSSPELPEFLSQELPGNRENQNLGRQNRLVAKGFKQRYGIDYEDTFSPVVKATTIRTVLSIAVSRGWSLHQLDVKNVFLHGILEEDVYMRQPPEYEEISKPHYVCKLDKALYGLKQAPRAWYSRLSMKLQQLGFSPSKADTSLFFYRKGSVTIFVLVYVDDITVASSSQDAVSSLLHNLKMDFALKDLGDLNYYFLGIEVKKISDGLVLSQDKYTHDILKRIGMSTCKPAPTPLSTSEKLSVQEGSLLGPGDATNYRSIVGALQYLTLTRPDIAFSINKVCQFLHSPTLTHWSAVKRIIRYLRGTVGMGLKIQKSQSMLVNAFSDADWAGCVDDRRSTSGFAVFLGSNLISWSVRKQATVSRSSTEAEYKALANATAEVIWVQTLLKELGIQCPSMARLWCDNLGATYLSANPIFHARTKHIEVYFHFVRERVAQKLLEIEGASAVDEKMVRTVGEGGVDLSFCNNGNSGSPDDEGITEEKRIEMELPVARGDRRPEFGRESRGSRGVRRGGANHGDGVIRLGLGECRQLQTSEAFCGSDPGEAQSASRLAPPPVAHDPWQGVSWELYGILPDINNVSNLYLILIQYHDK

SEQ ID NO: 180806 - protein, 1001 aa, Oryza sativa
  Clone ID: PAT_MRT4530_78141C.1.pep
MATASPSPFGQPVEEKLGRNNFLLWKTQVLPAVRDAQMMGYLDGTTAPPARLIDVKEGEKVVKATNLEYTKWVVADQQVLSYLLSSLTREILTQVVSIETAAELWRTLENMLCSQTRAQSFNTRVAMTTTRKGNLKITYYINRMKSFSDEMAAAGKPMDDEEIVAYILAGLDEEYDPVVSLCGKVGHMGGNCWYRYNEDFVPEKSAAAAIHGNNTDTNWYADMAATDHITGELDKLSVRERYNGGEQIYTTSGSELVYSDVWGPATDSVGRKNYYVSFIDDFSKFTWIYFLKYKSEVLQKFQEFLSFVERLLDRKIIAMQTDWGGEYEKLNSFFTKIGISHRVSCPHAHQQNGAAERKHRHIVEVGLALLAHASMPLKFWDEAFCTATYLINRTPAKTINFDTPLERLFHQKPEYASLRTFGCACWPNLRPYNSKKLVFRSTQCVFLGYSRLYKGFKCLHVSTGRIYISRDVIFYENVFPFAKLHPNAGALLRKEIDLTPGLFLPFSGGDHVPNNANQNTVPENMSNAENSASFADDSVQISHEISAATDAAEHQTDSAAIDSATGAESTSESSSAATDDPATDVWSAGGNSLASPSFAPASPNPPSPPPSPHAASTIVSSPSGTRTDEEELVSGSSVAEDTAANIPRPHTRLQSGVRKPNVYTNGCVRYGCFTSTGEPESLEEALKHKDWKVAMDSEFDAPKQNKTWHLVPPEDGSNLIDCKWVYKVKRKEDGTIDRYKARLVAKGFKQCYGRDYEDTFSPVEDVYMRQPPRYEEKSKPHYVCKLDKALYGLKQAPRAWYSRLSMKLQQLGFSPSKADILLFFYRKGSVTIFVLVYVDDIIVASSSQDVVSSLLHDLKMDFALKDLGDLNYFLGIEVKKISDGLVLSQDKYTHDILKRMGMSTFNKIFEKYSWYGTQDTEISVYACSEKTTLTLSMTPKASAMNPNRPLLFCACAASMGCSGPPPPSTTSGATIGELQRHVEPWIKSKPWRLALTLHTDV

SEQ ID NO: 180807 - protein, 160 aa, Oryza sativa
  unsure (1)..(160): unsure at all Xaa locations
  Clone ID: PAT_MRT4530_78142C.1.pep
MDPKMKQLQKALVDIETDAEQLLLARHQLVENDKIRNSKGEALTTLRKRARTTKTSVPSPFEVIMKEMEGTSGKLLVTEICSTRGNHNPKEDTWLMFPXSDIFARVPFHVAHIVFDKDQERLDYDTKKXIQSFVKEKSFVISEKGALGIVKSLVSLTGKP

SEQ ID NO: 180808 - protein, 102 aa, Oryza sativa
  unsure (1)..(102): unsure at all Xaa locations
  Clone ID: PAT_MRT4530_78143C.1.pep
LPIRVSSDELSGRCIGLQGSHIIGFYWIILFYYIIISRLPLFTSSVRLHIKHIADSSKPYRHRLDQTDXHARTSPRFRLALELSRSPRPVCVFRINSSHLAS

SEQ ID NO: 180809 - protein, 56 aa, Oryza sativa
  Clone ID: PAT_MRT4530_78144C.1.pep
VVGNWSLSGKDGLPITCLRFGPRGKNRKGCFWPLFAVVEYATQAHKLADDALKAFV

SEQ ID NO: 180810 - protein, 78 aa, Oryza sativa
  unsure (1)..(78): unsure at all Xaa locations
  Clone ID: PAT_MRT4530_78145C.1.pep
MANKFISKPHVFDGTDFCYWCSKMQSYIXDLNIWRKVSNPYVIPNQINTVVLKNEFENNCKAHNFLLSGMSKLEYSIV

SEQ ID NO: 180811 - protein, 150 aa, Oryza sativa
  Clone ID: PAT_MRT4530_78146C.1.pep
MAMRSLLLTSFFREERAEAIRLQTAAATYHNLDSSNCKRTLTSHLGLGHDREFATNKRSLLIGPYRMATKMKRALYHLFHPQLFQHRERKAVEGAAGEVEARREEVDTEDDATGEVEAGLAEADAEDGAARGIEDEGEKKGHWNGHARGN

SEQ ID NO: 180812 - protein, 444 aa, Oryza sativa
  Clone ID: PAT_MRT4530_78147C.1.pep
MAEANQYQILVRLLDGRTRCLRFSTTTVSGAALLDAVSALSRVPAASLRLVTGRLDVSPSSVLASSADGRFPSASALLRLRGGKGGFGSLLRGAASKAGQKKTSNFDACRDINGRRLRHVNAERRLEEWKAEAADRQLEKLAEDFIKKKAKEAGRGGVKAAEVDKYLEKYRKDAESCVNAVEESVRASLGKRKTVPKPRGGEDAKKLKIWLGKKKVQEDESDSDSDSEMDDDEGADTKSIILDDGNSSHGSKSEDEKVDLGSITESPSEGETSGEKSGRSESEENGNGVQESREPTIRSEGECGDFISDGVVEHEIGVVDEHTPENGVSALSEEVLKPDVKAEDNTASASATSHLNDLEAPPVEEPANGNISPLSQEPLDLTIYSSAAELEVLGMERLKLELQNRGLKCGGTLQERAARLFLLKTTPLEKLPKKLFAKPSGGGK

SEQ ID NO: 180813 - protein, 47 aa, Oryza sativa
  Clone ID: PAT_MRT4530_78148C.1.pep
FFFFLRINLAFIHCYIIQLHLQTTKESLAIYKHPPKFHTNPHNYAKP

SEQ ID NO: 180814 - protein, 1242 aa, Oryza sativa
  Clone ID: PAT_MRT4530_78149C.1.pep
MALIQEKDHPVEPSKHISVDDEEITSPPVEEKAAAAADKKFPFFGLLRYADGLDWLLMVAGTMGSFLHGMGPSMSYYLVGKGIDVVGNNIGNREATVHELSKLIPYMWALAIITLPGGMIEITCWMYTSQRQMSRMRMAYLRSVLSQDIGAFDTDLTTANVMAGATNHMSAIQDAIGEKVGMLSMLVVPMLLMVGATYAKMMIDASMKRIALVSAATTVVEQTLSHIKTVFSFVGENSAIKSFTKCMDKQYKLSKIEAMTKGLGLGMLQIATFCSYSLTVWVGAAAVVDRSAKGGETIAAVINILSAAIYISNAAPDLQSFSQAKAAGKEVFEVINRNPAISYESNGTILEKVTGNIEIREVDFMYPSRVDKPILRSFSLSIPAGKVVALVGSSGCGKSTVISLVQRFYDPISGNILIDGQNIKELDLKSLRRSIGSVSQEPSLFSGTIMDNLRIGKMDGTDEEIIEIAKSANVHSFVSKLPNQYSTEVGERGVQLSGGQKQRIAIARAMLKDPPILLLDEATSALDSESEKLVQEALDGAMKGRTVILIAHRMSTIINSDKIVVVENGKVAQSGTHEELLEKSPFYSSVCSMQNLEKESGKSEERFTDQVREEQDNGSGTSNEPSSTAHEQEKSLELNPNQPKQDIRNRASAFYRMFLGTFMLEPGKILLGSTAAAISGVSKPIFAFYIMTVAIAYFDPDAKRIVAKYSIILFLIGLLTFFSNIFQHYIYGLVGERAMNNLREALFSVILQNEIGWFEQPKNSVGFLTSRVVGDTSMIKTIISDRMSVIVQCISSILIATGLSIGVNWRMGLVAWALMPCQFIAGLVQVRSAKGFATDTSTSHRKLISLTSEAVSNIRTVASFGQEEEILKKADLSLQEPMQTSRIESIKYGVVQGVSLCLWHMTHAIALSYTIVLLDKSLATFENCVRAYQAIALTITSITELWSLIPMVISAIAILDPALDILDRETQIVPDEPKVHCEDRITGNIEFQDVSFSYPSRQDVIILDGFSLAIEPGQRVALVGPSGAGKSTIVSLLLRFYDPCRGQVLVDGKDVREYNLRFLRKQIGLVQQEPILFNLSIRENISYGNEGASETEIVEAAMEANIHEFISGLSNGYDTVVGDKGSQLSGGQKQRIAIARTILKRPVILLLDEATSALDGETEKVVMSSLAAKEWKSKEGELSNKITSITIAHRLSTVTSADVIVVMDKGEVVEMGSHETLVTTSNGVYSRLYCMQSKGMKD

SEQ ID NO: 180815 - protein, 102 aa, Oryza sativa
  Clone ID: PAT_MRT4530_7814C.1.pep
LHGFERRSRHLHSRFIYLSQSITERPPVAHLRRTTFPLRARAPRLYTPHRGRGPSCVSTSVGAAELGLPRGLGSRSVWFHFDHLGRGAAGWQLPRRRRTVVR

SEQ ID NO: 180816 - protein, 298 aa, Oryza sativa
  Clone ID: PAT_MRT4530_78150C.1.pep
MPRAAAGNPCALMCRHSCRRRRGKSGGEKLSYITVVRAALLLLVALSALSLLAMGSRNDRHAGLGLAALLPIHSCPRQASPSSIVAVARHHDGGELLAVGIGRRSERRVWPNYHGDNFARFHIYWQVNTVNMPCFDHMCPGFVQVSTSVGIGGRIEPVSTYNGDQYEITVTISKDPKTGNWWLAYGRDKKPLGYWPPSIFTYMNEKASACFWGGQVHGPTVQLHLPELGSGHWAATGPGKAAYVRSIKVINKDSQYFIPGTHNTFSGSTRPFCYDAGDIRFNDDGARLLYGGPGNCTK

SEQ ID NO: 180817 - protein, 266 aa, Oryza sativa
  Clone ID: PAT_MRT4530_78151C.1.pep
MPTGAPVHAPSAVDLDHAKMSRRATSFPSRSSPKYLKISQYSSTGDGDCLRLLQLRLNAAVADSFLSGEHPFDFYDPRDIHAWQIVEGKQAISVCLRRCVTVGRTFTAKASLTAIVWPVRQDNTLRSDHVSKAELAIWRRKSRATPQIGESLPFDDCPRGDKFAQITLLDKQLAQEAGQVIRHRSEIGPGCRGRSSLPRSHFGLRSGEATKERYSVVSDLAGCGLEEESYPVVDYESDLQTAMHAMRTFDHVTETPSTTTKAYHMR

SEQ ID NO: 180818 - protein, 182 aa, Oryza sativa
  Clone ID: PAT_MRT4530_78152C.1.pep
ALRTHTHTPTHAHTLTSPHASSTSSLEQQQTSPPHRATDRQRATLSHNQRNSSNIRKILARADSYNPRARQAILNLSTSPASLPHSLKPPFQNRSLLTHQYTPSIPTKSPHSSSTHSSAMSNAHSLVYMHPHGHISQLQSSFKLTSFAQTPTPPPLPQSGCFPFPAPPRATHPNSKSLSHKH

SEQ ID NO: 180819 - protein, 85 aa, Oryza sativa
  Clone ID: PAT_MRT4530_78153C.1.pep
MELVNSTGSTPLEADGSINPPPLSLSLLSVPTDSGSVLHKTGTINAATTGVTTINVAARMHIGSGSIIPEAGIVVVAASEVVGRR

SEQ ID NO: 180820 - protein, 96 aa, Oryza sativa
  Clone ID: PAT_MRT4530_78154C.1.pep
GAGFTSRVRVGGGRCWCCCACRNRDGESQVVALHRYQLMQASRDNEYSLRIVTYEGSNKYLVHIQSSDHTPEKHEADSTPLSAQILLNHASCQQLY

SEQ ID NO: 180821 - protein, 164 aa, Oryza sativa
  unsure (1)..(164): unsure at all Xaa locations
  Clone ID: PAT_MRT4530_78155C.1.pep
MVGCPEHAARQDTKRSKAVIIPLCELVAGGGGADVAPGGHQREAAPGQHVDGPDRPEGGSGGHGESEAANRPAXAHRGAAATRRPKGHRQRAAAGSTGSTGSGGGGHGGGWGAHRACGPARKCGEWLAAGTRRWSLSGWLGNDDPAVFREREAADEGGCDLGIV

SEQ ID NO: 180822 - protein, 896 aa, Oryza sativa
  Clone ID: PAT_MRT4530_78156C.1.pep
MAPTAAVAGGGVEAEALLGLLQRVQSEALRAFGPNDFDPKLYVDLPLAADASAAAALASLPRAAPSRGEMEAYISRYFALAGSDLVAAADPPDFERDPPGFLPRVERAEARAWALEVHALWKDLTRRVAPAVAARPDRHTLLPLPGRVVVPGSRFREVYYWDSYWVVRGLLVSKMYETAKDIVLNLVYLVEKYGFVLNGARSYYTNRSQPPLLSSMVLDIYMATGDMAFVRRVFPSLLKEHSFWMSEVHNVAVMDNHGRDEEFASKLSTAAKEKFYHQVASTAETGWDFSSRWMRDSTDMTTLTTSCIIPVDLNTFILKMEQDIAFFAKLIGESTTSEIFSEASKARHNAIDSVLWNADMEQWLDYWLPTDGNCQGVYQWKSISQNRAIFASNFVPLWLNAQHSGLEQFVDEAKSVRVMRSLQKSGLLQPAGIATSLSNTGQQWDFPNGWAPLQHLIVEGLLRSGSGEARELAEDIATRWVRTNYDAYKATGAMHEKYDVVTCGKSGGGGEYKPQMQNVARLGSRLCLGKTMARGVGRCRRRSLPQTSRPQRVALMDAAAGRDPADAVESLSELALVPRRSRGEEPEPASEEGGAWPWSWAHGGAPAARRDVRAKGIVLQSAVANSPWMDQIRLYLNANANLCSWKIKGLEKGGFLGLEGGGGGLVGAGARRTKRVPVEPQGWRTVRREPPKTEKDGMGVLAVAQRETMVGDGWWRAHWQFPDTEVADTKDHPRGGQSKQSQGIQLVPLSLRHAIKRYLRDQDKAQMNLKVLLLSASFERTKGTCTELAATATGGVLIDDLRAPSGSEQQAARWKVRYAYGDIGLQYREYETVTYVASRMLAIYAACHRVLHEVRRRLSDVALAKVLDFSTPLEGFFHAFGLDDLFPGLDNRGTPW

SEQ ID NO: 180823 - protein, 115 aa, Oryza sativa
  Clone ID: PAT_MRT4530_78157C.1.pep
MPSPGSQATIGPLVGPGAIPRLTQGEAGLSFALKWAKTGGRSPLTERSPDGVLDVTIRSYLHSAGDKKGVEDCCTPIGRDRTKCFEGRLGHRPLMTAQPDPPSPMRQLGKGLGLR

SEQ ID NO: 180824 - protein, 117 aa, Oryza sativa
  Clone ID: PAT_MRT4530_78158C.1.pep
MASLYSFRLAVAVAALLVVGSCATEVAFKVGEGSSGKSLELVTNVAISEVEIKEKGGKDWVALKESSTNTWSLKSEAALKGPFSVRFLVKNGGYRVVDDVIPESFTAGSEYKSGINI

SEQ ID NO: 180825 - protein, 308 aa, Oryza sativa
  Clone ID: PAT_MRT4530_78159C.1.pep
GYSSPSPSLTPLPFSFAAVAFTKPSAEARPRASKVTSLSLPSSELGIKELLPAYKDQDLELNDLLTGVAFASGGSGYDPLTSISTAISSSGQLNLFSDYKQKLTSLIGEEAMTRILSEAVFFTVMGANDLLNNYFTLPVRRHQYDIPGYVDFVVSNAVNFTLTMNEMGAKMIGFVGVPPLGCCPSQRTGPSRECEPLRNQASELFNTRMKQEIDRLNVEHNIDGLRVVYFDIYYNLLDLIHNPGYYGFKDTSDGCCGNTVLNAAIFIKYHSACPNVYDYIFWDSFHPTEKAYDIVVDKLIQENKQYLM

SEQ ID NO: 180826 - protein, 83 aa, Oryza sativa
  unsure (1)..(83): unsure at all Xaa locations
  Clone ID: PAT_MRT4530_7815C.1.pep
GKLVRLPGTGPEFPGRPTRPAVDSQIXGKASILRALPVDVVANAYRLSREDSRHVKFNRGDEMAVFAPRRGPQQYAEWQINEK

SEQ ID NO: 180827 - protein, 117 aa, Oryza sativa
  Clone ID: PAT_MRT4530_78160C.1.pep
MALLSSFRLAVAVAALLVVGSCATEVTFKVGEGSSGKSLELVTNIAISEVEIKEKGGKDWVALKESSTNTWSLKSEATLKGPFSVRFLVKNGGYRVVDDVIPESFTAGTEYKSGINI

SEQ ID NO: 180828 - protein, 117 aa, Oryza sativa
  Clone ID: PAT_MRT4530_78161C.1.pep
MASLSSFRLSVAVAALLVVGSCATEVTFKVGEGSSGKSLELVTNVAISEVEIKEKGGKDWVALKESSTNTWSLKSEAALKGPFSVRFLVKNGGYRVVDDVIPESFTAGSEYKSGINV

SEQ ID NO: 180829 - protein, 117 aa, Oryza sativa
  Clone ID: PAT_MRT4530_78162C.1.pep
MASLSSFRLAVAVAALLVVGSCATEVTFKVGEGSSGKSLELVTNVAISEVEIKEKGGKDWVALKESSTNTWSLKSEAALKGPFSVRFLVKNGGYRVVDDVIPESFTAGSEYKSGINV

SEQ ID NO: 180830 - protein, 72 aa, Oryza sativa
  Clone ID: PAT_MRT4530_78163C.1.pep
MMRVKKVFNFISIEWFCSRGNLVVRLPRRARGEGLINRDASSMVGSADSDGCYSAVVSGCLSSSWEETLAVA

SEQ ID NO: 180831 - protein, 109 aa, Oryza sativa
  Clone ID: PAT_MRT4530_78164C.1.pep
HRHHHHSSSQAHPRFCVPPTPHTTHPHNPTPQPVHLQTINPPQPTLAPTHTHRASAPVQPVVTNTTARSFLLRQEHKETAGPVRINPIRKLQRGSECFQNGPTPKKCLY

SEQ ID NO: 180832 - protein, 54 aa, Oryza sativa
  Clone ID: PAT_MRT4530_78165C.1.pep
CFRQTQHKLPPVAKFGQNHFWAGAPLTCYAPYSNWPALPFFNVLKHTLVCPNRG

SEQ ID NO: 180833 - protein, 74 aa, Oryza sativa
  Clone ID: PAT_MRT4530_78166C.1.pep
MAGRQDSMAAVATRTSRDDDGGAARERREIVYGESATRGWGDVGRKSRPKRYPDPSLYRGRGLYYKVQSISLTE

SEQ ID NO: 180834 - protein, 69 aa, Oryza sativa
  unsure (1)..(69): unsure at all Xaa locations
  Clone ID: PAT_MRT4530_78167C.1.pep
SRGDPRGRLIFVHPGNNWPQGGVDYSRAADIPWTLRXGEHHQMASTGRPMLLALILFTVTVSMLEMYWA

SEQ ID NO: 180835 - protein, 59 aa, Oryza sativa
  Clone ID: PAT_MRT4530_78168C.1.pep
GWSSGIINNHMKKHKGVKQRDTRNDVLADELNKDHNKADAKEAIILAMLQTLLDKVLNY

SEQ ID NO: 180836 - protein, 97 aa, Oryza sativa
  Clone ID: PAT_MRT4530_78169C.1.pep
CIHTSNQQKTKIIKSRLHKHNFSLGSAHASVQLVYLQQNMKLCIFRRILHLQQKYAASAKNILVIALYIARTAAIGKQLAAISFQFSQMTLQSLHLG

SEQ ID NO: 180837 - protein, 223 aa, Oryza sativa
  Clone ID: PAT_MRT4530_7816C.1.pep
MVTGGGEEDGTTGGDWWGEEAPGRAATGGGAGTGGDQWGDAGQHGRGRQRRRGRSPPRGRREAARLWAAAAAVGDGIVIVTTRSSSSSATGVLQQRRQEPPWARHHRGEDGDGSTLSARPRSTPLRPPPAPLHPAGARSDHRRRGGSGDHRSIARERRRPSPRGSPPHAPAAGVHEVHDDVQAVSASAVASGKRARPPHRRRRSHATLADSNRRRRRRGKKRG

SEQ ID NO: 180838 - protein, 110 aa, Oryza sativa
  unsure (1)..(110): unsure at all Xaa locations
  Clone ID: PAT_MRT4530_78170C.1.pep
PGRPTRPHHTSSSIAPGPDSDPLRGLMAATDSRRLADLDVDELDRLLPLIKVTPFAAHRTSAPRGCGARXAAPRRMEESQASSERTPNPPHNRSVAFGQFQERLRESFTQ

SEQ ID NO: 180839 - protein, 218 aa, Oryza sativa
  Clone ID: PAT_MRT4530_78171C.1.pep
MQQPSVGIVVPNACSHPRNDAVPRAGSSRSRRSSLHLAGRHSHRCHARALCAAPDLHSREAIVSAKDNTNQDAKLRARKFFELEMSVSDCDIDPYGVVNNAVYANYVERAREELAAILGVSARTVACTGKALAISEQNLNYLAPLKRGAKFVVKVTLHIKGVRIYAKQFIETLPDRKLVLESTAIIVCLNGEYRPTRVFPELSSKLLDFFSPQESCSD

SEQ ID NO: 180840 - protein, 587 aa, Oryza sativa
  unsure (1)..(587): unsure at all Xaa locations
  Clone ID: PAT_MRT4530_78172C.1.pep
MVGMRGAYGYNDNGNEGGVVVGGGEAEAEIAAMAVLHKVAAPPAQSTASKLKARVKETFFPDDPFRGFKGKPLTTKWVMAVQYLFPILDWVPSYSFSLFKSDLGISYAKLASLPPIIGLYSSFVPPMVYAVLGSSRDLAVGPVSIASLIMGXPAAAGGEPRRRAAALPPARLHXTFFAGLVQASLGILRLGFIIDFLSKATLVGFMAGAAIIVSLQQLKALLGIVHFTTEMGLVPVMASVIHHTKEWSWQTILMAVCFLVLLLTARHVSVGSDWKATNGAAQDEIMQPTLIYATSSRGIVLGLSRPHGHIGFDPGRTEQILQIGQLKCGLNRPSWDKLLFDPQYLGLTVKTGLVTGIISLTEGVAVGRTFASLKDYQVDGNKEMMAIGLMNIVGSXAFSRSAVNHNAGCKTAMSNVIMALTVMVTLLFLMPLFVYTPNVVLGAIIIAAVIGLIDLPAVYNIWKMDKMDFLVCLCAFAGVIFISVQQGLAIAVGISIFRYKDAQRVPGFLILTVEAPINFANTNYLNERIKRWIEEESSAGTKQTVPAIDTSGISFLIDLKKSTEKHGLELILVNPTGXGHGEDTTSE

SEQ ID NO: 180841 - protein, 678 aa, Oryza sativa
  Clone ID: PAT_MRT4530_78173C.1.pep
NGGSNSMLALISFMAARGSKKRKIAEGRTHWTEEELRVFLHSCLEEIQARNIISSSPEAQGYINLERKMLERAGKRVTKKQVKWRWAKSRKNFGMWTWLESKATGLGRDTVSQAILASDEWWEIQESERKGAKAFKDAPLKCIDEHHAVFRGRTVVQDHSNVQPAHQPMINVEDIRAQPPSPAAAAARAKGKRPCASETETSGSSSKSRTCSDSSDEALHRLADDDSRVESMESRAEKKKARGARACMDMVVADGYRPCSDLWLMALALFLDPYWRQFFLDDCTTAESRLRFIQKSSELLPIGVSNVASPSVAAVRVRAVRRWPLRIPARTNREWAVGRKAMSGDSGASRKRKTAPGLHLHGSAVAKRKIPKLQLCNLPKVPADSRGSLNLTKLSLREVDITDEDLHQFLSECNHLREVDITDCRMLTNLRVPGHLNQLKSLLVAICPLLREIKLSCGLTALDYRGPFIPLQLAIPSQTTNVSISLLTFHSALGYIFSDLPSTLTNLETLTLKSKQVERIDMLSRLPRLISLRHLTLGLTISDLPQRKIDLLDFASLLKAAPFMEKLELHMKMVCVHQRYCQDDGELRSLPRCPHSHLSWVQITGFFGEKDQLELALHILRNATFLKAMVIETSLNTESESVNCYPERLSPDGYSVALEFLGKEDHNNAVHVLEADDE

SEQ ID NO: 180842 - protein, 720 aa, Oryza sativa
  unsure (1)..(720): unsure at all Xaa locations
  Clone ID: PAT_MRT4530_78174C.1.pep
MAARGSKKRKIAEGRTHWTEEELRVFLHSCLEEIQARNIISSSPEAQGYINLERKMLERAGKRVTKKQVKWRWAKSRKNFGMWTWLESKATGLGRDTVSQAILASDEWWEIQESERKGAKAFKDAPLKCIDEHHAVFRGRTVVQDHSNVQPAHQPMINVEDIRAQPPSPAAAAARAKGKRPCASETETSGSSSKSRTCSDSSDEALHRLADDDSRVESMESRAEKKKARGARACMDMVVADGYRPCSDLWLMALALFLDPYWRQFFLDDCTTAESRLRFIQKSSELLPIGVSNVASPSVAAVRVRAVRRWPLRIPARTNREWAVLVCCSWAKSNVRVTQVQVGMRKTAPGLHLHGSAVAKRKIPKLQLCNLPKIEQWRLHGTSRYQLGHGCASFIFLYVLRDMQCLVISGIEDMMDVLQXXVVLTWLSYLFYLYVNMVPADSRGSLNLTKLSLREVDITDEDLHQFLSECNHLREVDITDCRMLTNLRVPGHLNQLKSLLVAICPLLREIKLSCGLTALDYRGPFIPLQLAIPSQTTNVSISLLTFHSALGYIFSDLPSTLTNLETLTLKSKQVERIDMLSRLPRLISLRHLTLGLTISDLPQRKIDLLDFASLLKAAPFMEKLELHMKMVCVHQRYCQDDGELRSLPRCPHSHLSWVQITGFFGEKDQLELALHILRNATFLKAMVIETSLHTESESVNCYPERLSPDGYSVAYSLVLL

SEQ ID NO: 180843 - protein, 436 aa, Oryza sativa
  unsure (1)..(436): unsure at all Xaa locations
  Clone ID: PAT_MRT4530_78175C.1.pep
LLPTYSRQYKEEISQRITWGHWFTLFNVVLALCISTRYAFNADWPNTLSGKLYFFTSLFGHFSFIVFAAYLLLLFPLSFIIKNERTFRGLSVIIATIGQTVLLVDTEVFKQFYLHLSPLVWDLLVTPDDNSELSHQWQLLFVPMPIILLAQMLYSRWCWQKLRSFSRQKWGKFVALFFVACFTATHLIYAWADMRLYRPITSQKANYPLSHPMTARNFLXKHGVINRTKLQLNIAENGRLDSFYLNYPKQHLTFNRKPYTNVLIVNMSGLANEMIVAEKMPHLTQISEKTYRFMNHYGSGDSNAANLLGIFYSLSGQYLDSMLANKQTSPLLTAFKQANYQFGLFSHNSFAAPIYQQSIFAGFSLPKIKGNAQAIEKWTAWLNQRLAKPFFSYLDLAMPRTHNSLAPLEHVDAQFNQIWYALQQHNLLMNTLVIIT

SEQ ID NO: 180844 - protein, 61 aa, Oryza sativa
  unsure (1)..(61): unsure at all Xaa locations
  Clone ID: PAT_MRT4530_78176C.1.pep
QHXLEKDWGRLGMVANGEYGLRSPVGVTTXTKMKQTKASFQTPDEHMATLIWSVLPSNYCG

SEQ ID NO: 180845 - protein, 57 aa, Oryza sativa
  Clone ID: PAT_MRT4530_78177C.1.pep
MSTLAATLVDGELTSALHPFGVDQSALMEDGHNDGEANKDRHSNRCDNAARRVGHGR

SEQ ID NO: 180846 - protein, 63 aa, Oryza sativa
  Clone ID: PAT_MRT4530_78178C.1.pep
ILWNTQLINGVNSMLQCIQSLLIEFSTKLHTLINRFLLIIQPQSYVTKHLQHRKCHITRKTYI

SEQ ID NO: 180847 - protein, 410 aa, Oryza sativa
  Clone ID: PAT_MRT4530_78179C.1.pep
MVTSGFQEKERHSGGRSDVARVYRLDSDGAASPEHVSAADEMDGADVGPHVDIETEEAYEMDDLIHGEGCKGMATELNMEVEQRDTAWRGGLAHRPCPARHCAEQVDQFVRGCYTDDLPTIDPDVEEYLENEEMEEAIDDAVADVLADMFSFDSNQFMDEEREEATSKALVPINDDIKAKLVDIAHRLRNSLDSLVIDCGPIRARFEEIHSQIPEALADIISPVVYLEQHRFKLEWARQRIADRRERTKLKRPSRRHRRCHVSSRPAPSLWSPPLFAVAVIDKHLPALRSTSSAISFAVRRRVSVGKNRRRLLYLPVPSVCTIVLWFAGNRRSHAVYRCYFAGCAADTSRLAAAVPLPATAVLLLLRVVVAADVPLLIRVMSLPSRCPKSCNAVAILCRRCCGLIAAIAW

SEQ ID NO: 180848 - protein, 93 aa, Oryza sativa
  Clone ID: PAT_MRT4530_7817C.1.pep
MATLSTKTGKITLTSPLHQNRREDERQTNAPDKIPGTNLYGDSAPVAALITPSGSSGLQEWDPQCPESRSRHLLLAHQLRIQLLSAAAHHLRQ

SEQ ID NO: 180849 - protein, 116 aa, Oryza sativa
  unsure (1)..(116): unsure at all Xaa locations
  Clone ID: PAT_MRT4530_78180C.1.pep
PKARRDVGETPIRERSLEGIKQEKNSEHKYGWHNIGXCNGEIESEHSRNGRTTRDDAGSPRSGAAAVANPVAAVRPWQSTIVAPSLMSPPSSSXDVVLDQYRPASAARDWCVRGGC

SEQ ID NO: 180850 - protein, 90 aa, Oryza sativa
  Clone ID: PAT_MRT4530_78181C.1.pep
SRRSRWTGNPNTLQLQVAAASPRSRDNNNNDGGRAVHADPRGVTPVKKHELFLRRYDEWVNYHFQTYQGLHAIGARVELDVLKDLIINGG

SEQ ID NO: 180851 - protein, 215 aa, Oryza sativa
  Clone ID: PAT_MRT4530_78182C.1.pep
MEGVGARLGRTSARYGTTTTFTGPVRKWRKDWVPVAAAAAAAAAAASAASSTAGAGSRGNNLVLFKWTPMNGANGNGGGGDGDQAAAAAAAAEEEKATKRRRYVPVSVVEDERQESGKSDDENKANDGEPSSAETEPSNGKTNINDTPMDESQASDEARYSGKNGGGTDLNLNLGLKDPDGDNDIDTEEQDAENNTHTENRLKRKSVAPDLEMRM

SEQ ID NO: 180852 - protein, 525 aa, Oryza sativa
  Clone ID: PAT_MRT4530_78183C.1.pep
MGISSASYHPPTLQLPSSAVGASRRCGSPDWVMLDETAYISDRRNKSTAESQTSEGQIIQVSFWLVDPPGLSYFTVHCPGLEEDGLDLSPCDYFVYRAAPWSPWLDLLPDPNVMSFNSKKFGLFPCRSGVSEHYNVAFLNIEWVPSDVACQFELYIFSSKNRKWDVKPVLQDLSRSENHKVALEHEIDKLINIGHDSLCLVDLWHGIILLEKMFDDYPVVRYMTFPKPVVYTTDAYGETVCGETAPECVRDVACCNGLIKFVDVEYCYTDETNGNGWKATTWNRLPSWKDWRKRFTVDKTDILVDPSYAAVLPELWDNNTKNMELKRLICSIPTLSMLDDDFLYMITKMNEEDKNAWIISVDMKHNTLQDVAPISAARFSILSSICHPCAISKYLKISWISAIAVGDANGYIYEGQYGPWSRGRRRPARAGTAGPWRGGGGGGASPGRLGHSWAAAAAHRRDGLATAGRGRLGHGGAAAALDDHSRKALHDGLPRHAHAGSCSAASCPNSTSSASSRKNVSIPPS

SEQ ID NO: 180853 - protein, 582 aa, Oryza sativa
  Clone ID: PAT_MRT4530_78184C.1.pep
GRSWLTSPSKLRVESGRSSWEKLCWILFLPVNDKLNIDVSTNNWSRTLLRAEEWDPPACERTLLELKGGWGFWPPIAGGVGLRSQPQAYLHSPPRAPSESGDRRASAASSRIRVACLCRRRPLPYCARPQPSASASAGRIKQRSHTNGKLKYIVQAHHPLYPLQASEEGIEVFAVAFTDGASTVTAIVEGKNMWMRGFRTADGQIYEFDDKEEMQMLEGSINEKGKTREEGIIEDQKREKMDKKNKQRDKYELASSSKEHVVKENAPPRPKKYIKGSILLQHNSNYGDLVGKEPNELSRFQGWCTAPTIGLCGGNSYQWLGKCIQIDLKISSYRSKKSPDIDSETPRKGVEFDMDLASLRDKVDHELSDICGASDLYEYDSDVEYADADEGHSFFGYGHEFYYEDGNPYYAADREEKWENEILGKMEFPVPKANATCDFSFVWEGSLQVEGQFQVDPNRVSVEHLFPQLPKWESRWGAHKLQPLITPSRGIYAVGLVLIEYSLIIKGQIEGEDEVLIDGYSIYAPSFYGELQRLPRHIGTGHFIILGLRMVTSLKSVRFCFGFEVYQIGENRQYNLLTIAAT

SEQ ID NO: 180854 - protein, 121 aa, Oryza sativa
  Clone ID: PAT_MRT4530_78185C.1.pep
FRMGDEQSFGVYDMPSELLFTLDLKLTHANDFSAILRSSTQKIDKARKELKRRFRRIVKGTGSKRKEFCITPEGIEVFAVAFTDGASPVLAIVEGKNMWMRGFRTADAQIYEFDDKEEMQM

SEQ ID NO: 180855 - protein, 104 aa, Oryza sativa
  Clone ID: PAT_MRT4530_78186C.1.pep
GGGGGETGQRTVEVARATFAATTKHIAWLTGGKHTLKDLPAQADQERRHRRPGRQATATRSTFVGRRRVSGGVRAILALMDGPLSLTRSGAPSRAKCCTWPCPP

SEQ ID NO: 180856 - protein, 183 aa, Oryza sativa
  unsure (1)..(183): unsure at all Xaa locations
  Clone ID: PAT_MRT4530_78187C.1.pep
HAEAAEVREGGGVAGAAKASLTGGREDDGDWGRTRRAAPPSRVSLPPFLPSASPPSCAWPSHCAAPPFSXAVPPPSRARARPWRQPAPTPLSRAPPCRPLPFIVXAXFRSSQTTPPPSFPLLLIADRSCLLHRRQVADPGHNLLAPVVNRLSPPLSCAAARSPTPATASSHRTRWLPLSLCRQ

SEQ ID NO: 180857 - protein, 89 aa, Oryza sativa
  Clone ID: PAT_MRT4530_78188C.1.pep
MEKLLLTVPKSKTWDPVVFVERVVDPQVADLISIQAYSPRINGPEQQQESRKEHADSRRKKKTVKKELSTKMKAFHSSMTKCSCFASTD

SEQ ID NO: 180858 - protein, 679 aa, Oryza sativa
  unsure (1)..(679): unsure at all Xaa locations
  Clone ID: PAT_MRT4530_78189C.1.pep
MRFVSGIDDFAFPPGQAYQFGSLDFTTDSFSKISLLDSDSNQSGGDSGSXPFGLPDXAEIYSRVFSSDLASNHSDGTSTFSSSRLDQDSTVYPSIMMRLPDDLATVFGSRAPSPRRPRSDSASTTVGSSSKEVGIILQRLESCSTEEIEEYLNTPSIDSYAPTETIDYDNFDDYDDLDEEFDDNYEDDYTPLFFNVFMADNETEEQRLVREANEERACXEAERLRLEWERQEQGQARLLREQQEWKRLAREAEERRQHALASGRXACELIGXQNIDGTNVFRTPQQNTVAAIALLDTLMATGAPENVAQILNQTKTMIAASVLVDSGSTRQPSGSVRTTSGIWVPPLXSRDYCQPSLNVTNSRSQHGGRAHREHSVHSSANRHREHHADHKRPRSPRPRQPVDLRDTLNRRRAERDDXRRHHTPDRYDANDEGVAAFTSDMCRVDWPTGFKPTGIEKYDGKTDPESWLTIYTLAIQAAGGDSKAMAYYLPVAFVDSARNWLAGLPRGTIGSWGELFDHFIANFQGTFERPSTHFELHNVIXRPDESLRDYIWRFSEQRNKISDITDDNIIAAFTKGVRNDLLVGKFGRKPPRTVKQMFEKANEYAKSDDAVRASKQSSSSWKSKDXAAINGACGSRINYKDHKRKLEDLVATTHSSYQRPRVSIYDKIVNDQCPIHPKA

SEQ ID NO: 180859 - protein, 209 aa, Oryza sativa
  unsure (1)..(209): unsure at all Xaa locations
  Clone ID: PAT_MRT4530_7818C.1.pep
MAPKRVILHKKPTSGEKAGTLEILAPSGCQIFSPPPACNHRPQTVVIHCRRPPSSAAADRRPPPPPTVEXAISAERLLRPVVVHERSHPQPNDVFGQSASTAEPRRRPFRRRPRPNLVVGRSLSTDKYETMANGTKGTEEKGLGEEEPSLPIVVAPEPTVQPTDSSDSDIADEDDEYSSPSDPCPSPKRRKKGEGEKGDKDYIPPKEGN

SEQ ID NO: 180860 - protein, 70 aa, Oryza sativa
  Clone ID: PAT_MRT4530_78190C.1.pep
FLNDRYGTNCDLITKRIKIFTGRMQLTPIKMHAPYLRQDGFLLQPDHDLHVYLGKQLKYNHGYSHTAPGP

SEQ ID NO: 180861 - protein, 93 aa, Oryza sativa
  Clone ID: PAT_MRT4530_78191C.1.pep
MARVSSDELDGCTASPRQVPVGLLAGDEPLARDVRMWSWRDVGLRWHEAGMGLDIHGGVFLVAGRVFSLLLVSTFFGQTFSVAVDVGVLVWVI

SEQ ID NO: 180862 - protein, 119 aa, Oryza sativa
  Clone ID: PAT_MRT4530_78192C.1.pep
WGNISFFFTQHFHLVCSLRRKTGKQVTPTGGEPQFNPKLEGHTEPLAKIPAPSGPARPTLVKTRTCKIHKDGLWPQKLRPGENHHTPWGGTTFRTKYFARNQGQTLGVAFPGRKNPNGP

SEQ ID NO: 180863 - protein, 524 aa, Oryza sativa
  Clone ID: PAT_MRT4530_78193C.1.pep
MSMIAATLRRSSRVTGSQNIMEICLGPCVSSGASSRWFSSCTKHSNTSILNQIKAVERYSPVNGMSMISRVPLSAHMDTNWLSTSNPRFNALPGFFTRPFSYFSYSSDTGIKAEVPQNTVSNVPSTETVALGTSDGGSSWIDIFDNARKCTLDATTDAGKKVKELTDAITPHVQQFFDANPNLEKVVVPLGGTIFGTMMAWFVMPIVLRRIHKYSIQSPISALLGSSTKNDVSYETSLWSALEDPAKYLITFMAFSEMAGFTAPSISAYLPQAWRGAIVLSFVWFLHRWKTNFITKVAASSIDQTRLSAFDKISSLGLIALGVMALAEACGVAAQSILTVGGVGGVATAFAARDVLGNMLSGFSLQFSSPFKAGEYIKAGSIEGKVIEIGLTSTELMNPEQLPVTVPNSLFSSQVVVNRSRAKWRSNVTKIPIRIEDIEKVPAISEEIKVMLRSNPKVVLDSEAPAPYCYLSRLESSYGELTIGCNLTKMTKDEWLSTTQGILLEAAKIIKLHGVELGSTTQCC

SEQ ID NO: 180864 - protein, 75 aa, Oryza sativa
  Clone ID: PAT_MRT4530_78194C.1.pep
DGPTHVSPDDFVRWCGPYIEHASDIHEHRDDRVEDRSTWLDQGRTRSSRLGALAQYRTKVQRIRTRRPTCSWDGR

SEQ ID NO: 180865 - protein, 88 aa, Oryza sativa
  Clone ID: PAT_MRT4530_78195C.1.pep
GKFCLLLGGMGGNLFFRRRGGRRFSFSLNLGGLGLFKLLDQFGKEGVGFFPGGLGREVFGKLGGGYFNLPQEPPPGVKQGGGVYSQGN

SEQ ID NO: 180866 - protein, 62 aa, Oryza sativa
  unsure (1)..(62): unsure at all Xaa locations
  Clone ID: PAT_MRT4530_78196C.1.pep
VLNRQITGRERFQPMLRRPGALGLRMQCCQQLQDVXSRECRCADIHWXVRRYEESMPIPLEQ

SEQ ID NO: 180867 - protein, 81 aa, Oryza sativa
  Clone ID: PAT_MRT4530_78197C.1.pep
CHAGHRQGLPTDWETRQWRQHTAIEMVGVELHLHLRQHTQAFNTFYACQASVFCVGIVDQDNKCCTQGNKAYGPWITPSCN

SEQ ID NO: 180868 - protein, 83 aa, Oryza sativa
  unsure (1)..(83): unsure at all Xaa locations
  Clone ID: PAT_MRT4530_78198C.1.pep
DGVSRHSVQVYPRSWTAIMLTFDNAGMWNVRSNIWERHYXGEQLYISVVSPARSLRDEYNXPENALRCGKVVGLPLPPSYLPA

SEQ ID NO: 180869 - protein, 541 aa, Oryza sativa
  Clone ID: PAT_MRT4530_78199C.1.pep
MTTTALAGVARGEDPYVFFEWKVTYGTKTLLDAPQKVILINGEFPGPRINCSSNNNIVVNVFNQLDEPLLFTWNGMQHRKNSWQDGLAGTQCPIAPGTNYTYKWQPKDQIGSFFYFPSLGMHRAAGGYGGISVVSRLLIPVPFDPPADDHMVLIGDWYTKDHAAMAKMLDAGKSFGRPHGVVINGKSGKAAADPPMFTVEAGKTYRLRVCNVGIKASLNFRIQGHDMKLVEMEGSHTVQDMYDSLDVHVGHCLSVLVDADQKPGDYYAVASTRFIHEAKSVSAVIRYAGSSTPPSPAVPEPPAGWAWSINQWRSFRWNLTASAARPNPQGSYHYGQINITRTIRLMVSRGHIDGKLKYGFNGVSHVDAETPLKLAEYFNVTDGVFRYNQMTDVPPAVNGPLHVVPNVITAEFRTFIEIIFENPEKSMDSVHLDGYAFFAVGMGPGKWSAEERKTYNLLDGVSRHSVQVYPRSWTAIMLTFDNAGMWNVRSNIWERHYLGEQLYISVVSPARSLRDEYNMPENALRCGKVVGLPLPPSYLPA

SEQ ID NO: 180870 - protein, 782 aa, Oryza sativa
  Clone ID: PAT_MRT4530_7819C.1.pep
MSYFQAGGPCLWTPFATPPPFATVPTTRAGGEKELNPSCGAAKPAQPLDPFRHTHALSHSTRKTPFDTTTTTAKVPARYGDKGWGKKGFKSKLGAVKPAQPLDPFHHTHTLHDSTRKHPPALSRGLTTSPRLLLLFPRCRPPSSHPYRLAHAPSGRAAAFPGVAAASSPLACPPFRTETPGGAPPPATVALPPLFHPRPPLPRLPCAGRRRHHLSRHRNAVLFPSQATMSPVFRRNTAVPRRPLHPPRRNFPGRPRRRLLRRSGKVVLGIAFPPSEPRRGVIHAVLVSVQPLPAALVASSPAPVVVVVVLPSFPVIVAFIPPSSRSRPSSASVKCAAAAPSSSSSSPPRRQALRRPHLAFVQGSPPKSSPRLSSPSFPAVSAAPVRRCRSLASSRGAVFKRSHVPTGMITLRKREFRYLKQEDLTVTEYLHEFHRLAHYAPEDVETDEDKQEKFLQGLKDEIAVQLLLEEYEDFEKLADRAIQLESEHNRMKNCKRRIVSIPVFPCGNQRQRTEPLQITGSSVAHQEFLPQEDGHNADNNISNTNDEDTTNNRASCPISDHSNQACNVNIIHQGVDDSINDGTQNDNPSNCDSEKDSNGDCNYGTTDANAWGIRSRPSLWTPYATPTPFAKVPARYGDKGWRRKGVKSKLGAAKPTQLLDPFRHTHFLRHNTRKAWGIRSRPSLWTPYATPTPFAKVPARYGDKGWRRKGVKSKLGAAKPTQLLDPFRHTHFLRHNTRKAWGIRSRPSLWTPFATPTPFAKVPARYGDKGWRRKGVKSKPGP

SEQ ID NO: 180871 - protein, 83 aa, Oryza sativa
  unsure (1)..(83): unsure at all Xaa locations
  Clone ID: PAT_MRT4530_781C.1.pep
PSASSSRPSSPPRASPGASPAAPPGSLFPQLLGVPQHPRPLRPSLPXVKFPPPPVVGGTFWPACPVVLGFLSSSPIPPPRLTF

SEQ ID NO: 180872 - protein, 112 aa, Oryza sativa
  Clone ID: PAT_MRT4530_78200C.1.pep
MRRERVVDDVPHQQHRALTDDVDTSSMSGRERESSRSGWRMLMDEAKESKRPSMPIRRRRPVVLEAPLTQQQGRGAAKQVERLSIGDIQRLEWKALEAKIQCEIHVAPWCLH

SEQ ID NO: 180873 - protein, 98 aa, Oryza sativa
  Clone ID: PAT_MRT4530_78201C.1.pep
MTLLTTMLEVGEEAEAEAAAGDELLLETLQPTVVVAPRDLGKNRHTLGFRVASGVFVLEVSWPVDAGKVAAAAWDAPATLFRILRNRIALGINSVPES

SEQ ID NO: 180874 - protein, 77 aa, Oryza sativa
  Clone ID: PAT_MRT4530_78202C.1.pep
GTCICTVGLTTRAAAARHERHRRRGLLLRYDCHLASRARMGGAPWLYCIPGEHTHHTSLYVPPIVWLEFYCVNHSFY

SEQ ID NO: 180875 - protein, 136 aa, Oryza sativa
  Clone ID: PAT_MRT4530_78203C.1.pep
MGWTATIGRVPSGQLGTGGAKAGPGMAHGGGRCPATGQRQWPATGATAQMAVQRDDAGLGVGKATTAHAIDGRRRRGWGSSPAFGEKGAPAAIDDNQAATEVRAGLVSATAAIAQRGGGSSGGGARPEMGGGGGAR

SEQ ID NO: 180876 - protein, 152 aa, Oryza sativa
  Clone ID: PAT_MRT4530_78204C.1.pep
MAVTVGRVLLLLPSMPATAGVGVPNAANMSPPYGCFLLVRMCYFCCPASMFFTAKTPQPSLTDQRTFTDPMCARVLGEGPQARTLGVELVHLLPPGVVALASATPRTTISPTTANEKQQDTTLHSTTSLQTPCRSHSTLLVKHVLFIKVEYT

SEQ ID NO: 180877 - protein, 696 aa, Oryza sativa
  Clone ID: PAT_MRT4530_78205C.1.pep
MPPRCRRLPLLFILLLAVRPLSAAAASSIAAAPASSYRRISWASNLTLLGSASLLPGAAGVALTTPSRDGVGAGRALFSEPVRLLLPQDAAASASASRAATPASFSTRFTFRITPSPTYGDGLAFLLTSSRTFLGASNGFLGLFPSSSASDEGELRDVSTVAVEIDTHLDVALHDPDGNHVALDAGSIFSVASAQPGVDLKAGVPITAWVEYRAPRRRLNVWLSYSPSRRPEKPALSADVDLSGLLRTYMYAGFSASNGNGAALHVVERWTFRTFGFPNSSYAPPPTKYIGPMPPNNQPLPPPPSPSPSPPSPFPLPPPPHPNHRRRHLFYKVLGGVLGGMVLLGLVVVGSAVLLGRSVRRKNQEHAVASEDMGEATLSMEVARAATKGFDSGNVIGVGGSGATVYEGVLPSGSRVAVKRFQAIGSCTKAFDSELKAMLNCPHHPNLVPLAGWCRSKDELVLVYEFMPNGNLDSALHTLGGATLPWEARFRAVYGVASALAYLHDECENRIIHRDVKSSNVMLDAEFNARLGDFGLARTVSHGGLPLTTQPAGTLGYLAPEYVHTGVATERSDVYSFGVLALEVATGRRPAERGISVVNWVWTLWGRRRLVDAADRRLQGRFVADEMRRVLLVGLCCVHPDCRKRPGMRRVVSMLDGTAPLILVPDKMPPVLLQPVPNASSMNSADTANTAFFSCR

SEQ ID NO: 180878 - protein, 40 aa, Oryza sativa
  Clone ID: PAT_MRT4530_78206C.1.pep
VQDRGANFSHLFLVSFVGGAHARSNTSSGKGEGGERPGHP

SEQ ID NO: 180879 - protein, 28 aa, Oryza sativa
  Clone ID: PAT_MRT4530_78207C.1.pep
GTRLICISIRCAVDLLGLYSFNACLYVS

SEQ ID NO: 180880 - protein, 115 aa, Oryza sativa
  Clone ID: PAT_MRT4530_78208C.1.pep
MRQLGTVPPKERTPEAMRRLDRRAFRGGFRGVFRKQAKRQRSIDGLPIRLLVVEPSPGAPIGARVHPGRSPPHPLPVSRRGGARRRGGGMAGDSDSRCAGNCARSAVGRHLPACA

SEQ ID NO: 180881 - protein, 93 aa, Oryza sativa
  Clone ID: PAT_MRT4530_78209C.1.pep
KVRRRFLWAGTGDITGGKCKVNWAKTFRNVHLNDEQPNQIDWKFTSHGQYSASSAYQAQCIGAPSTTFDSLIWKGTGSLRSRSRNGGRNWPIR

SEQ ID NO: 180882 - protein, 148 aa, Oryza sativa
  unsure (1)..(148): unsure at all Xaa locations
  Clone ID: PAT_MRT4530_7820C.1.pep
QPKGPRLTGYTETVHGSTEADPSGHTNTVTTRTSERHHVTRRGNNNDERARRRRPGTMETKGEGTTSAAILGRRRDAAGATLGDAEARTKTMTGXAALDVARTTNENGXRRDERHDDRERREDDDDEDRGRRGGDVGSRQWLHGDEDG

SEQ ID NO: 180883 - protein, 101 aa, Oryza sativa
  Clone ID: PAT_MRT4530_78210C.1.pep
VTNCPDSTTRARKHSCTQARRRRRRCPLTGGGADDVVIEATTGGEDYELGAGSGNTDRKCGRRRLGLELAGGHTASTRNIRYERGPELGGGGGANATRRYR

SEQ ID NO: 180884 - protein, 216 aa, Oryza sativa
  Clone ID: PAT_MRT4530_78211C.1.pep
MAAHGGGGVEEDQAGSSSLCPPAAEAEAAAAEAEAAAAAAAIARAARPSRPGRDKRLGAHPLKHRRFRAGGKAAGAAGAREVGEATTVAEATATGPPKGSDEDDEARYICGGWTSDDGRMSCGYSSFRGRRANMEDFYDIKSSKVDDNQINLFGIFDGHGGSHAAEHLKKHLFENLLKHPSFITDTKSAISETYRKTDSDFLDAETNINREDGATA

SEQ ID NO: 180885 - protein, 416 aa, Oryza sativa
  Clone ID: PAT_MRT4530_78212C.1.pep
MAAHGGGGVEEDQAGSSSLCPPAAEAEAAAAAAAIARAARPPRPGRDKRLGVRHPLKHRRFRAGGKAAVAAGAREVGEATTVAEATATGPPKGSDEDDEARYICGGWTRSSNLQLGLMLFRLLIGTDLSFARLPSIVDNICSCIQACCDDGRMSCGYSSFRGRRANMEDFYDIKSSKVDDNQINLFGIFDGHGGSHAAEHLKKHLFENLLKHPSFITDTKSAISETYRKTDSDFLDAETNINREDGSTASTAIFVGNHIYVANVGDSRTVMSKAGKAIALSSDHKPNRKDERKRIENAGGVVTWSGTWRVGGVLAMSRAFGNRFLKRFVVAEPEVQEQEIDDDLEFLILASDGLWDVVSNEHAVAFVKAEEGPEAAARKLAEIAFARGSTDNITCIVVKFLHAKMAVDAASSSERS

SEQ ID NO: 180886 - protein, 225 aa, Oryza sativa
  Clone ID: PAT_MRT4530_78213C.1.pep
MSGGGGGRKAAVTGGEEAEVEALLRAAQDAVMLKLQANSHLVSSSSSATAPNLPPSLDHPAAAAAADPLDADLARRFDALRSHRPPDPKPKQPDAPSAAAAGGMDELEARFAALKGAAGPEKETRVRLEDLGGESDEDEDDEVDKVMRWAMDAARLDVATAGAGKAKSTKKDDDEEEEEKDQTSSSVSSEDEEEEEEEKLEKERERKRKEMMSKNKSKTKWFSLF

SEQ ID NO: 180887 - protein, 67 aa, Oryza sativa
  Clone ID: PAT_MRT4530_78214C.1.pep
MEQNIFSRDSQGVLILFNYEMMQDARKNVVGSAAGTSAGKRGWEAAAPAPVKKIRLWEEEKEVAMGG

SEQ ID NO: 180888 - protein, 160 aa, Oryza sativa
  Clone ID: PAT_MRT4530_78215C.1.pep
MTSLASSQAAGGSAGGDLDYGVGGLILDSAVRQHHVHRWLRLLVGGGGQQAQRIWQRLSPGRVDPPSAGSEGRIRPHLQRVQAVTSGVANDLFPLVLVNSAATDLAVGSSAAADLALGSSATVNLTGSPPLCAHGSGGKEGVGNSEGVHAYLLKAVKYNN

SEQ ID NO: 180889 - protein, 34 aa, Oryza sativa
  Clone ID: PAT_MRT4530_78216C.1.pep
HYQHTAQTPRTGGYFTTIWVSFAPARQKRLGHQG

SEQ ID NO: 180890 - protein, 122 aa, Oryza sativa
  unsure (1)..(122): unsure at all Xaa locations
  Clone ID: PAT_MRT4530_78217C.1.pep
XXRFGPRVVVKLRERERERSVSLLSGSRSGRCWRSCGTTGGRSSTGDRPRXAPXGRYNPPPCHXQXWRRRSERNGVQXDALXADDPXDPGDAVVFLPXTXTTXTPGLXVWXTCSPRGATSPP

SEQ ID NO: 180891 - protein, 420 aa, Oryza sativa
  Clone ID: PAT_MRT4530_78218C.1.pep
PGLQESARGNCLAPRGSYIRVLGGKAIGNKAAGDRRLERGNLALKNSIETKTPVRVIHGFKGHSKGEASHSKSKQISTYIYDGLCMVVDYWKEGPEGSMVYKYKLQRIPGQPELALHIIKATRKSKVREGVCVPDISQGRERIPIPAINTIDDTQPTAFKYTTEVIYPHSYAKEPLKGCDCTNGCSDSNRCACAVKNGGEIPFNSNGAIVEAKPLVYECGPSCRCPPTCHNRVSQHGIKIPLEIFKTGNKGWGVRSLSSISSGSFVCEYAGEVLQENGDEHVETDEYLFDIGHHYHDEVWEDPKFEGILGLESSTSKTTEDTEGSKTTEDTEGSTIDASKCSNVGRFINHSCSPNLYAQNVLWDHDDMKKPHIMFFATENIPPLQELTYDYNYGKVEDKNGKEKVKPCFCGSPDCSRRLY

SEQ ID NO: 180892 - protein, 695 aa, Oryza sativa
  Clone ID: PAT_MRT4530_78219C.1.pep
MSTAIIIVSTTTSSSFFFFLLLMITTGGGCKPRERDALLAFKEGIVKDPAGLLSSWQRGGHYDDDDDQLLEEDCCQWRGVRCSNLTGHVVKLNLRNDYADVGTGLVGEIGHSLISLEHLRYLDLSMNNLAGPTGHVPEFLGSFRSLRYLNLSGIVFSGMVPPQLGKLSNLKFLDFSGMLPSSMAPFLYISDASWLAHLSNLQYLNLNGVNLSTVLDWPHVLNMIPSLKFLSLSSCSLQSANQYPTQINLRQLEILDLSNNYELSDQAESSWIWSLTSLKYLNLSSTSLYGEIPQALGNMLSLQVLDFSYNMSVSKKGNMCIMKANLKNLCNLEVLDLDYRLAYGEISEIFESLPQCSPNKLKELHLANNNLTGNLPKLVGRLTSLVTLDLFNNNITGQVPSEIGMLTNLTNLYLHYNCLDGVITEEHFANLTSLKSIYLCYNYLEIVVDPEWLPPFRLEKAYFASTSMGPSFPSWLQSQVDILELAMSDAGINDTFPDWFSTTFSKATFLEMSQNQIAGGLPTNMENMSLEKLYLDCNHIADRIPRMPRNLMLLDISYNLISGDVPQSICELQKLNGLDLSNNLLEGEFPQCSLMSRGWTKLSFLDLSWNKFSGTLPTWIGNFNKLEFLQLKHNMFSGSIPDSITNLGKLSHLDLASNGLSGPLPQHLSNLTGMMINHDTTNMKRDYLDVTTNLL

SEQ ID NO: 180893 - protein, 572 aa, Oryza sativa
  unsure (1)..(572): unsure at all Xaa locations
  Clone ID: PAT_MRT4530_7821C.1.pep
MLATAFQLLQNWNNPAGATNVQGLKDELAVQLLIEDYEDFEKLVDKAIQLESEHNRMKNCKRRIVNIPVFPCGNQTQRTEPLQITGSSVAHQEFLPQEDGHNADNNISNTNADDTTNNHGSCPISDHSDQACNVNSIHQDIDDSINEGTQNDNPSNFDSEKDTNGDSNYGTTDANVSKDFQPPIPTPSQNDRSQTNSSVKKTLICYNCKEPGHFSRDCPQPKRNLRHHSGHYARRRQVTRLVVTGANAIPVSLKGNRLKYHIVTRSIHNSRSEEYLVDKGVDAEDMNHEKPSQAVPSGEVCWTSRLRAQAERRPPARAAHPPLPPRQHAGRPCRRLPLRRSGVAATVPPPAACAALPEHRLSSSLPLPAPERRPLPRPCHGVAHIXPEHRRAAPASPSASPEFPRSVLPPPVRRRPHHHHLQHRXASGVFHAVLVSMQLPPAALVASSPVPVIVLIVVAFVPPSSRSRSSSAFRQXAAAAPSSSSSSAPRRQALRRRRLAFVQGSPPKSSPRLSSPSFPAVSAAPTSKPCRRRSHCLPAAGRTVEASPVRPPEQLRSDHHYPTGQTARTTAV

SEQ ID NO: 180894 - protein, 949 aa, Oryza sativa
  Clone ID: PAT_MRT4530_78220C.1.pep
MSTAIIIVSTTTSSSFFFFLLLMITTGGGCKPRERDALLAFKEGIVKDPAGLLSSWQRGGHYDDDDDQLLEEDCCQWRGVRCSNLTGHVVKLNLRNDYADVGTGLVGEIGHSLISLEHLRYLDLSMNNLAGPTGHVPEFLGSFRSLRYLNLSGIVFSGMVPPQLGKLSNLKFLDFSGMLPSSMAPFLYISDASWLAHLSNLQYLNLNGVNLSTVLDWPHVLNMIPSLKFLSLSSCSLQSANQYPTQINLRQLEILDLSNNYELSDQAESSWIWSLTSLKYLNLSSTSLYGEIPQALGNMLSLQVLDFSYNMSVSKKGNMCIMKANLKNLCNLEVLDLDYRLAYGEISEIFESLPQCSPNKLKELHLANNNLTGNLPKLVGRLTSLVTLDLFNNNITGQVPSEIGMLTNLTNLYLHYNCLDGVITEEHFANLTSLKSIYLCYNYLEIVVDPEWLPPFRLEKAYFASTSMGPSFPSWLQSQVDILELAMSDAGINDTFPDWFSTTFSKATFLEMSQNQIAGGLPTNMENMSLEKLYLDCNHIADRIPRMPRNLMLLDISYNLISGDVPQSICELQKLNGLDLSNNLLEGEFPQCSLMSRVSFFRASNNSFSGNFPSFLQGWTKLSFLDLSWNKFSGTLPTWIGNFNKLEFLQLKHNMFSGSIPDSITNLGKLSHLDLASNGLSGPLPQHLSNLTGMMINHDTTKYEERLSGCDYKSFVNMKGQELQYNQEKVTVVTIDLSSNFLTGVIPEGIVSLDGIINLNLSWNNLNGKIPYMIGAIKSLESLDLSKNNFYGEIPQSLSDLTYLSYLNLSYNNLTGRVPSGTQLCSLYDQNHHLYDGNDGLCGPPLQKSCYKYDASKQGYQIRSKQGFHIGSFSIGVTVGFMAGLWVVFYILLFKKSWRIAYFCFLDNMYDEVYVKVIVVWAKLTGRTDERLRMSQVAWSSIDSDEYYE

SEQ ID NO: 180895 - protein, 69 aa, Oryza sativa
  unsure (1)..(69): unsure at all Xaa locations
  Clone ID: PAT_MRT4530_78221C.1.pep
FFFFFKPKISLMGISRCTSIHCNQNQXAHSTHSNSMVQSITRHSISSGTACIIMVSPPITXIYPPAPSF

SEQ ID NO: 180896 - protein, 567 aa, Oryza sativa
  Clone ID: PAT_MRT4530_78222C.1.pep
MDDPSSTSKGKRKRGRKHKAAAENHAPASPVASTAADNPAPAAAGRRGRKSRRHEAPADADGSRPPSPPRRGEAKPVANGGGDAVVEAGGPVGWDEVARVVPSMDAVVKVFCVHTEPNFSLPWQRKRQYSSSSSGFIIGGRRVLTNAHSVEHYTQVKLKKRGSDTKYLATVLAIGTECDIALLTVDDDEFWEGVLPVEFGSLPALQDAVTVVGYPIGGDTISVTSGVVSRIEILSYVHGSTELLGLQIDAAINSGNSGGPAFNDRGKCVGIAFQSLKHEDAENIGYVIPTPVIMHFIQDYEKSGEYTGFPILGIEWQKMENPDLRKAMGMKPDQKGVRVRRVEPTAPESGCLQPSDIILSFDGIDIANDGTVPFRHGERIGFSYLVSQKYTGEKALVKVLRNSKVHEFKIKLATHKRLVAAHVKGRPPSYYIVAGFVFAAVSVPYLRSEYGKDYEYDAPVKLLVKHLHAMAQSPDEQLVVVSQVLVADINIGYEEIVNTQVLAFNGQPVKNLKNLVSMVENCKDEFLKFDLEYDQIVVLETKTAKAATQDILTTHCIPSAMSDDLKT

SEQ ID NO: 180897 - protein, 399 aa, Oryza sativa
  Clone ID: PAT_MRT4530_78223C.1.pep
MESPADDALPALPPIRTALSTPSPPPTTVEVEVSGSPSPPKEEVVAEADAEEEEPSTPTSEESRLRPPAVCPPAPRKPPPPPRFSLLAARRRDLAAMNNLLTDSFELPRGGSSRDGDIEMGMQADPSDNLKGFLKKVDAIESLIAKLTNLLHKLQTANEESKAVTKARDMKAIKQRMEKDIDEVGKIARMAKTKVDELEKDNLSNRQKPGCGKGSAVDRSREQTTGAVKKKLKERMDDFQVLREAIRQEYRDVVERRVFTVTGSRPDEETVDNLIETGRSEQIFQEAIQQQGRGQILDTVAEIQERHDAVRDLERKLLELQQIFMDMAVLVDAQGDMINNIETHVSNATNHIQQGVSALQNAKKLQKNSRKWMCYAIILLLIIVVIIVVAVIQPWKKGA

SEQ ID NO: 180898 - protein, 321 aa, Oryza sativa
  Clone ID: PAT_MRT4530_78224C.1.pep
MNNLLTDSFELPRGGSSRDGDIEMGMQADPSDNLKGFLKKVDAIESLIAKLTNLLHKLQTANEESKAVTKARDMKAIKQRMEKDIDEVGKIARMAKTKVDELEKDNLSNRQKPGCGKGSAVDRSREQTTGVHKAMNSCSSTMLAKFYRAVKKKLKERMDDFQVLREAIRQEYRDVVERRVFTVTGSRPDEETVDNLIETGRSEQIFQEAIQQQGRGQILDTVAEIQERHDAVRDLERKLLELQQIFMDMAVLVDAQGDMINNIETHVSNATNHIQQGVSALQNAKKLQKNSRKWMCYAIILLLIIVVIIVVAVIQPWKKGA

SEQ ID NO: 180899 - protein, 80 aa, Oryza sativa
  Clone ID: PAT_MRT4530_78225C.1.pep
MAKATRWHAKQGKTLINTKKTQRAGVDRRAHTSAAPRGGHTVDQAHRGLGGTVDPDHGTGPWDRRLGSAKSRSNGQGRPG

SEQ ID NO: 180900 - protein, 46 aa, Oryza sativa
  Clone ID: PAT_MRT4530_78226C.1.pep
STGCQKFFLSEKKETKNPSWEIVLAFTVHKRGSKNAGNGNMEETAC

SEQ ID NO: 180901 - protein, 74 aa, Oryza sativa
  unsure (1)..(74): unsure at all Xaa locations
  Clone ID: PAT_MRT4530_78227C.1.pep
HAIRRVHHHRHLVINGXXXRRASGRAXHXYAXRQYMQRRIEXGSYSFPLERARRXRAARXWRRKXAGRGGESTA

SEQ ID NO: 180902 - protein, 785 aa, Oryza sativa
  Clone ID: PAT_MRT4530_78228C.1.pep
MAVLLRPAAAIAGGRQVWPVAEDHHRQLRDEAEAEAASQRLVEAVARGDAREAGELLASGRADVNYAGVVWLKARRVAEAALRDGAAAELRAAHEEIRADVSPLFLAAGNGDAALVRALLADELARATAMRASAKGADVNGKVFRGYPATAAAREGRAEVAALLVRAGASQPACEEAVVEAALQGQAALAVIFMGSDLVRPRVAVHALVSAAARGFVDVVDSLIKCGADPNATSRVLLRSLKPSLHANVDCTALFAAIVSRQIAVVRQLLQAGVKRDTKVRLGAWSWDTATGEELRVGAGLADPYDAVWCAVEYYESTGAILRMLLQNGYSSGATHLGRNLLHHAVLCGSAGAVQTLLASGVDHEVAVKTSRSSRSRPVHMAARLGQPEILEMLIGKGCDVNARAEGGDVAAILAARHKREDCLRILVSAGADVALLNSAGESAASVACSGGWKAGFERAVLGVIRSGTIPRSSDRNVFSPMMFTARCGDAAAMEVLLAQPDVDVDEQDVDGCSPIMAAAKEGNVDAFRALVFAGANVKLSNKRGETAIGLAQQSKKRDLFEQVMLEFALEKGMPGGFYALHCASRRGDTAAVRHLASAGCDVNIPDGDGYTPLMLAAREGHAAVCELLISYGARCDTRTPRGETALSLARATAAFNKAEDVIMDELGRQLVLGGAHVKKHTKCGRGKPHGKSLRMVAAAGVLRWGGSGRRNVVCREAELGGSSAFQLHRQRRGCDAYEPGLFRVATATGREVHFVCQGGEEEAELWVRGIRAVTRAVYGKRGKE

SEQ ID NO: 180903 - protein, 92 aa, Oryza sativa
  Clone ID: PAT_MRT4530_78229C.1.pep
MTKRTSRALARPTTEASVAVCAARAGANSSSLGHARGIVANAPAGGLSISLEPAAAAKTGSELTAAEPTPVSATKIQEDDDSRFKKQRKLSR

SEQ ID NO: 180904 - protein, 160 aa, Oryza sativa
  Clone ID: PAT_MRT4530_7822C.1.pep
MAAAAAASRALWACRTASYLRISSFPRAFSTVLKDLKYADTHEWVKVEGDSATIGVTDHAQDHLGDVVYVELPEVGSTVSQGTNFGAVESVKATSDINAPVSGEIIQVNDELSEKPGFINGSPYEKGWIIKVKISDPSELNSLMDDEKYKKFCEEEDGKH

SEQ ID NO: 180905 - protein, 83 aa, Oryza sativa
  Clone ID: PAT_MRT4530_78230C.1.pep
FQMAPHPERVFSWSTDHTAASTPSSVSSTMGSTRLGLDPDVHQLWGLSSYYLRHRSPLRVVGSCSSPLWPCVVNSSFSQSRPL

SEQ ID NO: 180906 - protein, 93 aa, Oryza sativa
  unsure (1)..(93): unsure at all Xaa locations
  Clone ID: PAT_MRT4530_78231C.1.pep
GGKRGRQKRETEAGQKTNGGGGXKGGXSPPKXRXXXHQTSPALLARWRSAHLPSVALXPDGDGVRRPLPVTRDCLAQGGSREREISVSRTRGR

SEQ ID NO: 180907 - protein, 79 aa, Oryza sativa
  Clone ID: PAT_MRT4530_78232C.1.pep
RSFFQQCSSRALKKASLPSGRDVFPFLGADRLTVTLSIRTLMVPILIFRLKITTKPTDLAPGLWCKCCGLQRSSELVEP

SEQ ID NO: 180908 - protein, 1456 aa, Oryza sativa
  Clone ID: PAT_MRT4530_78233C.1.pep
MEDKDLVFECILVWHSMYVVTWGITVGIRAGAMPPRVSVWLANRGRGRGGGRGRGRGHYNEEVENTQDNEEVGNNSVAESPIPNRGGRGRGRAGGRGRGCGRGRHNEAASSNQKEDEHMEEEGGSHSAAVSDDAPRAARGMTLTRWTSMRLDTFDGSGTPVNAADWLRKMEKYMRGSRMTPEEKVTFMPFQLTGQADIWWDGVVEAWNPDRGAITWEVFLQQFRAKYYPESFRDKMSDELNNIQQGSKTVDEYEREFSSIVRFVPSVANDEREKARKFFRGLNARYREVMGRNPPTIYLNAVEEAQGMEVELQITTAQKNRFGNVTGNEQKRAHQEGGENSQRPPFKKYKQNQMMTTYPLPYQQFTHNYPPPPLPGQYWPMPQSFAPRAPLQLPAPPMAHPSASAPPHQQVSASTTPAIAGVYNMPAASSLGRPDVVTGTLLVDSHDALVLFDSGATFSFVSIEFAKRANLFSQEVSRSVQVSSPGGIISSSVVCLGCAISIDGEEFVANLIVIPLPLFDVILGMDWLNRYRAVISCFWKTITLEAPSGEEMVFQGSAPPHSLFVMSRLFPGQRAVKTGLLWALAEKSSKPLVIEDVPVVRDYPDVFPAELPGMPPERDVEFRIDLVPGTQPISRAPYRLARPFQEELKKQLDDLLSKKLIRRSVSPWGAPVIFTEKKDGSWRMCVDYRALNAATIKNKYPLPRIEDLFDQLKGAKVFSKIDLKSGYNQIRVREEDIEKTAFSTRYGHYEYRVMSFGLTNAPAYFMEAMNSMLHSFLDNFVVVFIDDILIYSKDVEEHERHLRMVLGTLRENKFYAKLKKCEFWLPEVAFLGHVINQQGISVDPSKVLSVVGWERPTNVKDVRSFLGMAGYYRRFVKDFSIIAKPMTMLTHKDVKFQWTDQCECSFQQLKQRLVTAPVLTLPQPGKRFTVYSDASRVGLGCVLMQEGNVIAYASRQLKKHEQNYPTHDLELTAVVFALKIWRHYLYGESCDIFPDHKSLKYIFTQKDLNLRQRRWLELIKDYDLNIQYTPGKANVVADALSRKVVSPTVSCLITDFERMDISYCYVGVASTESRVILESVIPQRVLEAQQHDRLLQQVKKRVKEGKTGDFTLDSSGAVRFHGRLCVPQKAKVKEEILREAHRTPYTVHPGENKMYHDLKKIYWWKRMKVDVAKYVASCGVCQRVKAEHKSPAGKLQSLEVPVWPWDDIAMDFVVGLPRTPRGKDAIWVVVDHLSKVAHFIPIRTTYSASDLAPIYSREVVRLHGVPRSIVSDRDAKFSSKFWESVQEAFDTQLKFSTAFHPQTDAQSRQKSYADVRRRELEFEVGDQVLLKVSPTKGVVRFGTKGKLSLRYIGPFSIVERVGILAYRLELPESMKEPMTIEQDLTFESHPVRILEESERVLRHRTIKYVKVLWTHQTEREATWELESQMREKYPELFTSGVEGSNVGGVESEYRMS

SEQ ID NO: 180909 - protein, 644 aa, Oryza sativa
  Clone ID: PAT_MRT4530_78234C.1.pep
MISLFRRRHGLPFSTLHTPAGDVAATPPSPLDATAVLETLSLYANDWRRALEFFHWSASPDGANVPPTPATVARAVDVLGKHFEFPLATSLLVSHHDPGRADPSFLRPALRSLLNRLAAANLIDDAIRAFDSTAGSIGLRDEASFHALVDALCDHRRVDEAHHLCFGKDPPPFPPVTKTYNLLLRGWAKTRAWARLRQLWFDMDSRGVAKDLHSYSIYMDALAKSGKPWKAFKVFKEMKQKGMAIDVVAYNTAIHSVGLAQGVDFAIRLYRQMVDAGCKPNASTFNTIVKLLCKEGRFKEGYAFVQQMHKFGIEPNVLTYHCFFQYLSRPQEVLGLFEKMLERGCRPRMDTYVMLIKRFGRWGFLRPVFIVWKAMEEQGLSPDAFAYNSLIDALLQKGMVDLARNLYLLLGLYHGNEMFQCLAAENLSVGGRLATYVAGVGIRLVADSLTRMVSPAASHGHRRSAGNWPGKSASTDTQRACVALPTYAPLDTSLRRRAKQFAVVATLPAGPGVLISLGVIIEKLLCAPENAGIRLDRQLHEAINNKEIMRDSKAEQSLNTARLMNKHCTSDGHCNSGKVQRPVVQAEAGAAAKQQQQNQEQETAPRQQEKTSSTATATMTTYPDILDIAGMDYSPATRKPPIHN

SEQ ID NO: 180910 - protein, 181 aa, Oryza sativa
  Clone ID: PAT_MRT4530_78235C.1.pep
KSGQAATSAAGEIPESGRTSARRAARPTAKTRPRAASRPRPGRLRLCRPPPGRRDRGTETAAQRAAPTPRRRRRPAGGGSGRQSTRGGGRTSGGRRGTQPARRRAAAGGTPPAAGRRTAPRPCRRHRRSIRQRDGLRRRLQRWGGSLSAPWLHAGDSARHRIWVGPRRVRWIWGRKVGEGR

SEQ ID NO: 180911 - protein, 1405 aa, Oryza sativa
  unsure (1)..(1405): unsure at all Xaa locations
  Clone ID: PAT_MRT4530_78236C.1.pep
THGRAGDGRGGGATAHPRAGRCVCASTFDVSGTPVNAADWLHKMEKYMRGSRMTLEEKVTFMPFQLTGQADIWWDGVVEEWNPDRGAITWEVFLQQFRAKYYPESFRDKMSNELNNIQQGSKTVDEYEREFNSIVRFVPNVASDEREKARKFSRGLIARYREVMGRNPPTIYLNAVEEARGMEVELQITTAQKNRSGNVTGNEQKXPIREGVRTRSDHLSRSTNKIRSLNHHPNLGSGVXQPNAASRPTKSQLIHPVPGKGLFCFKCGKNHHSAECGXLRHVVGVARPSGSTTPAMAGVYNMPAASSLGRPDVVADTLSVDLHDALVLFDSGATFSFVSIEFAKRANLFSQEVSRSVQVSSPGGIISSSVVCLGXAISIDGEEFVANLIVIPLPLFDVILGMDWLNRYRAIISCFXKTITLESPSGEEMVFQGSAPPHSIFVMASLLIEDVPVVQDYPDVFPAELPGMPPEHDVEFRIDLVPGTRPIXRAPYRLARPFQEELKKQLDDLLSKKLIRRSVSPWGAPVIFTEKNDGSWRMCVDYRALNATTIKNKHPLPRIEDLFDQLKGVKVFSKIDLQSGYNQIRVREEDIEKTAFSTRYGHYEYRVMSFGLTNAPAYFMEAMNSMLHSFLDNFVVVFIDDILIYSKDVEEHERHLRMVLGTLRENKFYAKLKKCEFWLPEVAFLGHVINXQGISVDPSKVSSVVGWERPTNVKDVRSFXGMAGYYRRFVKDFSIIAKPMTMLTHKDVKFQWTDQCEHSFQQLKQRLVTAPVLTLPQPGKRFTVYCYTSRVGLGCVLMQEGNVIAYASRQLKKHEQNYPTHDLELAAVVFALKIWRHYLYGESCDIFTDHKSLKYIFTQKDLNLRQRRWLELIKDYDLNIQYTPGKANVVADALSRKVIPPTVSCLITDFERMDISYCYAGVASTESRVILESAIPQQVLEAQQHDQLLQQVKKRVKEGKIGDFTLDSLGAVRFHGRLCVQQKAEVKEEILREAHRTPYTVHPGENKKYHDLKKIYWWKRMKVDVAKYVASCGECQRVKAEHKSPIGKLQSLEVPVWPWDDIAMDFVVGLPRTPQGKDVIWVVVDHLSKVAHFILIRITYSASDLAPIYTREVVRLHSVPRSIVYDRDAKFSSKFWDSVQEAFDTQLKFSTAFHPQTDGQSERTIQTLEDMLRSCILSWKGSWEDHLPLVEFAYNNSFHASIRMAPYEALYGRKCRSPLCWDSIGERAMLGPDWVQQTTERIAKIRQHMLAAQSRQKSYADVRRPELEFEVGDQVLLKVSPSKGVVRFGTKGKLSPRYIGPFLIVERVGILAYRLELPESMKGVHDVFHISVLRKYLRDPEHHITIEPVTIEQDLTFESRPVRILVESERVLRHITIKYVKVLWTHQTKREATWELESQMREKYP

SEQ ID NO: 180912 - protein, 792 aa, Oryza sativa
  Clone ID: PAT_MRT4530_78237C.1.pep
MEDEDMDRLFVSNDAARATRGMTLTRWTSVRLDTFDGSSTPIDAADWLRKMEKYMSGSRMTPEKFRAKYYPESFGDMMSDELNNIQHGSKTVDEYEREFSNILCFVPSVASDEHEKARKFFRGLNARYTKVMGRNPPTVYLNTVEEARGMEMMTTYPLPHQQFTHNYPPLSLPGQYWSTPQFIAPRTPLQLPAPPMVHPSALAPPQQQASGSMAGVYNMPAAYSLGRPDVFTGTLSIDSHDALVLFDSGATFSFVSIKFAKRANLFSQEVSQSVQVSSPGGIISSSVKTITLEAPSGDDMVFQGSAPPHSLFMMARLFPRQLAIKTGLLWALAEKASKPLLIEDVPVVRDYPDVFPAELLGMPPERDVEFRIDLVPVIFTEKKDGSWRMCVDYRALNAATIKNKYPLPCIEDLFDQLKGAKVFSKIDLQSGYNQIRVREGDIEKTPFSTRYGHYEYKVMSFGLTNALAYFMEAINCMLHSFLDNFVVVFIDDILIYSKDVEQHERHLRMVLGTLRENKFYAKLKKCEFWLPEVAFLGHVINQQGYYRRFVKDFSIIAKPMTMLTHKDVKFQWTNLCERSFQQLKLRLDLNLRQRRWLELIKDYDLNIQYTPGKANVVADALSRKVVPLTKAEVKEEILREARRTPYTVHPGKNKMYHDLKKIYRWKRMKVDVAKYVASCGVCQRVKAEHKSYAGKLQSMEDPVWSWDDIAMDFMVGLPRNPRGKDAIWVVVDRLSKVAHFIPIRTTYSSSNLAPIYTRDVVRLHGVCRSIVSDRDVKFSSKFWESVQEPFDN

SEQ ID NO: 180913 - protein, 775 aa, Oryza sativa
  Clone ID: PAT_MRT4530_78238C.1.pep
MAHPSASAPPHQQASGSTTSAMAGVYNMPAGSSLGRPDVITELLGMPPECDVEFRIDLVPSTRPISRAPYRLARPFQEELKKQLDDLLSKKLIRWSVSPCGAPVIFTKKKDGSWRMCVDYRALNAATIKNKYPLHHIEDLFDQLKGAKSYVFWADQSFGYSMETMNSMLHSFLDKFVVVFIHDILIYSKDVDEHKHHLRMVLGTLRENKFYAKLKKCEFWLPEVVFLGHRVKAEHKSPAGKLQSLEVHVWSWDDIAMDFVVGLPLTPQGKDAIWVVVDLLSKVAHFIPIRTTYSVSDLAPIYTREVVRLHGVPRSIVSDRDAKFSSKFWESVQEAFDTQLKFSTAFHPQTDGERAMLGPDWVQQSTKQIAKIRQHMLAAQSRQKNYTDVRRRELEFKVGDQVLLKVSPTKGVVRFGTKDEYLLTGKSTSLECLDTFAIGIVEVFGGQYLRQPTSEDIEHILQVNESRGFPVRGEAPRVHFSVNGNEYNNGYNLADGIYPDWVSFMKSISLPQTGKHKLFAKRQEGARKDVERAFGVLQAHSNIVRRPAKKWKRKSVGKIMLAFVILDNMIVEDEREDAICDIDLNRIPRTSIVLPPEVTSGTCSAQYVQIMVLHFLKRESKSWGRNGVGVVAEATILGLTGTFTGSPPPAMVNKGVRESRGGATASEVVWWWRRGSGGTGPAVDYGGRGDSGGVRRKEDSSGERRSEEAAGIGAGPVVDCSGSGDSGGARRQQGFAWRSHRAGGKSGGEESVGLVMISYSKEDKRMRLDEIADER

SEQ ID NO: 180914 - protein, 408 aa, Oryza sativa
  Clone ID: PAT_MRT4530_78239C.1.pep
MRAALLHGHGGGAAAAAAAGWRPSAGDADVKRTAGGDGGAAGPRTVCVTGGISFVGFAVVDRLLRHGYTVRLALETQEDLDKLREMEMFGEDGRDGVWTVMANVTDPESLHRAFDGCAGVFHTSAFVDPGGMSGYTVSAPNSVPNLKILATTTPTYVMCSLMLSQKSLRDRVYYLIRTGNQKHMASLEAKAAEQVIEACVRTESVRKCVFTSSLLACVWRQNYPHDRRFPTIIDENCWSDESFCRDNKLWFALGKTAAEKTAWRAARGRDLKLVTVCPALVTGPGFRRRNSTASIAYLKGARAMLADGLLATASVETVAEAHVRVYEAMGDNTAGGRYICYDHVVKRPEEFAELERQLGIPRRAAAAAAAQDSGDRPARFDLCRQKLARLMSTRRRCTYDDYYSVAFD

SEQ ID NO: 180915 - protein, 170 aa, Oryza sativa
  Clone ID: PAT_MRT4530_7823C.1.pep
MAAAAAASRALWACRTASYLRISSFPRAFSTVLKDLKYADTHEWVKVEGDSATIGVTDHAQDHLGDVVYVELPEVGSTVSQGTNFGAVESVKATSDINAPVSGEIIQVNDELSEKPGFLTICFCNFTQINGSPYEKGWIIKVKISDPSELNSLMDDEKYKKFCEEEDGKH

SEQ ID NO: 180916 - protein, 705 aa, Oryza sativa
  Clone ID: PAT_MRT4530_78240C.1.pep
MPQSFSLSAMGRRTWQWHAIAALGVACAAAAAVAADRRAFSVTSAAGGGAAAAAAVVAATPEEVGILRKVANFLWQTDGNSYHHVWPEMELGWQIVLGSLIGFFGAAFGSVGGVGGGGIFVPMLTLIIGFDPKSSTAISKCMIMGAAVSTVYYNLKLKHPTLDMPVIDYDLALLIQPMLMLGISIGVIFNVLFPDWLVTVLLIILFLGTSTKAFLKGVETWKKETIIKREAAKRLEQTSEEPEYAPLPTGPGAVADAKRPSDEAASLMKNIYWKEFGLLAFVWMAFLVLQVTKNYTATCSSWYWILNLLQLMFLFIPKKWKPLKITYSKSFTLYGIKIPVSVGVTMYEALGLMSGKRVLSSKGNEQTTLKFHQLCIYCFFGITAGVVGGLLGLGGGFIMGPLFLELGIPPQVSSATATFAMMFSSSMSVVEYYLLNRFPVPYALYFVIVAFIAAIIGQHVVRRLINWLGRASLIIFILAFMIFVSAISLGLSLEITGAKGEKRTFCVFLQGAMEPSSLSLRLKAAIYDLFNSNSLQTYVPFRIRHINGGGNPRPRQEDPGLTDAEFKKAMEQLNKQAYRSLDPHKMVESNRGGRNHAKSARSKPAPNNTEEEKACTICLETFLAGEQVVATPCNHIFHQECITPWVKGHGNCPVCRFALCERNTVSDNSQSGVGEVEVDLDLLEMMRAMEEIFSRVTFSNFMPYN

SEQ ID NO: 180917 - protein, 1546 aa, Oryza sativa
  Clone ID: PAT_MRT4530_78241C.1.pep
MHRRSGEQVSGTSAFDILHREKAAIRRCDFTMAGFADALGPDKFTGVHFKRWQIKVTLWLTAMKCFWVSTDKPMGVLNADQQKEFDEATTLFVGCILSMLGDRLVEVYMHMTDAKESWDAQNTKFGATDASNDLYIMEQFHDYNMADNRSVVEQAHEIQTMTKELELLKCVLPDKFVAGKEGEKAEKNRKEGKKGKFDRRREIWGIWYVVTWGVTVGIRAGGMPPRVSVRLANRGRGRGGGRGRGRGHHNEEVENTQDNKEVGNNSVAESPIPNRGGRGRGRAGGRGRGRGRGLHNEAASSNQMEDEHMEEVEGGSHSAAVSDDAPRAARGMTLTRWTSMRLDTFDGSGTPVNAADWLCKMEKYMRGSRMTPEEKADIWWDGVVEAWNPDRGAITWEVFLQQFRAKYYPESFRDKMSDELNNIQQGSKTVDEYEREFSSIVRFVPSVASDEREKARKFFRGLNARYREVMGRNPPTIYLNAVEEARGMEVELQITTAQKNRSGNVTGQGLICFKCGKNHHSAECGFTRACRGCGKAGHMELMMTTYPLPYQQFTHNYPPPPLPGQYWPMPQSFAPRAPLQLPAPPMAHPSASAPPHQQVSASTTPAMAGVYNMPAASSLGRPDVVTGCAISIDGEEFVANLIVIPLPLFDVILGMDWLNRYRAVISCFWKTITLEAPSGEDMVFQGSAPPHSLFVMSRLFPGQRAVKTGLLWALAEKSSKPLVIEDVPVVRDYPDVFPAELPGMPPERDVEFRIDLVPGTQPISKAPYRLARPFQEELKKQLDDLLSKKLIRWSVSPWGAPVIFTEKKDESWRMCVDYRALNAATIKNKYPLPRIEDLFDQLKGAKVFSKIDLQSGYNQIRVREEDIEKTAFSTRYGHYEYRVMSFGLTNAPAYFMEAMNSMLHSFLDNFVVVFIDDILIYSKDVEEHERDLRMVLGTLRENKFYAKLKKCEFWLPEVAFLGHVINQQGCEEFLGMAGYYRRFVKDFSIIAKPMTMLTHKDVKFQWTDQCECSFQQLKQRLVTAPVLTLPQPGKRFTVYSDASRVGLGCVLMQEGNVIAYASRQLKKHEQNYPTHDLELAAVVFALKIWRHYLYGESCDIFTDHKSLKYIFTQKDLNLRQRRWLELIKDYDLNIQYTPAKVKEEILREAHRTPYTVHPGENKMYHDLKKIYWWKRMKVDVAKYVASCGVVRLHGVPRSIVYDRDAKFSSKFWESVQEAFDTQLKFSTAFHPQTDGQSERTIQTLEDMLRSCILSWKGSWEDHLPLVEFAYNNSFHASIQMAPYEALYGRKCRSPLCWDSIGERTILGPDWVQQTTERIVEIRQHMLAAQSRQKSYADVRRRELEFEVGDQVLLKVSPTKGVVRFGTKGKLSPKYIGPFSIVERVGILAYRLELPESMKGVHDVFHISMLRKYLRDPEHHVAVEPMTIEQDLTFESHPVRILEESERVLRHRTIKYVKVLWTHQTEREATWELESQMREKYPELFTSGRRERRQRRTGRKERRGNLIEGKFGEFGEYFQILRFPYTLVLLGVEGSNVGGVESEYRMS

SEQ ID NO: 180918 - protein, 126 aa, Oryza sativa
  unsure (1)..(126): unsure at all Xaa locations
  Clone ID: PAT_MRT4530_78242C.1.pep
TFQLWFALGKPAAEKTAWRAARGRDLKLVTVXPALVTGPGFRRRNSTASIAYLKGARAMLADGLLATASVETVAEAHVRVYEAMGDNTAGGRYICYDHVXKRPEEFAELERQLGIPRRAAAAAARP

SEQ ID NO: 180919 - protein, 790 aa, Oryza sativa
  unsure (1)..(790): unsure at all Xaa locations
  Clone ID: PAT_MRT4530_78243C.1.pep
MAHPSASAPPHQQVSASTTPAMAGVYNMPVASSLGRPDVVTEFAKRANLFSQEVSRSVQVSSPGDMISSSVVCPGCAISIDGEEFVANLIVIPLPLFDVILGMDWLNRYRAVISCFWKTITLEAPSGKEMVFQGSAPPHSLFVMSRLFPGQRAVKTGLLWALAKKSSKPLVIEDVPVVRDYPDVFPAELPGMPPERDVEFRIDLVPIKGSEVFSKIDLQSGYNQIRVREEDIEKTAFSTRYGHYEYRVMSFGLTNAPAYFMEAMNSMLHSFLDNFMVVFIDDILIYSKDVEEHERHLRMVLGTLRENKFYAKLKKCEFWLPEVAFLGHVINQQGISVDPSKVLSIVGWERSTNVKDVRSFLGMAGYYRRFVKDFSIIAKPMTMLTHKDVKFQWTDQCECSFQQLKQRLVTAPVLTLPQPGKRFTVYSDASRVGLGCVLMQEGNVIAYASRQLKKHEQNYPTHDLELAAVVFALKIWRHYLYGESCDILTDHKSLKYIFTQKDLNLRQRRWLELIKDYDLNIQYTPGKANVVADALSRKLVPPTRVKAEHKSPAGKLQSLEVPLWPWXDIAMDFVVGLPRTPRGKDTIWVVVDRLKAFDTQLKFSTAFHPQADGQSERTIQTLEDMLRSCILSWKGSWEDHLPLVEFTYNNSFHASIQVAPYEALYGRKCRSLLCWDSIGERAILGPDWVQQTTERIAEIRQHMLAAQSRQKSYADVKRRELEFEVGDQVLLKVSPTKGVVRFGTKGKLSPRYIGPFSIVERVGILAYRLELPESMKGVVTPRSFPPKPKF

SEQ ID NO: 180920 - protein, 89 aa, Oryza sativa
  Clone ID: PAT_MRT4530_78244C.1.pep
ILLLRLPLPPTPRSAPASLPSRPRPATAPVPPARAVASDLLFPPPSPAANPSRHYVAVYKVLSPSPSHFAASPSLPAPWPADCCCCCCC

SEQ ID NO: 180921 - protein, 1546 aa, Oryza sativa
  Clone ID: PAT_MRT4530_78245C.1.pep
MPPRVSVRLANRGRGRGGGRGRGRGHHNEEVENTQDNEEVGNNSVAESPIPNRGGRGRGRAGGRGRGRGRGRHNEAASSNQMEDEHMEEEEGGSHSAAVSDDAPRAAQGMTLTRWTSMRLDTFDGSGTPVNAADWLRKMEKYMRGSRMTPEEKGSKTVDEYEREFSSIVRFVPSVASDEREKARKFFRGLNARYREVMGRNLPTIYLNAVEEARGMEVELQITTAQKNRSGNVTASRPTESQLIRPVPGQGLICFKCGKNHHSAECGFTGACRGCGKAGHMELVCKRNPNSIIKWQKPSSYSATSSTASYPRGSGSSTSTPRGAVQMMTTYPLPYQQFTHNYPPPPLPGQYWPMPQSFAPRAPLQLPAPPMAHPSASAPPHQQVSASTTPAMAGVYNMPVASSLGRPDVVTGTLSVDSHDALVLFDSGATFCFVSIEFAKRANLFSQEVSRSVQVSSPGGIISSSVVCPGCAISIDGEEFVANLIVIPLPLFDVILGMDWLNRYHAVISCFWKTITLEAPSGEEMVFQGSAPPHSLFVMSRLFPGQRAVKTGLLWALAEKSSKPLVIEDVPVVRDYPDVFPAELPGMPPERDVEFRIDLVPGTQPISRAPYRLARPFQEELKKQLDDLLSKKLIRRSVSPWGAPVIFTEKKDGSWRMCVDYRALNAATIKNKYPLPRSEDLFDQLKGAKVFSKIDLQSGYNQIRVREEDIEKTAFSTRYGHYEYRVMSFGLTNAPAYFMEAMNSMLHSFLDNFVVVFIDDILIYSKDVEEHERHLRMVLETLRENKFYAKLKKCEFWLPEVAFLGHVINQQDISVDPSKVLSVVGWERPTNVKDVRSFLGMAGYYRRFVKDFSIITKPMTMLTHKDVKFQWTDQCECSFQQLKQRLVTAPVLTLPQPGKRFTVYSDASRVGLGCVLMQEGNVIAYASRQLKKHEQNYPTHDLELAAVVFALKIWRHYLYGESCDIFTDHKSLKYIFTQKDLNLRQRRWLELIKDYDLNVQYTPGKANVVADALSRKVVPPTMSCLITDFERMDISYCYVGVASTESRVILESAIPQRVLEAQQHDRLLQQVKKRVKEGKTGDFTLDSSGAVRFHGRLCVPQKAKVKEEILREAHRTPYTVHPGENKMYHDLKKIYWWKRMKVDVAKYVASCGVCQRVKAEHKSPAGKLQSLEVPVWPWDDIAMDFVVGLPRTPRGKDAIWVVVDRLSKVAHFISIRTTYSASDLAPIYTREVVRLHGVPRSIVSDRDAKFSSKFWESVQEAFDTQLKFSTAFHPQTDGQSERTIQTLEDMLRSCILSWKGSWEDHLPLVEFSYNNSFHASIQMAPYEALYGRKCRSPLCWDSIGERAILGPGWVQQTTERIAEIRQHMLAAQSRQKSYADVRRRELEFEVGDQVLLKVSPTKGVVRFGTKGKLSPRYIGPFSIVERVGILAYRLELPESMKGVHYVFHISMLRKYLRDPEHHITVEPMTIEQDLTFESHPVRILEESERVLRHRTIKYVKVLWTHQTEREATWELESQMREKYPELFTSGVEGSNVGGVESEYRMS

SEQ ID NO: 180922 - protein, 67 aa, Oryza sativa
  Clone ID: PAT_MRT4530_78246C.1.pep
MALAIDRPLASPILTGHMVGPAHWVPYVSESKRRAGEERWSGKGVTTGPAMDDAAQDSNQRRNSGGR

SEQ ID NO: 180923 - protein, 311 aa, Oryza sativa
  Clone ID: PAT_MRT4530_78247C.1.pep
MPPRVSVWLANRGRGRSGGRGRGRGHHNEEVENTQDNEEVGNNSVAESPIPNRGGRGRGRAGGRGRGRGRGRHNEAASSNQMEDEHMEEEEGGSHSAAVSDDAPRAVRGMTLTRWTSMRLDTFDGSGTPVNAADWLRKMEKYMRGSRMTPEEKVTFMPFQLTGQADIWWDGVVEAWNPDRGAITWEVFLQQFRAKYYPDSFRDKMSDELNNIQQGSKTVDEYEREFSSIVRFVPSVASDEREKARKFFRGLNARYREVMGRNPPTIYLNAVEEARGMEVELQITTAQKNRSGNVTSNEQKRAHQEGGENSL

SEQ ID NO: 180924 - protein, 140 aa, Oryza sativa
  unsure (1)..(140): unsure at all Xaa locations
  Clone ID: PAT_MRT4530_78248C.1.pep
VGVKFAYNNSYHASIRMAPYEALYGRKCXSPLCCDSIGERAVLGPDWVQQTTERIAEIRQHMLAAQSRQKSYADVRRRELEFKVGDQVLLKVSPTKGVVRFGMKGKLNPRYIGPFSIVERVGILAYRLELPESMKGVHDV

SEQ ID NO: 180925 - protein, 53 aa, Oryza sativa
  Clone ID: PAT_MRT4530_78249C.1.pep
MPTTTPIPAPMMAPTPIHGTLYPGRRKAVSTRMNATMETLDERSGPATPRRAP

SEQ ID NO: 180926 - protein, 47 aa, Oryza sativa
  Clone ID: PAT_MRT4530_7824C.1.pep
GMMINLTVPCCLHSMGHRESGRYGVHSLYDILVMAMPVCNICSSRSP

SEQ ID NO: 180927 - protein, 120 aa, Oryza sativa
  Clone ID: PAT_MRT4530_78250C.1.pep
MARQLGSRERVVVGDGWAALPHADRAHATTVAGGFVNGDDSGQCGQWMRRWRRWLASSAPGSKRQATARLFSGQERAVVGDGRAALPRADPAQATTAGGGDGRFVGDDCGWGCGAGDEGR

SEQ ID NO: 180928 - protein, 111 aa, Oryza sativa
  Clone ID: PAT_MRT4530_78251C.1.pep
MPPPRRAALAAAAVLLLLVVAAATAQAVEVAPYCVGEPGEECVAGGGGEEAVAVAAAARRRLQGGGYISYDAMRRNAVPCSYRGASYYNCRPGGQANPYTRGCSAITQCRG

SEQ ID NO: 180929 - protein, 212 aa, Oryza sativa
  Clone ID: PAT_MRT4530_78252C.1.pep
MVPQLQNAGRKLACHDRKPIWQRRCRQTVRRPHVRHAETESLPLGGARSCRPLARRLPPSPQQKRRRPATLDPSAVAAPPLYPAPPSASLSCATRVPDSTSPALRPSHGGPALVVFHGGDDQAHLAPTFFLTSSPSLLTTASTCWEVSPGRRNSTTASSDIVAVFGKKGVSPRDMTGSGRSIHSNRRIDPKPNHSNAGMRDSEGNFVSGFIV

SEQ ID NO: 180930 - protein, 120 aa, Oryza sativa
  Clone ID: PAT_MRT4530_78253C.1.pep
LISLATYQSSTVNTLQNHPQCARLPSLFTSSDPYARRVPTLQVKLKKTEQLPSPNTSHQNYSPGIELTVRGPYWRAGGTSPGPTSKQEKGKKYEAYYASKQETQNSNQVWKLNTYTTDFS

SEQ ID NO: 180931 - protein, 92 aa, Oryza sativa
  Clone ID: PAT_MRT4530_78254C.1.pep
HGRNVLVDVCSSKDICFINSISHHLIRDIIGYCRVGWIIFLSKGISGFKDRNLTPSRIEDALRISYPANICSHPGTGLICPLISVRSRVKRY

SEQ ID NO: 180932 - protein, 274 aa, Oryza sativa
  Clone ID: PAT_MRT4530_78255C.1.pep
MVVSYTQEHVYRHPWHRVTAAAWRKFTDADARAAPLSHILEVHTLSRRVDAGSGRIDAVRAIAGRAPPLPLLLRGLVAAADVVLCVEHTTVDGPARAMRVISRNANLRALVHVEETCSYRPHPERPDEWTLFRQETSIRCAPLAAVAAWAAEMVERRCAERFRQNASQGRERSGASDAGDGRRRWGRGAGSVEGGELGGKEREPGGGAVARRRREAARRGGLAARPGDGAEGRNRGGARRRREGREWRREEKDGAPIGGGASGGIGSDWVMAGY

SEQ ID NO: 180933 - protein, 90 aa, Oryza sativa
  Clone ID: PAT_MRT4530_78256C.1.pep
WPPHPPPRPPNPVANPGPRVDDRHHNSDPDEPRTGGRCPQATKNRRPRAAKNWRRRRRLPRSPCRRCRAAPPRALVAPPTPSRCSCDAVK

SEQ ID NO: 180934 - protein, 378 aa, Oryza sativa
  Clone ID: PAT_MRT4530_78257C.1.pep
MVKKGEEIAGFKMGSTVVMVFEAPVVSKARWREDGSGTVTSDFDFCIKAGDRIRQQKELVRSDEALGPVHEEEEEEDRRRRKEVGDLGGMRLDRRRSRRRKLDTVGIVARLSECIASRGGNIHSVDVFVPDDKPVFYSRSEFTYNPMLWPRDVLRTDFLNLSQHFSAQRSTVRVPDLDPKYKISVLASKQDHCLFDLLYRWQEGRLPVDINCVISNHDRLKDNHVRRFLERHGIPYHYLPTSPGNKREQEILELVQGTDFVVLARYMQILSEGFLKAYGKDIINIHHGLLPSFKGGNPSRQAFNAGVKLIGATSHFVTPELDAGPIIEQMVERVSHRDTLQSFVVKSENLEKQCLAEAIKSYCELRVLPYELKKTVVF

SEQ ID NO: 180935 - protein, 81 aa, Oryza sativa
  Clone ID: PAT_MRT4530_78258C.1.pep
MEQWISAPLTRTESSTQQLKSDLHPVVQALIYAWVMSPIELLLFGLEALNYLGRFEPPFCYLLQPASSINLCSVIFLFLTT

SEQ ID NO: 180936 - protein, 225 aa, Oryza sativa
  Clone ID: PAT_MRT4530_78259C.1.pep
SCQKNHPLFARHVCPPRPWERPCSSLPCLSSSSPPLPSPPSTSPPAAASACSSSPAPRPKPPPPPPPPPPRPTTTSLSRNTSSPTAISPSHRPTRRPRASPTSSPAPTPTLSSPSSPTSASPPRRSRPLLPPTRASCAPASTAPLHPSARSSAPSASPPPRSPASPRSPAATSSAAASSPRCGSGSPSSAHRRGFSRPATGTTGSSPPTSRRWSSPTSPSSRNAG

SEQ ID NO: 180937 - protein, 221 aa, Oryza sativa
  Clone ID: PAT_MRT4530_7825C.1.pep
MADVFEGYERQYCEISASLARKCTAASALQGEKLKQKASEIKSGIDGAEALIKKMDLEARNQQPSVRAGLLAKLREYKSDLNNLKGTLKRVTTGNAQQGSREELLESGMAETLGVSADQKSRLLRITEKQNKTTDRIRDSHRTMLETEDLGVSLLQDLHQQRERLIHAHGTLDNVDDNIGKSRRIMGAMVRRMDRNKWIIGFIIALLVLVILVILYFKFVH

SEQ ID NO: 180938 - protein, 769 aa, Oryza sativa
  Clone ID: PAT_MRT4530_78260C.1.pep
MAVRIDAAGSVPRVWLRIGGTTGEETRRGEAAAQLLGGRTDEARRGGWNREAVAAMQWCADKGRGEARQGKEGERRPPAMDPLIKLLDDDVDETMHSGADVEAFTAALNREVEGSGGASTSAAASSSQPLDHGAGLVPQESNSMFTHNHEQWQGSVKNEIGNQENQQQEQKHLHHSNEQPSRPELVSGGADNKQDQPKVKQEPGNSSQQSILKNEVSKEHFLKVVRTIVGDKLLKQAAAQYQAQAAHGQRNPQTNPSNYSLLSQVSNQQNVPSGSTSGVEHKSYPSAHSIPANQASDSPRPPFFRPSLSGQMQSNMGYPSSESNLQKVNESSNMSDVKGGHMLSHPHNIQSAPGQATQHPQTSLPVLGSNNIHARPLPRPVGGPIVPLRPQMADSSQRGQLVQGAVTSVTGSMAARPTLQTNISPWQQVNKEQKTKSFPPTEHTNKIQPATQTPPPAAASKTPQKKASAGQKKPLDALGSSPPPSSKKQKTSGGYHDQSIDQLNDVTAVSGVNLREEEEQLFSAPKEESRVSEAARMVVQLEEEKLILQKVRKCNLKSIGSDVERCLSMRVDLEKSRHRIYPLSSDVRSHILRVNREAREQWDKKLAEDAERIRKQSDGDDNAVVDSEKDKNESRSTSKHAKTYKAEDDKTRTTAANAAARVAAGGDDMLSRWQFMAEKKKSKCDGDGSSGSMPGNMLPRTSSPKPGKGSREQQEIEKTGGVRRSSHVKVTRSITVKDVIAALEREPQMLKSSLLFQLYGRSPAESSAK

SEQ ID NO: 180939 - protein, 167 aa, Oryza sativa
  Clone ID: PAT_MRT4530_78261C.1.pep
SAGQKKPLDALGSSPPPSSKKQKTSGGYHDQSIDQLNDVTAVSGVNLREEEEQLFSAPKEESRVSEAARMVVQLEEEKLILQKGPLKKKLAEIMRKCNLKSIGSDVERCLSMCVEERLRGFISNTIRLSKQRVDLEKSRHRIYPLSSDVRSHILRVNREAREQWDKK

SEQ ID NO: 180940 - protein, 140 aa, Oryza sativa
  Clone ID: PAT_MRT4530_78262C.1.pep
LHNQVSALHNELDAVYYIMPDIGSDYNIIHEIKEHICTLFSLKKMADDGGSLVIVKSCKNDLSTNQTHRLVLDSSSINHSTQYNAPKSTTKIEHCNSKCNGYTATISQMILLVISHIAGTAKRISTSEVPSQVLRSHASP

SEQ ID NO: 180941 - protein, 53 aa, Oryza sativa
  Clone ID: PAT_MRT4530_78263C.1.pep
MSMNPRFRLLAAATVAAIDTGDRRGKAKKPWELEKKQNSRSESVRVRFRSAGR

SEQ ID NO: 180942 - protein, 136 aa, Oryza sativa
  unsure (1)..(136): unsure at all Xaa locations
  Clone ID: PAT_MRT4530_78264C.1.pep
RTRGRTRGRTRGLQGSSCLNNSTLNYICKFYQLKYLTLRKTNIGKLPRLIGNLKYLETLDIRATRIKRLPASASNLSCLKHLLVGHKVQLTRTTSVKCFRPDSGLEMTAGVVKNMMALQSLAHIGVKERXAVLSEM

SEQ ID NO: 180943 - protein, 74 aa, Oryza sativa
  Clone ID: PAT_MRT4530_78265C.1.pep
TPPVVVLDAFSPRILSFVAPVAGSSSQSDGVGRACDLLCRILLASAFISPANVTPLLHPQSVAQLEILLLLREQ

SEQ ID NO: 180944 - protein, 94 aa, Oryza sativa
  Clone ID: PAT_MRT4530_78266C.1.pep
LRNALECDKVLPEYPKSYRIHHRMVHMYAATPNSKFTFACLAHCLRMYQEQNKVYHAAQASTCQNTPLSILSITCAQSNALTNESVVQQSNSSK

SEQ ID NO: 180945 - protein, 493 aa, Oryza sativa
  Clone ID: PAT_MRT4530_78267C.1.pep
MVREFQSSKTPTILLKLDIAKAFDSISWPYLLDKLRYLEFGDRWIGWIISILATSSSKILLNGKAGNSFLHGRGLRQGDPLSPMLFILAIDPLQKLLAAAQEAGFPLHIRKLRKSDVQPLIDRFSARLPTWKGKLLNKTGRTVLIKSTLSALPTYHLTVFPLKKWAEKKIDKIRRGFLWTGSEQAQGGHCLVNWKREWTAVDKPWQGSSLPCDETDKQLFRASTTITLGNGNKSKFWHDRWLNGSPLKELYPSLYQLATRKNRSVAQEIQGNHWLKQMRRMNTTTQVREFILLWHQIQQVELQEGIDDAIAWRWTPNGSYSANSAYRIQFVGGIQDNRSDFFWKAKVENKCKFFGWLMIHRKILTADKLQLRGWDNSHICPLCGVEPETATHLLMECAFAKQVWRQIWLKAGLHMPVASTFDGDMLRWWSTCRREMAKEQRRNFDGLFICTAWGIWLQRNARIFNGTYSTVMQVVDSIIAMCKAYVGAHVLDE

SEQ ID NO: 180946 - protein, 444 aa, Oryza sativa
  unsure (1)..(444): unsure at all Xaa locations
  Clone ID: PAT_MRT4530_78268C.1.pep
GFPLQKLLAAAQEAGLLQPLHRRTARFNMALYADDAVVFLRPDKQELQKVQMIIQNFGLAIGMVTNLSKSEVYAIRCDTLDLQDILYPFPAQMKHFPCTYLGLPLHIRKLRKSDVQPLIDRFSARLPTWKGKLLNKTGRTVLIKSTLSALPTYHLTVFPLRKWAEKKIDKICRGFLWTGSEQTQGGHCLVNWKRVCLGITNLELFGRSLRLRWLWQEWTAVNKPWQGSSLPCDETDKQLFRASTTITLGNGNKSKFWHDRWLNGSPLKELYPSLYQLATRKNRSVAXEIQGNHWLKQMRRMNTTTQVREFILLXHQIQQVEFQEGIDDAIAWRWTPNGSYSANSAYRIQFVGGIQDNRSDFFWKAKIENKCKFFDMLRWWSTCRREMAKEQRRNFDGLFIYTAWGIWLQRNARIFNGTYSTVMQVVDSIIAMCKAYVGAHVLDE

SEQ ID NO: 180947 - protein, 134 aa, Oryza sativa
  Clone ID: PAT_MRT4530_78269C.1.pep
MGNRNEQQEEEQRRARVPAFGEWDEMKAAGVLPDYSLDFSKIRAVRMQRKEGGPLTTWSSTAAGGVEVGGETERRSSSAAGVVVDGRDRRRRRHRHRRHSSDGGADLRRPLRHDRAAAPKERSKLGYLFCCIAG

SEQ ID NO: 180948 - protein, 96 aa, Oryza sativa
  Clone ID: PAT_MRT4530_7826C.1.pep
MDPTPFAHRPPTIRCHPASIAVTIGCRPLPRRRLLSLLDQGRQPPSGVIHCHGRPPPDRAGQHPSPTPARHGQLHTLAVVEAECIIEAGNVVEGPM

SEQ ID NO: 180949 - protein, 247 aa, Oryza sativa
  unsure (1)..(247): unsure at all Xaa locations
  Clone ID: PAT_MRT4530_78270C.1.pep
HGVGGVAWRGARRGDVTATRRGRARGARSGSGDATAERRRREAMERAARRSSSGGTGLGGAARHGARGSSTARGARXGGLAARGDETARGAAPGWAARGEGTSMATARQWYARAAGGRTRRRRRGRGNEMAMATVARRQATMATAHGGSGREAATRGDGMGGDGARGRAGWRDSGATAWGARRARQAAMARLGAARGRGGRGGGRLGTTSNTWDKCSTAFLSKFFPMDKTNALRGRISSFQQTRDKS

SEQ ID NO: 180950 - protein, 62 aa, Oryza sativa
  Clone ID: PAT_MRT4530_78271C.1.pep
IPLSKRPIPLIKYLRLLGRWVSNNHVLMFPQGIVIEVGPRQLDFLLFVQSCQGCEFRQGTIF

SEQ ID NO: 180951 - protein, 61 aa, Oryza sativa
  Clone ID: PAT_MRT4530_78272C.1.pep
LAGSESDPGGGSDGGAARARERRSIVTAVAASAHHAAASFVLARLIDLHIFIVFELEQPRR

SEQ ID NO: 180952 - protein, 121 aa, Oryza sativa
  Clone ID: PAT_MRT4530_78273C.1.pep
MRERRAVASASASAATGGGGQWWHGVVSSGGVARCVRAADGSGSGRRACRGGAQAVAVRWRPSSGGRRCMGGVRAGAQGRAAVARGLPPTVTRGLSDGDGGGIGVGVSSWELEFRVLPNGA

SEQ ID NO: 180953 - protein, 56 aa, Oryza sativa
  Clone ID: PAT_MRT4530_78274C.1.pep
KSSICRVPPHDVLANAYSFSKKKAQRLKHNKGVELGALTPGKPCITRMVNNVSAPS

SEQ ID NO: 180954 - protein, 87 aa, Oryza sativa
  Clone ID: PAT_MRT4530_78275C.1.pep
MSSRSSSSSRNSNSVNMDSEWSKKENKLFEEALAYYGEGAPDLFHKVSRAMGGTKTADEVRRHYEILEDDLKLIEARRVPFPKGGSI

SEQ ID NO: 180955 - protein, 159 aa, Oryza sativa
  unsure (1)..(159): unsure at all Xaa locations
  Clone ID: PAT_MRT4530_78276C.1.pep
MARDRSRLIDRLRNLPPSDPLLASPDSIGTTPATSVKTGHCTKIREKAQEWVEPNTILAKLLLVGRGLTPLSAITGSELPEPRIMERTRRHLERDLEVWRISKEVQVNMEAQTKSTSRISLLGEVNRVSXVRLITRVDVVLRLRGSRACSFXKPDQFVL

SEQ ID NO: 180956 - protein, 98 aa, Oryza sativa
  unsure (1)..(98): unsure at all Xaa locations
  Clone ID: PAT_MRT4530_78277C.1.pep
MVAWQKLDNTATPSARGVTKPIAPVTPCGNKYFLLMVEDKRRYMWLTLLLSKAAINRFKASAKVESGXRLKALHTDWGNCPCHCVEHLRCKLVRSRRQ

SEQ ID NO: 180957 - protein, 62 aa, Oryza sativa
  Clone ID: PAT_MRT4530_78278C.1.pep
FGQNPPREGGGLWKVGFLQKGSGNLGGFPPLSFGPGREGEKKTGRGVSKGQSLTRGNVFFSV

SEQ ID NO: 180958 - protein, 441 aa, Oryza sativa
  Clone ID: PAT_MRT4530_78279C.1.pep
MEKKTKKKNPSKRGRKRGGRGEGREKKVEEISSSSSSRGRGRRRMAPVKKSKKGKRKSKDSGKLKIVKYGGGAPPLPPELRGLDTEWWYTFLHKHSELGLSAPSDEGEAFRYFFRTSRRTFDYICSIVREDLISRPPSGLINIEGRLLSVEKQVAIAMRRLASGDSQVSVGAAFGVGQSTVSQVTWRFIESMEERARHHLVWPGQERMEQIKARFEAESGLPNCCGAIDATHIIMTLPAVESSEDWCDPAKNYSMFLQGIVDDEMRFIDIVTGWPGSMMFSRLLKCSGFFKHCDAGTRLDGPVMVSAENGEIREYIVGNNCYPLLPWLMTPYEGESLSAPMASFNARQKAARTLGPRALSRLKGSWRILNKVMWRPDKNKLPSIILVCCLLHNIIIDCEDELLPDVQLPDHHDTGYSEEKCEQVDPNGKIMRDVITGYLQI

SEQ ID NO: 180959 - protein, 469 aa, Oryza sativa
  Clone ID: PAT_MRT4530_7827C.1.pep
MAWTSIGSVQQGRRWRGASAESFGEAEQSIGIEFPRNLMTNCGRGAWAVVAQEGGWRAREAAVGREDGPRRGVEVGHGDGEVSGGEGGGRRGVGRGQKGMKLRARRTVEAAEYVAQEEAGEKAYLVAHGRCCRRRGADGDGDVLGEGGGEAGVGDEAAELGLEVGGVGLTGASVARASPSPETGSAARRRRRRGLAKPLPAALRATARSANRSPGPPAGQCGGRNCRRRSALLLSRLAPATSRVVAAVSSPTRRSPFSYRLQLVISVLIPTLQQLTGINVVMFYAPVLFKTIGFAGAGTASLMSAVITGLVNMFATFVSIATVDRLGRRKLLLQGGIQMIFAQFVLGTLIAVKFGTAGVANISRGYAIVVVLCICVFVSAFAWSWGPLGWLVPSEIFPLEIRSAAQSVVVMFIMAFTFIIAQIFLMMLCHLKFGLPSPSPPFPSPPSPPPPPTSPSPRQHRGWAIFAPH

SEQ ID NO: 180960 - protein, 564 aa, Oryza sativa
  Clone ID: PAT_MRT4530_78280C.1.pep
MAPQATILRGPGKTEYPGRSAGDRHTVEDKRPGGSGGKQQKETKGDDPSQHITKIPVHRDDRGGYKRHGESIEFLRDWRHKKERTARPNRLPLPKSSKKGLRIEDSPHPELDRTMREKRGKNPVVYERVSSTESSSDDRRRRRRSVVPDTELDAVQLSDSSSSSSSSDGTSKATALGGLKATASSDVAPVPIDDVPSVVPAANAPVRSSPVMPAADAASAPGSSTQKHQEGNPSDTACQMNELMEKTSRYLAEFRTGALFFSEAAGQMRAWRQAAVRAQRRAGKKRERGEEAGAASGGMERARQRWRERGREAAGTAGVAGRAAGESGSGAAALVMLQLFTTGVVVVLVDLHERGRRSSGGRRAASDYDGAGGLVGERGGGGAQVWRRSSGKRSTATSSLMRSATPSPAGLISALEDKVDRLLVVVAVPGPRPRRRRWGRADDDGGHGKRLLRPQPPLRRRAPLPPLRRRTAAPRSLAHSDDDGGEPTTRAATARGCSARSLRSAAALRCLRSAAGRPRRVASPTATTTVESRRRGRPRCAAAPPAASAPPPRSAASAPPPNGR

SEQ ID NO: 180961 - protein, 220 aa, Oryza sativa
  unsure (1)..(220): unsure at all Xaa locations
  Clone ID: PAT_MRT4530_78281C.1.pep
SALHRRRRRERGKAARPFGGGAEAAERGGGAEAAGGAAACRGRRCRQLSTVVGAVSEATRRGRPAAERRQRSAAAERRRRHRRERGCPAAERRQRSAAAERRLRAEQPRAVAAVVAVGEAFNPCRSEPPAPPLPPGDGDDDEEPINLVFKGGDDXDEAGGRGGGVLHRRRGRRRPPAAAPQPXTALVEVNQHDDATGGEELEHDERRRSAAALARCLSSH

SEQ ID NO: 180962 - protein, 84 aa, Oryza sativa
  Clone ID: PAT_MRT4530_78282C.1.pep
MTNLYDQKEVLKYSTTSLCSSGSIFWMSVGPAYVRVLTNVPFSMTSSFSPVVYNLVPLKQVNLHLPESENWYLQNTVPNVQFIL

SEQ ID NO: 180963 - protein, 292 aa, Oryza sativa
  unsure (1)..(292): unsure at all Xaa locations
  Clone ID: PAT_MRT4530_78283C.1.pep
TVHRRSLGTEAAERGGGAEAAGGAAACRGRRCRQLSTVVGAVSEATRRGRPAAERRLRAKQPRAVAAVVVGSPPSSSPSRVKLGRLSLLSGKKGAKAALLNDDDYEPPAPPLPPGDGDDDEEPINLVFKGGDDXDEAGGRGGGVLHRRRGRRRPPAAAPQPHXPPPLADQAPRSVVIARRPPPTAAPPTALVEVNQHDDATGGEELEHDERRRSAAALARCPARRSRRPSRLSPPLPPPLARSLHAARRHARLLXPPLLPRGPLCPHRRLSXHTLICPAGSLKKRXEKRMCS

SEQ ID NO: 180964 - protein, 246 aa, Oryza sativa
  Clone ID: PAT_MRT4530_78284C.1.pep
MLFLTKFITAIILPPFNTLALLLLSLLLYKLKHLRLSYFCTILNITTLYLYSTPYFSQKLIQAVSFSEKLTIEEYRQAQAIVVLGGGVRNSRELFADYAIAATPLERMRYAAYLHKQTRLPVLVTGGSPTGKQPEANIMAQEFANFFDVQVKWIESASNITEENAHLTKAILDKEGITKIILVTNEWHMKRAKMLFEREGFNVLAASTSSYEGLNIIGVLPFIPQAIAMQNSSIALKEWLGYWKVK

SEQ ID NO: 180965 - protein, 294 aa, Oryza sativa
  Clone ID: PAT_MRT4530_78285C.1.pep
MSTLNPKLTQTIHRRSLGAEAAEHGGGVEAAGGAAARRGRPRRRLFTVVVAVSEATRRGRPAAERRLQAEQPRAMAAVVVGSPPSSSPSRVKLGRLSLLSGKKGAKAALPDDDDYKPPAPPFPPGDGDDDEEPINLVFKGGDEAGGRGGGAPHRRRATLAPHPSPSPPLVDQAPRSVVSARHPPPTAAPPTALMEVNQHDDNAGGEELEHDERRRSAATLARCPARRSRRPSRLSPPLPPPPARSLHAARCRARLLSPLPLLPCAPLCPHRRLSHALICPAASLKKRWEKRMCS

SEQ ID NO: 180966 - protein, 87 aa, Oryza sativa
  Clone ID: PAT_MRT4530_78286C.1.pep
MIPTVVYSFHQMLLHHGLIPFYHTFFLFCTLYRFFFFFLHLTTFTTNYNFFFLIKLIYTVFHFIPYNSNLLDIILYPHFLFYQTFSF

SEQ ID NO: 180967 - protein, 325 aa, Oryza sativa
  Clone ID: PAT_MRT4530_78287C.1.pep
MTSSTLSSALSSMEVMLDALMQRGVGKPEEKPKEEAPPALPTRPTVRGRPPSLQRPGSPPPWVHRSPSLPPMLEVDEKLAVNSVLERRATVAEEAVKQKDDVVRQKDEEIAALRQQVEHYESRLSECEARMKSVEEELRKQITTMQIAQNNAGRTGESTTRTHHRQELSGTSGAPAQSSGWREEEASVTRQQARGRESNVAAVVDERKTDAVSRLATELRQESEAFEHRARAVTEAGPPTAKSVDELKKLKRQFGTWKKEYGARLRKTKAELKKLVRSERGGHGNRRRCCSWKIKLPKCRFPKCCAFKLPSPSSCCSCSCFRRCC

SEQ ID NO: 180968 - protein, 300 aa, Oryza sativa
  unsure (1)..(300): unsure at all Xaa locations
  Clone ID: PAT_MRT4530_78288C.1.pep
MCTPKLPQTVHRSSLGSIFARSGYGXEAAGGAATRRGRGRRRLSTVVVAVSEATRRGRPAAERRQRSGXLRAEQPRAVAAVVVGSPPSSSPSRVKLGWLSLLSGKKGAKAALPDDDDYKPPAPLLPPGDGNDDEEPINLVASXGEDEAGGRGGGAPHRRRGRRRPPATAPQPHLSXPPLADQAPRSVVIARRPPPTAAPPTALVEVNQHDEDAGGEELEHDERRRSAATLARCPAHRSRRPSRLSPTLPPPLARSLHAARLLSPPPLLPRAPLCPHRRLXHALIYPAASLKKRXEKRMCS

SEQ ID NO: 180969 - protein, 161 aa, Oryza sativa
  unsure (1)..(161): unsure at all Xaa locations
  Clone ID: PAT_MRT4530_78289C.1.pep
MEAAGGATARRGRRRRQLSTVVVAVSEAKRRGRSAAERRQRSAAVERRLRAEQPRAVAAVVVSSPPSSSPXARLRGAAVRRRSGGSGARRRSGGCGRSSRAPWPPSSSALHRRRRRGRGIQPVQPQPALSPLRQEGRQGRPARRRRLRAPRTAAPTRGRRR

SEQ ID NO: 180970 - protein, 116 aa, Oryza sativa
  Clone ID: PAT_MRT4530_7828C.1.pep
GVVRAVLVSVQPLPAALVASSPVPVVVVVVLSSFPVVVAPVVVFVLASVSPIVAPAASRLRPRIFAEVVPSPSVSAAPVRRCLSHASSRGGKDLSSRCLVLVLSVSPRTRCAVVDP

SEQ ID NO: 180971 - protein, 449 aa, Oryza sativa
  Clone ID: PAT_MRT4530_78290C.1.pep
GRRERGWHAASAKRSPPTACRRSTATLAPPPLADQAPRSVVIARRPPPTAASPTALVEVNQHDDDTGGEELEHDERRRSAATLARCPARRSRRPSRLSPPLPPPLARSLHAAHRRARLLSPLSLLPHAPCPHRRLSPRPHLPGRLTEEDEKRKCAADIAALPPACTSSTSSHPSELLPFHLPSVDANAGGAAANLAHAPPPPVPNLARAVGAPPGKRIEVVWERENTLLSFGQAAAHAAVAFVEFNVQEYNDLTCRRQRFTGWRQNAAQRQGAGNEFNSQGCDDEFVPETQQDVPIEEIGIGTMLHNWLRAISEYEKPSIDMETIEKAWADEKKAIADVDYEGNPRKVNTSSEKKACVDEGKSISDAETDDEGVGVPEKKACIAERKSISDAETDDEGVGVPRNLHMKDLHDIMFPTYTQDYHVYKCTNYRSVPYGCQTSTEYFVMEMP

SEQ ID NO: 180972 - protein, 111 aa, Oryza sativa
  Clone ID: PAT_MRT4530_78291C.1.pep
IQMGSWVIGPAPEISELDERAAMYRDKRKAMDYVRNWICPGCRKEYEPIKNMLVDLPPFGCVDCGLKNDAAYEWKITQCTLNGISLDFKTYDQKLEQNLEFNTVFGAPFII

SEQ ID NO: 180973 - protein, 1039 aa, Oryza sativa
  Clone ID: PAT_MRT4530_78292C.1.pep
MAAAPAFQPFTIRGFAAGMRAVDASKCWPFGRGGGDGEPPPPLPPMEPPKRSRWWAHELAAERARQEARATGTEDAGGGVAGGGGSGKGAKRKGSRGRVRAERARKWRRSLQFGLLSKRKEKTSSRLLHYVLHKQLLSKHKGSTLRTQKEPSAQKSKHKGSTLRTQKELSAQKKFQNTHDCMSTHENNLNKQYIRGMDPSTGMGSNLVRKEAANSSVNKQNIKASEPTIYPLNPGCELVKNVAYPPKDDIFGDLPLLESSKVMFHSGVDELPTVIEDSFVTDQSGPEAISENVSLKLIPPSDMSVQTSSTLKDLVKKEGTPAKKSICILRNDVKKNLPSSAEFDGLNHNGINMVKTCLSDTQLKSTDVPALSSYSNKGLKSGSSNTAHTQQDCFSMNTNYCQEIRKPGTSIATSSVTVRTRTEAIESDRDMAVNSKKSTSISCALVPTECHISSEGSVLSSAISQGSASAATSADGMSSYKSIPSQDSIPTSGLNGTFASNLFRESRKSVDTCTSLSKEDQCSWYSKLHPVCTPASIGSAFMKLPGLERIEISSCNIKTDENMSTNGRPANIVRCEKQQAVIGVPNIMQGQRKTDFSDSQVQEKVLNGYLQQDVYHPCQPTVRLMGKTVSVCERSKEHRVPTMGKGWSDSTIVEDHPSSTSCHFPQKRLFPCQDSVTPSVHVKGSLDILQRIPSVTLPEARATIGNVQNRRLQPINTVSSSVRDCIWNSGSQSVRQAEIKRATTINVNSRARHINLHQPPQEKYQKSTFSYDDPTSAPIYQSCQDLVAPVFEETKNRSLGWSLDDAIGPRILDFGSKVAGHGLEMSTNESNCVRASSGPVPVLETRSIKPSSLSLAIYTLVQRLIEDIEKIQNKALHRSQQRIMGVLGALARHMDALVGPGIMLLYPLYASMRAIESPSTLDDQQWLTYWVLYSLITLFELSCWKVLQWFPLWPYMKLLFCCWLVLPIFNGAAYIYETHVRRYFKIGQYVSPNYNERQRKALQMMSLDARKSVERFIESHGPDALDKIIRAAEEEAKRA

SEQ ID NO: 180974 - protein, 91 aa, Oryza sativa
  Clone ID: PAT_MRT4530_78293C.1.pep
MARLEQRTRLLSTSMPPSPPAPGAELTTMPLVSSKKTRPHPPLCRPPPPPRPPPQAPITPASATASPIKSTKASVPAPKAQGHPAAGLLSP

SEQ ID NO: 180975 - protein, 92 aa, Oryza sativa
  Clone ID: PAT_MRT4530_78294C.1.pep
MAVLLAGDRLESTWEKLMSKDQEIMQDTKRLENNARGDEESIWLQTAARRSLCGSGDLYAAVAVIAVANSLLVNDGSIGGGLRKPASTTCGL

SEQ ID NO: 180976 - protein, 133 aa, Oryza sativa
  unsure (1)..(133): unsure at all Xaa locations
  Clone ID: PAT_MRT4530_78295C.1.pep
SSKRQNIVSYSSTKAEYRXICNVVVGTCWLHQLLHELHSHPTRTTLVYCDNITAVQHQHIKHVEIDLHFVHGCVTTRTIQVLHVXTTSQYADIFTKGLPTDVFFEFRSSLNVQPVDVAIAGGVSISHVYRMFS

SEQ ID NO: 180977 - protein, 231 aa, Oryza sativa
  Clone ID: PAT_MRT4530_78296C.1.pep
MGSCASVHKDLGFPKKLFLASSPTKEKKAANGKGGGGGVSVDLKRKEQQQAAAAGVGVRSPGSGSKDEMFFDSRAWLDSDCEDDFYSVNGDFTPSRGSTPNYQPRTQTVMSNVFVPDNVQNSKSPEPSPTGRRKLAELLQEAMQNGSEDSTDASVPDISKNEKQQFQPVSAAVKPVSESSSTCSTEPTPIREAKNRKEKAWYTGRCCLPAFVHTLDLDERRQKMTPGPCAV

SEQ ID NO: 180978 - protein, 46 aa, Oryza sativa
  Clone ID: PAT_MRT4530_78297C.1.pep
CIRLTFYFGWGAPLGPSLARQYHVNHPIPLFTFPCVFPSQFCKNPW

SEQ ID NO: 180979 - protein, 93 aa, Oryza sativa
  unsure (1)..(93): unsure at all Xaa locations
  Clone ID: PAT_MRT4530_78298C.1.pep
MEFGWALRRPMRLPDSPRHERGLSVARXGTGVKPEVWCAWLEGVMQRVLSRPLSDVDLNVNIVVCVPRPVLDGDFNAHSAWNSIREFLGMTAT

SEQ ID NO: 180980 - protein, 373 aa, Oryza sativa
  Clone ID: PAT_MRT4530_78299C.1.pep
MSTLVDALCAPCSDTALIYDTFNASAAASFLFDNAAAFCDADILGATATGEKEATSSAAAAAAEAAPPRKKRRRRAKSCKSREETETQRMTHIAVERNRRRQMNEYLAILRSLMPEPYVQRGDQASIVGGAIEFVKELEQQLQSLEAQKRTLLPHHKARCDDATPMHNASGSNVGAGGCMEPTTTTSNCSSSVTEDAPSADAPPFAQFFAYPQYVWCHSPRDSTTTTTAASASASASASSSSPATVAAALQSEHRSGLADIEVSLVETHASVRVMSPRRPGQLLKMIAGLQALRLTVLHLNVTTLDSLVLYTLSVKVEEGCSLTTVDDIAASVHHVLCIVDAEAAASEHLLAAGQLATTATAVAKRELATYMY

SEQ ID NO: 180981 - protein, 888 aa, Oryza sativa
  Clone ID: PAT_MRT4530_7829C.1.pep
MVEELYIRKVDDEALRYKAMAAAVPANVVESSIDPDTTVVNKEGHVLTSKRFAVVGGGMSAASGSACGCLLRDHSASGGVVVSPRTGDEQMQQLEIRNRGLTSKHVTTICLDGTDKEALASYLSGIEEVINWSYEDGIKVDISDICGQCHEVFTTRAGGSMEVEFVYMGRSIRFLIQGRNLYLRGWKARDCVFELNHDQHENFTLDPKCIRLKTGLNYNKLVFGGVENTPTGLWPVRKAFDNFWRHAGGENINISEDVAIFAVIISEAARLRPVHDYIKDSFLSENPGLSKLGKHPSNPMYVKKYKKISAHIMENVDLMKQGLEPKPFKHEKLVIDSMESALSIVRILFRDAFNSGLFEHEKPPKPIFENTWDRQEAKHKRKQDKRKKKGKKGGGGSGGGGGGGSIGEEVPKGGGVRERLKGASYKHARDIDSKSIGPSSNGSDDEKVNWKALKDVIYKECFIHSGLKILSILSDVRLHPHERWNICQKVGSRAAILQNLVNPIEVFVDDECAGKPAPQVPKSSKPSIMKLRQATSRNLKREIELLMENPQRNFPLTNFCLDPSKLIKSSTMVPPVIYAQRRLSYLMNGMGRQQALGDAMQAWRRPTTFNFLDAALPSLGMEIESEEAIEGASNFQLELKRRGMFSSALLYARRRLPSESQLPCSSPSLMHQASAALLFIAEMAPTRWRGSLTAGFQFFLAVGVRRHRNGGRGRGARWVWVIPGEIFPVDIRSAGQAMNVSIGLGLTFVQTQSFLAMLCRFRYGTFAYYAAWVAVMTAFIAVFLLESMPTVWARHWYWKRFAPQEQLKRSERWKDSIDFSYVRARRRGARWGVDGGTRLRVPDPMSIAAVGSEVRRGVSIDGGINGRRGLGPALMAVAASCGLWGSRV

SEQ ID NO: 180982 - protein, 56 aa, Oryza sativa
  Clone ID: PAT_MRT4530_782C.1.pep
MDKEQSQKGWDGICRMPYYGGVILFYMIYGAQYSLFQCNGVCMCLSTLRYLSSSVS

SEQ ID NO: 180983 - protein, 162 aa, Oryza sativa
  unsure (1)..(162): unsure at all Xaa locations
  Clone ID: PAT_MRT4530_78300C.1.pep
GIPSYDRWICHAFFGVAGSNNDINMLNXSPIFTKMIFGTAPRVRYTVNGYQFEYGYYLANGIYPKWVTLIITIXLPQSHKDQLFAAHQESTRKYIECAFDILKACFRVVVVPCRLWEIGGIGLIMMACIILHNMILEDERDLPPFDHNDNNGEFEVDEPEYN

SEQ ID NO: 180984 - protein, 87 aa, Oryza sativa
  Clone ID: PAT_MRT4530_78301C.1.pep
IIYFLFFFFSFCLTKRAPLKNKNPVQERAPGTRIKRKHRMGGVKNPKIYPALWPPQFWPNLMRVPPGTLKGKATRPDGLVWQYHRIF

SEQ ID NO: 180985 - protein, 349 aa, Oryza sativa
  unsure (1)..(349): unsure at all Xaa locations
  Clone ID: PAT_MRT4530_78302C.1.pep
QVPSDYLLRPRRSHLIIHLINIHYEQASLEKENXELKSQFEEITKKYMDLQETHDELLCXSHENLVDSHAMVEIAHEVIIATVKSYEPHVQVDFTCANTCCSNTNISPSTTCDLDCVGKREKHMDHGLVDKAQPSQDNRGNMVKKLEKGSTVACTKSCQENNKSNNKSKGQIQSWIKTLITCFMCKKVGHYALICSNKIDDQVTLPKRRTRRSNRKCYGCNEKSHEVASCPHMKNHFVSSRKKLNIKVASSKVAEKMQDVVKKAPCKDKNRLCYNCRAKGHIGNNCPMGNIPKPNSSFDYDLPRDAKKDICAIRVISSPHASIKSIWVPKSHVTYLYGPNVVEDQNVLK

SEQ ID NO: 180986 - protein, 309 aa, Oryza sativa
  Clone ID: PAT_MRT4530_78303C.1.pep
MGSLGRRPWVGGLTAAMIFAVAVCGFCFSGASAAAAAPTFGDNFEITGAEDHVKTSADGQTWYLYLDNKTGVGFQTKERYLFGWFSMNLKLAGNDSAGVVTAYYMCSDVDAAPQRDELDFEFLGNRTGEPYIIQTNVYRSGVGGREMRHSLWFDPTADFHSYSILWNPKQIVFFVDKVPIREYRNSDKPNTFFPIMKPMYVFSSIWNADDWATRGGLEKTDWTKAPFISSYRDFTADACSWGTAAASPPSCAASTGNSWWDQPPAWALDAGQREDSAWVARNLVIYDYCDDRKRFPSPPEECLLRTTSS

SEQ ID NO: 180987 - protein, 163 aa, Oryza sativa
  Clone ID: PAT_MRT4530_78304C.1.pep
MAAEKTPGDHMALCLGSGGGGPNRAVSEDTGNEDTAAAEERRQVARYKQTLWEFKLSAIVIVLVLAFWVALLLVGTLDHHMSESWRQTYVSSGMVASGPWLFMVICHLRDYGLSVPKMSDFSNQEHQLPPRGPRPLLTDGYRSIIPHKRGSLQNPDRSILLYM

SEQ ID NO: 180988 - protein, 70 aa, Oryza sativa
  Clone ID: PAT_MRT4530_78305C.1.pep
MWMRSGLFRTSDSVWSRGADKPSATSLQWSSGGACGKRCEEEEATRGLEKRQTGDGAGIRQRERERFGED

SEQ ID NO: 180989 - protein, 67 aa, Oryza sativa
  Clone ID: PAT_MRT4530_78306C.1.pep
MARDRWKEESHRIVTKMAIRWPLAPMGSWKRWWLWEDGESVVPVVFGDDRRVAELLLVPEMLAVVES

SEQ ID NO: 180990 - protein, 119 aa, Oryza sativa
  Clone ID: PAT_MRT4530_78307C.1.pep
SSLRSAPQGQGGGQITLSVHSHRSTEHHVLIITSSWRQRERRRGARTMCFSPPSRTVTFRPSYAWPATYRRSARASSSRSCSTPRLLGSLSLPATSPPNRLHALPFAPDDHGLPDGAES

SEQ ID NO: 180991 - protein, 175 aa, Oryza sativa
  unsure (1)..(175): unsure at all Xaa locations
  Clone ID: PAT_MRT4530_78308C.1.pep
KHTSGLHKKXRKEILDRLDLLDKKAETFLLTQEEIDIRWFYRNRLSSILREEEIKWYQRAKTKDILEGDSNTKYFHLVANGKHRKMRTFQLHDGDQVINGDANLKAHITTNYKGLFGPPNDFDLKFDEDNIADIPQVSLLENEALTQELLNRRLRRPFSKWNTTKHRILMDFCRR

SEQ ID NO: 180992 - protein, 70 aa, Oryza sativa
  Clone ID: PAT_MRT4530_78309C.1.pep
TNSVSEKQKARLGCSVFQARPQTKFGGDTTTEFVDGQRKRVPFVCHLCGSHTLKKHMMLASTSFFIQKKT

SEQ ID NO: 180993 - protein, 125 aa, Oryza sativa
  unsure (1)..(125): unsure at all Xaa locations
  Clone ID: PAT_MRT4530_7830C.1.pep
ALLPVALAMGGYSTGSCAEGRTLLTTPLFETESSTYTYLLXYTLDPEQPVEMIDPVDRTAGRYLILIIEMGLLLVYAMHTHMHANHVTGTGLIETKATGMQTVIANMSTAYAYHSIELGDKIFLG

SEQ ID NO: 180994 - protein, 159 aa, Oryza sativa
  unsure (1)..(159): unsure at all Xaa locations
  Clone ID: PAT_MRT4530_78310C.1.pep
GGCGFFKIFFFFFFFFTPGSSPQFLPASSWRPTIPYFESFYYFFVIIIIFGDSPGXXXXPPFPPPSXPAGLKSKTSRGPPEGGKLTIIAGPATTPLPAGKHPVPPALKNNPPPRKKRLSYFPPPGFFFSHWRGQQQIALHHLPPKKERKRSPLLGPPSK

SEQ ID NO: 180995 - protein, 361 aa, Oryza sativa
  Clone ID: PAT_MRT4530_78311C.1.pep
MIYPAPAPHVHPRLPQAAISVVATVVETKMVIVTMDLLLASLVLLDSEASRPPLLILGRSDRPHSSGLIGHKTSISLDPIIGNEQPGMSYWQRITDHYHANRDFESDRNANSLEHRERHGESATHPWRTAIARLPASSLPARLAGLLADGVRVLREVERLAGKRVEDDAGDFRDRDLPDGVVQHILGFLPAPEAVLTCVLARRWRHLWKSVARLHITNWDKEVTMQEFGYFVHRLLLHRGRGAPIDECRFSLGGLSDFAADARRVDRWFRHAAVMCQARVLQLRLAPSGVQLALDNLAIVSRHLEKLQLTGVKLMHSFLDFSSCPVLEHLDISFCNLVEDFVNLRISTLRHLAASFSTHLF

SEQ ID NO: 180996 - protein, 73 aa, Oryza sativa
  Clone ID: PAT_MRT4530_78312C.1.pep
CQTAKLIPCTMDSWVQLSVLPNYIRRHSPCSALVTMSLLSSYAVARGNSLEGRNTGRGDPGDRRAQRDRTSES

SEQ ID NO: 180997 - protein, 147 aa, Oryza sativa
  Clone ID: PAT_MRT4530_78313C.1.pep
SHTNLIHPSSRAASATMSKDDSSDVPAAEAPAKRAPLNKYALACAILASMNSILLGYDISVMSGAQKFMKKDLNISDAKVEVLAGIINIYSLVGSLAAGRTSDWIGRRYTMVLASVIFFAGALIMGLAPSYAIVMLGRFVAGVGVGY

SEQ ID NO: 180998 - protein, 553 aa, Oryza sativa
  Clone ID: PAT_MRT4530_78314C.1.pep
MSKDDSSDVPAAEAPAKRAPLNKYALACAILASMNSILLGYGPCKKPHITPCAQNQEKRASVLTIISFLVDRADISVMSGAQKFMKKDLNISDAKVEVLAGIINIYSLVGSLAAGRTSDWIGRRYTMVLASVIFFAGALIMGLAPSYAIVMLGRFVAGVGVGYALMIAPVYTAEVAPTSARGLLTSFPEVFINAGVLLGYVSNFAFYRLPLHIGWRVMFLVGAVPPAFLAVGVLAMPESPRWLVMQGRIGDARRVLEKTSDSPAEAEERLADIKNAVGIPEGISDEDEVVAVVHKSRGSHGEGVWRDLLLRPTPAVRRILIACLGLQFFQQASGIDAVVLYSPRVFDNAGLHSDSDSIGASVAVGASKTLFILVATFLLDRVGRRPLLLTSAGGMVISLVTLASALHMIEHRPEGQATALVGLSIAMVLVFVASFSIGMGPIAWVYSSEIFPLRLRAQGCALGTAMNRVVSGAVSMSFISLYKAITFAGSFYLYAGIAAAGWVFMFFFLPETQGRSLEDTVKLFGGDERDANGTVGREDGHGQNKSTELTTQQ

SEQ ID NO: 180999 - protein, 109 aa, Oryza sativa
  unsure (1)..(109): unsure at all Xaa locations
  Clone ID: PAT_MRT4530_78315C.1.pep
MPKIGDGSKAIAGDDDNSKLVVQQVKDAGVTLCYPMLGGNNYGVWAVKMKIFMRAQGVWAAVEGDVWAAVEGDAADEKMDQMALVTIVQAVPXSEKEKAKEVWDALKQM

SEQ ID NO: 181000 - protein, 51 aa, Oryza sativa
  Clone ID: PAT_MRT4530_78316C.1.pep
MGGMGDMWIHRGGVWEDPWASWHSMLMGSARPGWPFEKLLARVTVEKLLAG

SEQ ID NO: 181001 - protein, 156 aa, Oryza sativa
  Clone ID: PAT_MRT4530_78317C.1.pep
RCTKCTAGNSATEPYIVAHHLILSHASAVQRYRHKYQHIQKGKIGILLDFVWYEGLTNSTADQAAAQRSRDFHVGWFLHPIIYGEYPKSLQVIVKERLPKFTADEVHMVKGSIDYVGINQYTAYYVRDQQPNATTLPSYSSDWHAAPYYERDGVPI

SEQ ID NO: 181002 - protein, 462 aa, Oryza sativa
  Clone ID: PAT_MRT4530_78318C.1.pep
MDYFIVIKRISCEEYGILDGKEDVNIMKSMGFDAYRFSISWSRIFPTGTGKVNWKGVAYYNRLINYMLKIGITPYANLYHYDLPEALEVQYGGLLNRKIVEAFADYAEFCFKTFGDRVKNWMTFNEPRVVAALGYDDGNFAPGRCTKCTAGNSATEPYIVAHHLILSHASAVQRYRHKYQRALGIGRPPTLTLGEDGPCVLPSRVLHEDDWGMWVHIQKGKIGILLDFVWYEGLTNSTADQAAAQRSRDFHVGWFLHPIIYGEYPKSLQVIVKERLPKFTADEVHMVKGSIDYVGINQYTAYYVRDQQPNATTLPSYSSDWHAAPIYERDGVPIGPRANSDWLYIVPWGLYKAVTYVKEKYGNPTMFLSENGMDDPGNVTIAQGVHDTTRVAYYRSYITKLKEAIDDGANCIGYFAWSLLDNFEWKLGYTSRFGLVYVDFRTLRRYPKMSAYWFRDLVSSKN

SEQ ID NO: 181003 - protein, 59 aa, Oryza sativa
  Clone ID: PAT_MRT4530_78319C.1.pep
MAMIFSRSSAGSPFHPSSPTPTDEEGSPSSSPPFPRRPTFPSSGKRGPPAPTRCRMPAK

SEQ ID NO: 181004 - protein, 1686 aa, Oryza sativa
  unsure (1)..(1686): unsure at all Xaa locations
  Clone ID: PAT_MRT4530_7831C.1.pep
MPRYKPEYLFGVEGFVQELRTMSFVIGFGTAPFYAQIPHDRHEEKCRVKVTLNSNSEDIPSVMFEAGGRNYIHVCQEVARITIGELRDRYSDQLADTEYRYHPRQPQGSDRGSYLETEGIENDATTRHLVEMLWAMDETRAETVLAAQDREDRNRGKICKLEDKVDRLEKELAALKGEAPPQKARIRLTARKRALFVPRYQLAPKFSPVSLLVXCPCQMVLTRSNGNGPNNNNNNNNGENPTLAQVLAQQTQLMNMMMQQLQNQQNQLNQGNNNAPPPQNKLAEFLRVRPPTFSSTTNPVEAGDWLHAIEKKLDLLQCTDQENVSFASHQLHGPASEWXDHFRLNRTTAEPITWLEFTAAFRKTHIPSGVVSLKKKEFRSLTQGSRSVTEYLHEFNRLARYAPEDVRNDEERQEKFLEGLNDELSYPLMTRDYPDFQKLVDKAIRQEDKYNRMEQKKRRIAQFKTQQGNNQRPRLTLGPQSMPQGGSSSVVHPQRQFFNNNAGNNIRNQAPQPAKKEQGSKLVVCFNCGEPGHYADKCPKPRRVKVVPVQSNSTVPASKARVNHVAAAEAQDAPDVILGTFLVNSVPATVLFDSGATHSFLSMSFAGNHGMEVEDLRRPMMVSTPSNQALSLQRSPSVRIEIKGVPFLANLILLESKDLDVILGMDWLARHKGVIDCANRKVTLTSNGGRVVTVHALSSESLRSRLNQITLEEIPIVREYPDVFPDDLPGMPPKRDIEFRIDLVPGTTPIHKRPYRMAANELAEVKRQVDDLLQKGYIRPSSSPWGAPVIFVEKKDHTQRMCVDYRALNDVTIKNKYPLPRIDDLFDQLKGATVFSKIDLRSGYHQLRIKEEDIPKTAFTTRYGLFECTVMSFGLTNASAFFMNLMNKVFMEYLDKFVVVFIDDILIYSRTKEEHEEHLRLALEKLREHQFYAKFSKCEFWLSEVKFLGHIISAGGVAVDPSNVESVTNWKQPKTVSEIRSFLGFTGYYRRFIDNFFKIAKPMTRLLQKDVKYKWSEECEQSFQELKNRLISAPILILPDPKKGFQVYCDASKLGLGCVLMQDGKVVAYASRQIRPHEKNYPTHDLELAAVVHALKIWRHYLFGTRIEVYTDHKSLKYIFTQPDLNMRQRRWLELIKDYDMGIHYHPGKANVVADALSRKGYCNATEGRQLPLELCKEFERLNLGIVSRGFVAVLEAKPTLIDQVREAQINDPDIQEIKKNMRRGKAIGFLEDEQGTVWLGERICVPDNKDLKDAILKEAHDTLYSIHPGSTKMYQDLKERFWWANMKREIAEYVAVCDVCQRVKAEHQKPADLLXPLKIPEWKWEEIGMDFITGLPRTSSGHDSIWVIVDRLTKVAHFIPVKTTYSGSRLAELYMARIVCLHGVPKKIVSDRGSQFTSNFWKKLQEEMGSKLNFSTAYHPQTDGQTERVNQILEDMLRACALDFGGSWDKNLPYAEFSYNNSYQASLQMAPYEALYGRKCRTPLLWDQTGEHQVFGTDILREAEEKVKIIQERLRVAQSRHKSYADNRRRDLSFEEGDYVYLRVTPIRGVHRFHTKGKLAPRFVGPYKIVSRRGEVAYQLELPQSLAGVHNVFHVSQLKKCLRVPTEEANLEQIEVQEDLTYVERPTRILEIDERKTRNXVIRFCKVQWSNHSEEESTWEREDELKSAHPHLFASSSESRGRDSV

SEQ ID NO: 181005 - protein, 69 aa, Oryza sativa
  Clone ID: PAT_MRT4530_78320C.1.pep
MNGLDLYDHLQPLGHLNARTEYAFSGRKFMSPLAEELIDSTVWLLARLVRTCQPAAAAATRHAIRQDSC

SEQ ID NO: 181006 - protein, 100 aa, Oryza sativa
  Clone ID: PAT_MRT4530_78321C.1.pep
TVHQVVNDKVTNSDWKEVSTSVSLPKAALTADIKSLNDFGSNLNQTHCSGCHAPISANHYTANQWIGVVNSMKDRTSMSADDVRAVTIYLQRNAKDMAGS

SEQ ID NO: 181007 - protein, 390 aa, Oryza sativa
  Clone ID: PAT_MRT4530_78322C.1.pep
MAFAASHTASPSSCGGVAQRRSNGMSPVVAMASTINRVKTAKKPYTPPREVHLQVKHSLPPQKREIFDSLQPWAKENLLNLLKPVEKSWQPQDFLPDPSSDGFYDEVKELRERAKEIPDDYFVCLVGDMVTEEALPTYQTMLNTLDGVRDETGASPTTWAVWTRAWTAEENRHGDLLNKYMYLTGRVDMKQIEKTIQYLIGSGMDPGTENNPYLGFLYTSFQERATFISHGNTARHAKEYGDLKLAQICGTIAADEKRHETAYTKIVEKLFEIDPDYTVLAFADMMRNKISMTAHLMYDGKDDNLFEHLSAVAQRLGVYTARDYADILEFLVQRWKVADLTGLSGEGRRAQDFVCTLAPRIRRLDERAQARAKQAPVIPFSWVYDRKVQL

SEQ ID NO: 181008 - protein, 421 aa, Oryza sativa
  unsure (1)..(421): unsure at all Xaa locations
  Clone ID: PAT_MRT4530_78323C.1.pep
MKWSQHKIEFSEADHPKIATIPGRYSIVVEPTIRNIKLTRVLIDDGSSINLLFASTLDAIGIPRSELTPTDQPFHGITPESSSKTLGKITLPVTFGQADNFQTEQITFDVKEFDTAYNAIIGRGSLAMFMAASHYTYQVLKMPGPKWTITIQGNAKLXVKQKLQRFAPDXKQAIREELDKHLKVGFIREVLXNPVMLRKANGKWRMCVDFTDLNKACPKDHFPPPRIDQLVDSTACCESLSFLDAYSGYHQINMAKEDEEKMAFITPFGVFCYAKMLFGLISIGNTYQRGIQEALGDQLGRNIGAYVVDIVVKTKTGDLLIDDLRETFDNLRRYQMKLNSEKCTFREPLGKLLGFLVPGQGIEVNPEKIKGIENMKLPTRLREVQRLTGCMASLSRFVTRMGERGQPFFTLLKKQDKFEWS

SEQ ID NO: 181009 - protein, 136 aa, Oryza sativa
  Clone ID: PAT_MRT4530_78324C.1.pep
MTTQSNGTPVRREGLPEEEDDDGVLHCSPVRTSFRLGEGDAGDEHGEAQPMEATARAGGARLDGEGLPKVEDDDVLLDVGVDGAPASLRRNAGEVGEDEVAAMPREVVARSGAARHDGEGWPEFAGVVEREEDARR

SEQ ID NO: 181010 - protein, 99 aa, Oryza sativa
  unsure (1)..(99): unsure at all Xaa locations
  Clone ID: PAT_MRT4530_78325C.1.pep
IPTPPDKNGYGYLSDRIILGXFGYGYEYVYFLLDTNMHMVSGFPSNTDNNSDIRKNCFCIRVRSYSILIRMXDNPYLFPYSSYPYSFSYPVKKYENKYV

SEQ ID NO: 181011 - protein, 127 aa, Oryza sativa
  unsure (1)..(127): unsure at all Xaa locations
  Clone ID: PAT_MRT4530_78326C.1.pep
GWEIKNVKEMALKISQLPWAFGNHKSIAVTTRXADPEVVAQDVQEHTFPAIXSPKEDFVDPNGDGNAFVEGFLXQVVQQKSTXACVKAGWYAAKVIIQRFVCSCHRSIISYRAKLAQYCRIRVITHI

SEQ ID NO: 181012 - protein, 95 aa, Oryza sativa
  Clone ID: PAT_MRT4530_78327C.1.pep
NSCRFAGGSRDTCAKLSGCKIVDGNCKPPYVHHTLHPEAEESEVLDFCKLGCASSVCSTMSTLSSNEEANYAVDRCNDACHRFCTKEAETVTVVS

SEQ ID NO: 181013 - protein, 160 aa, Oryza sativa
  Clone ID: PAT_MRT4530_78328C.1.pep
KKICKQFLGAIAPEDEKAMHGEVVGQFNTIIKVNKIEDCIENLKSKPKPIAMYAFTNNERLKRRIVEETSSGSVTFNDAVVQYALESVPFGGVGHSGFGQYHGKYSFELFSHKKAVFKRSFLIEFMFRYPPWDERKIGTLRHVFSYNYFLLFFNLLGFRR

SEQ ID NO: 181014 - protein, 120 aa, Oryza sativa
  Clone ID: PAT_MRT4530_78329C.1.pep
LEWSELPSNRHRGFISAVQPKTGSNSQTKGRAIQPTTLLVGYSTLSLNVRLDDDELVQRTDMCFRDSSVVVIIESVQVDGPLPSQLTVVFIEDKSDRKASHGGTLFGLAMPPERVTFKKP

SEQ ID NO: 181015 - protein, 260 aa, Oryza sativa
  Clone ID: PAT_MRT4530_7832C.1.pep
MRIKTTPTPYAIRARRAATSLSFAYGVGVVFILRSELPDDEALPYKAMAAAVLANVVESSIDPDTTVVNKEGHVLTSKENHRGHSIVELPNGSARRRRDEAARHLSMHMGHTIAERLCKTQSAAGASERGRRGAEGRAAAGGLRSWAAACQRRRAPRAGVCSGTIVRRAASSSRRGLVMSRCNSWRSAGGEPPPPPPVAAPPSPAAARARNAHLLSAAAVERGGEEVADMWDPRGSHSESAVTSDKTGVKTVQDYTGFIS

SEQ ID NO: 181016 - protein, 1278 aa, Oryza sativa
  Clone ID: PAT_MRT4530_78330C.1.pep
MASMKYDLPLLDYKTRFSLWQVKMRAVLAQTSDLDEALESFGKKKTTEWTTGEKRKDRKALSLIQLHLSNDILQEVLQEKTAAELWLKLESICMSKDLTSKMHIKMKLFSHKLQESGSVLNHISVFKEIVADLVSMEVQFDDEDLGLLLLCSLPSSYENFRDTILLSRDELTLAEVYEALQNREKMKGMVQSDASSSKGEALQVKGRSEQRTYNDSNDRDKSKSRGRSKSRGKKFCKYCKKKIHFIKECWKLQNKEKRKSDGKASVVTSAKNSDSGDCLVVFAGCVASHDEWILDTACSFHIYINRDWFSSYKSVQNGDVVRMGNDNPREIVGIGSVQIKTHDGITRTLKDVRHIPGMARNLISLSTLDAEGYKYSGSGGVVKVSKGSLVYMIGDMNSANLYVLRGSTLHGSVTAAAVTKDEPNKTNLWHMRLGHMSELGMAELMKRNLLDGCTQGNMKFCERCVFGKHKRVKFNTSVHRTKGILDYVHADLWGPSRKPSLGGARYMLTIIDDYSRKVWPYFLKHKDDTFAAFKEWKVMIERQTEKEVKVLRTDNAGEFCSDAFDDYCRKEGIVRHHTIPYTPQQNGVAERMNRTIISKARCMLSNARMNKRFWAEAANTACYLINRSPSIPLNKKTPIEIWSGMPADYSQLRVFGCTAYAHVDNEKLEPRAIKCLFLGYGLGVKGYKLWNPETNKTFMSRSVVFNESVMFNDSLPTDVIPGGSDEEQQYVSVQVEHVDDQETEIVGNDVNDTVQHSPPVLQPQDEPIAHRRTKRSCGAPVRLIEECDMVYYAFSCAEQVENTLEPATYTEAVVSGDREKWISAMQEEMQSLEKNGTWELVHLPKQKKPVRCKWIFKRKEGLSPSEPPRFKARLVAKGFSQIVGVDYNDVFSPVVKHSSIRTFFSIVAMHDLELEQLDVKTAFLHGELEEEIYMDQPEGFIVPGKEDYVCKLKRSLYGLKQSPRQWYKRFDSFMLSHGFKRSEFDSCVYIKFVNGSPIYLLLYVDDILIAAKSKEQITTLKKQLSSEFDMKDLGAAKKILGMEITRDKNSGLLFLSQQSYIKKVLQCFNMHDAKPVSTPIAPHFKLSALQCANTDEDVEYMSRVPYSSAVGSLMYAMVCSRPDLSHAMSLVSRYMTNPGKEHWKAVQWIFRYLRGTADACLKFGRTDKGLIGYVDSDFAADLDKRRSLTEYMAIAETCKESVWLKGLFAELCGVDSCINLFCDSQSAICLTKDQMFHERTKHIDIKYHYVRDVVAQGKLKDEGLIHATRRNLSQGGVC

SEQ ID NO: 181017 - protein, 776 aa, Oryza sativa
  Clone ID: PAT_MRT4530_78331C.1.pep
MVFLIVSASSFLIRLPLVARARLPNPTSSSYTSRSRSRALLLLPASSPLRAFCPASRRPSPATCSAAYASSSMATDDNPLLADFDFPPFDRVEPIHVRPAVRTLLARLEGELTDLEKGVQPTWGKLVEPLERIVDSLEVVWGTVDHLKAVKDSSDLRAAVEDVQPDKVKFQLRLGQSKPIYQAFNAIRNSSDWETLSEARKRIVEAQIKEAVLSGVALEDEQREKFNQIEQELEKLTQKFSENVLDATKKFEKLITDKNEIDGLPATALGLAAQTAASKGHENASAENGPWIITLDAPSYIAVMQHARNRALREEVYRAYLTRASSGDLDNTNIISQILKLRLEKAKLLGYKNYAEVSMAQKMATVDRVEELLEKLRAASWDHAVKDMEDLKAFAKESASPEANDLAHWDLSFWSERLRESKYDINEEDLRPYFALPKVMDGLFSLANRLFGVSVEPADGLAPVWNSDVKFYCVKDSSNSPVAYFYFDPYSRPSEKRGGAWMNVVFSRSRVLARNGSPVRLPVAHMVCNQTPPVGDKPSLMTFREVETVFHEFGHALQHMLTKQDEGFVSGIRGVEWDAVELPSQFMENWCYHNCFVGARNTLLSIAKHYETGELLPEEIYAKLVAAKNFRAGTFSLRQIRFASVDMELHTTYDPNGSLSIYDVDRRVAERTQVLAPLPEDKFLCSFSHIFAGGYAAGYYSYKWAEVLSADAFSAFEDVGLDNEKAIEETGRRFRETVLALGGGKSPLEVFVSFRGREPSPEALLRHNGLLPVAAL

SEQ ID NO: 181018 - protein, 679 aa, Oryza sativa
  Clone ID: PAT_MRT4530_78332C.1.pep
QVTTQAVLTQSSDLDEALESFGKKKKDEWTAEEKRKDRKALLLIQFHLSNDILSKVLQEQTAAELWLKLETGSMLNHISVFKEIVANLVSIEVQFHDKDLGLLLLCSLPSSYANFRDTILLSREELILLEVYEALQNREKMKGDCLIVFAGCVAGHDEWIFDTACLFHICINRDWFSSYKFVQNGDVVRMGDDNPREIVGIGSVQIKTHDGMTRTLKDMRHIPRMVRNLISLSTFDAEGYKYSSSGGVVKVSKGSLVYMIGDLNSAKLYVLRGSTLHGSVTATTVSNDEPSKTNMWHMRLGHMSELGMVELMKRNLLDSCTQGNMKKETIVRHHTTPYTPQQNGVAERMNRTIISKARCMLSNARMNKRFWAEATNTALINKSPSTPLNKKTPIELRVFGCTAYAHVDNGKLEHRAIKCLFLGYGLGVKGYKLWNPETKRIVMCKSVVFNESVMFNESLSTDVIPGGFDEEHQYVSVQVEHVDDQEIEIVDNDVHDTVKHSSPVLQPQDQPIAHRRTKRSCGALVHLIEECDMVYYAFSCAEQVNTHEPAAYTEAVVSDDREKLISAMQEEMQSLEKNGTWELVRLPKQKKTIHCKWIFKGNEGLSLSELRRFKASIVAMHDLELEQLDVKTTFLHGELEEEIYMDQPEEFIIPSKEDYICKLKRSLYDLKQSPRQWYK

SEQ ID NO: 181019 - protein, 75 aa, Oryza sativa
  unsure (1)..(75): unsure at all Xaa locations
  Clone ID: PAT_MRT4530_78333C.1.pep
AFKQESNCPAFVAADEVLIIKSLTHKEINAVIKELPNPVYLFQGIVLRRGAKGTGMKSIELALXMCDIIDMYGFT

SEQ ID NO: 181020 - protein, 889 aa, Oryza sativa
  Clone ID: PAT_MRT4530_78334C.1.pep
MASMKYDLPLLDYKTRFSLWQVKMQAVLAQTSDLDEALESFGKKKSTEWTAEEKRKDQLWLKLESIYMSKDLTSKMHIKMKLFSHKLQESGSVVFKEIVADLVSMENKEKRKSDGKASVVTSAENSDSGDCLVVFAGCVASHDEWILDTACSFHICINRDWFSSYKSVQNGDVVRMGDDNPREIVGIGSVQIKTHDGMTRTLKDVRHIPGMARNLISLSTLDAEGYKYSGSGGVVKVSKGSLVYMIGDMNSANLYVLRGSTLHGSVTAAVVSKDEPSKTNLWHMRLGHMSELGMAELMKRNLLDGCTQGNMKFCEYCVFGKHKRVKFNTSVHRTKGILDYVHADLWGPSRKPSLGGAHYMLTIIDDYSRKVWPYFLKHKDDTFAAFKEWKVMIERQTEKEVKVLRTDNGGEFCSDAFDDYCRKEGIVRHHTIPYTPQQNGVAERMNRTIISKARMNKRFWAEAANTACYLINRSPSIPLNKKTPIEVWSGMPIEVWSGVKGYKLWNPETNKTFMSRSVVFNESVMFNDSLPTDVIPVRLIEECDMVYYAFSCAEQVENTLEPATYTEAVVTGDCEKWISAMQEEMQSLEKNGTWELARLVAKGFSQIAGVDYNDVFSPVVKHSSIRTFFSIVAMHDLELEQLDVKTAFLHGELEEEIYMDQPEGFIVPGKEDYVCKLKRSLYGLKQSPRQWYERLRGTADACLKFGRTDKGLVGYVDSDFAADLDKRSAICLTKDQMFHERTKHIDIKYHYVRDVVAQAAADGGGELRRGRTEGASGRPGSWREGGTTAAQASGRREEVATAAAAQAPGRREEAGEGAGAGASVRKEGGRSGGGARSEGVAAPAPALRRRPRPRQQGAGFGSSSSMSRRRHSSSSSSSLGPVPAHRRRH

SEQ ID NO: 181021 - protein, 525 aa, Oryza sativa
  Clone ID: PAT_MRT4530_78335C.1.pep
LNHISLSLLYLYLYYYKNLRCFYRDFSRSPRRSGRLRLRLPPEPPGLPLVGHLHLFRKPLHRTLARLAARHGAVFRLRLGSRRVAVVSSAPAAEECLGPHDLAFADQPRLPSGEILSYEWSTMGTASYGPYWRHIRRITVTELLSAHRVQHFAGVNAREVRALARRLYRRAAAAAAAGARTRVELKSRLFELLMNTMMSMICERTFYGADDDEVSEEARWFRSVVKETMELSGASTVWDFLPAPARWLDAGRMTRRMRELSDSRTRFLQRLIDDQRKDMDADSDDHAPAKRRTMIGVLLSLQRKDPDSCPDQLIRSLCIGSLQAGTDTSAATVEWAMSLLLNNPGAMARARGEIDACVGQPAARLLEAADLPKLHYLRCVVMETLRLYPPVPLLAPHESSADCVVAGFHVPQGTMLLVNTFAIHRDPQVWDEPEAFIPDRFADGKNEGKMVIPFGMGRRGCPGENLGMQMVGLALGTLIQCFDWERVGEELVDMRECSGLTMPKELPLEALYQPRASMVDLLTKI

SEQ ID NO: 181022 - protein, 26 aa, Oryza sativa
  Clone ID: PAT_MRT4530_78336C.1.pep
AYVITNLVTFKSKCMSHYTQNIFVFK

SEQ ID NO: 181023 - protein, 637 aa, Oryza sativa
  unsure (1)..(637): unsure at all Xaa locations
  Clone ID: PAT_MRT4530_78337C.1.pep
GDVVHMGDDNPRXSWTHDGMAHMMKVVRHILGMARNLISLTRLDAEGYKYSGSGGVVKVSKGSLVYMIGDLNSAKLYVLRGSTLHGSVSAAIVSNNEPSNTNLWHMRLGHMSEFGMAKLMKRNLLDGCTQGNMKLCEHCVFGKDKRVKFNTSVHRTKGILDYLHADLWGPSRKPSNGCARYMLTIIDDYSRKVWTYFLKNKDDTFVAFKEWKVMIKRQIEKEVKVLRIDNGGEFCSDAFDDYCRKEGIVRHHTIPYTPQQNGVAECMNRTIISMARCMLSNAHMNKCFWAEAANTACYLINRLPSIPLNKKTPIKVWSDVIPGGSNEEQQYVNVQVEHMDDQETEIVDNDVHDTVQHSPPVLQPQDQPIAHRRTKRSCGALVRLIEECDMVYYAFNCAKQVKNTHEPAAYTEAVVSGDREKWISTMQEEMQSLEKNDTWELVRLPKQKKTVRCKWIFKRKEGLSLSEPPRFKARYLGGTTAACLKFGRTDKGLVGYVDSNFLSDLDKRRSLTGNVFTIGSCAVSWKATLQPVVAQSTTEAKYMVIAEACKESVWLKGLFAELCGVDSCINLFCDSQSPYTSLKIRCSMRGKSTLISSTIMFVGGMSRGPLPKPAETIKERQSGQKPSLDEGRARGEA

SEQ ID NO: 181024 - protein, 885 aa, Oryza sativa
  Clone ID: PAT_MRT4530_78338C.1.pep
MASMKYDLALLDYKMRFSLWQVKMRAVLAQSLDLDEALESFGKMKNTEWTTEEKRKDRQALSLIQLHLSNDILQEVFGAGLDETMDNYTSRGQNGRFSGQIYKEVSHSRNGGGRFTAQIDKDGQTKLELEAKGEALQISGRSEQRTYNDSNDRDKSQNGRGRSKSRGKKFCKYCKKKNHFIEERRKLQNKEKRKSDGKASVVTGPENSDSGDCLVIFAGCVAGHDEWILDTIKTHDGTTHTLKDVRHIPGMARNLISPSTLDAEGYKYSGSGGVVKGNMKFCEHCVFGKHKRVKFNTSIHRTKGILDYVQADLWGPSRKPSLSGARYMLTIIDDYSRKVWPYFLKHKDDTFVAFKEWKVTIERQTKKEVKVLRTDNGGEFCLDAFHDYCRKEGMVRHHTISCTPQQNGVAERMNRTIISKARCMLSNAHMNKRFWAEAANTICYLINRSPTIPISKKTPIDVWFGMPADYSQMRVFGCTAYAHVDNGKLEPRVIKFLFLGYGSGVKGYKLWNPETNKAFMSRSVVFNESVIFNDSLSTDVIPGGSDEEQQYVSMQPQDEPIAHRRTKRSYGAPIRLIEECDMVYYTFSCGEQNSSIRTFSSIVCMHDLELEQLDVKTAFSHGELEEEIYMDQPEGFIVPSKQDYVSLQCASTDEDVEYMSRVPYSSAVGFLMFGMVCSRPDLSHAMSLVSRYMANPDKEHWKAVQWIFRYVRGTTGTCLKFVRTDKGLVGYVDSDFNADLDKTSQSAIYLTKDQMFYKRTKHIDIKYHYVRDVVAQGLGVCEIRGSYLPVQPRGPTAWPSPHTSEDVEAARGPRGATSRPSGPRATSPRGPRPATTWRGERVRRRLRLNRHQCAAPQPSLTAFNVVRADVRCCPIDPRQFGVIRL

SEQ ID NO: 181025 - protein, 781 aa, Oryza sativa
  Clone ID: PAT_MRT4530_78339C.1.pep
MASMKYVLPLLDYKTRFSLWQVKMRAVLAQTSDLDEALKSFGKKKSTEWTAEEKRKDRKALSLIQLHLSNDILQEVLQEKTAAELWLKLESICMSKDLTSKMHIKMKLFSHKLQESGSVLNHISVFKEIVADLVSMEVRGRSEQRTYNDSNDRDKSQSRGRSKSRGKKFCKYCKKKNHFIEECWKLQNKEKRKFDGKASVITSADNSDSEDCLVVFAGCVASHDEWILDTACSFHICINRDGFSSYKSVQNGDVVRMGDDNPRMARNLISLSTLDAEGYKYSGSGGVVKRNLLDGCTQGNMKFCEHCVFGKHKRKSVAYFLKHKDDTFAAFKEWKVMIERQTEKEVKVFRTDNGGEFCSDAFDDYCRKEGIVRHHTIPYTPQQNGVAERMNRTIISKARCMLSNARMSKRFWAEATNTACYLINRSPSIPLNKKTPIEVWSGVKGYKLWNPETNKTFMSRSVVFNESVMFKDSLPTDVIPGGSDEEQQYVSVQVEHVDDQETEIVSNDVNDTVQHSPPILQPEDEPIAHRRTKRSCGAPVRLIEKCDMVYYAFSCAEQVENTLEPATYIEAVVSGDLVKHSSIRTFFSIVAMHDLELEQLDVKTAFLHGELEEEIYMDQPEGFIVPVDDMLIATKSKEQISTLKKQLSSEFDMKDLGAAKKILALQCASTDEDVEYMSRVPYSSAISSLMYAMVCSRPNLSHAMSLVSRYMANPGKEHWKAVQWIFSQSAICLTKDQMFHERTKHIDIKNHYVRDVVAQGKLKGEGLFHAIRRNLSQGGVC

SEQ ID NO: 181026 - protein, 221 aa, Oryza sativa
  unsure (1)..(221): unsure at all Xaa locations
  Clone ID: PAT_MRT4530_7833C.1.pep
RSKQRKIKKRRRRLHSTGSLTKATPNPPHHQPHCRTLPLMNDCKEKGIYCVSGLGFGGPGARAAVHANGRPRSNRSKMDGRDRSGPRRFTADDPDDVSGDVTDSGGGSAEETARAAHARRRTAAPGRKRRAPRRRGQHGELTGDLNGGGRPTDGDGDEEEAAGTFGSTTAKLLLGSEAAAKAHGDGNGEGNLGLERKKXIRIELDPKAFQSDLTDDSKGEK

SEQ ID NO: 181027 - protein, 1136 aa, Oryza sativa
  Clone ID: PAT_MRT4530_78340C.1.pep
MVSMKYDLPLLDYKTRFSLWQVKMRAVLAQTLDLDEESGSVLNHISVFKEIVADLVSMEVQFDDEDLGLLLLCSLPSSYANFRDTILLSHDELTLAEVYEALQNREKMKGMVQSDASSSKGEALQVRGRFERRTYNDSNDHDKSQSRGKKLCKYCKKKNHFIEECWNLQNKEKRKSDGKASVVTSADNSDSGDCLVVFAGCVANHDEWILDTACSFHICINRDWFSSYKSVQNGDVVRMGDDNPRVIMGIGSVQIKTHDGMTRTLKYVRHIPGMARNLISLSTLDAEGYKYSGSTLHGSVTAAAVSKDEASRTNLWHMRLGHMSELGIAELMKRNLLDGCTQGNMKFCEHCVFDAFDDYCRKEGIVRHHTIPYTPQQNGVAKRMNRTIISEARCLLSNARMNKRFWAEAANTACYLINRSPSIPLNKKTPIEVWSGMPADYSQLRVFGCTAYAHVDNGKLEPRAIKCLFLSYGSGVKGYKLWNPQTNKTFMSRSVVFNESIMFNDSLPTDVIPGGSDEEQQYVSVQVEHVDDQETEIVGNDINDIVQHSPPVLQPQDEPIAHRRTKRSCGAPVRLIEKCDMVYYAFSCAEQVENTLEPATYTEAIVSGDREKSISAMQEEMQSLEKNGTWELVHLPKQKKHVRCKWIFKRKEGLCPSEPPRFKASIVAMHDLELEQLGVKTTFLHGELEEEIYIDQLEGFIVPGKEDYVCKLKRSLYGLKQSPRQWYKRFDSFMLSHGFKRSEFDSCVYIKFVNGSPIYLLLYVDDMLIAAKSKEQITTLKKQLSSEFDMEDLGAAKKILDLSHAMSLVSRYMANPSKEHWKAVQWIFRYLRGTANACLKFGRTDKGLVGYVDSDFAADLDKRRSLTGYVFTIGSCVSTTEAEYMAIAEACKESVWLKALFAELCGVDSCINLFCDSQSAICLTKDQMFHERTKHIDIKYHYVHDVVAQGKLKANFYRSGAEAEAGPLGRAPGDARGCGGGAPAKRIVILFRVPPLYTSYDGGARHRHVLEVVVVNLAVLEDIRGGGPVQAGVEGGVPKQAAAADQLPGVCSREDTARDHLHQRRLRRGQRAQAAGAVRLHANLPPHLHHRDAADVRVGAPKHLLPHRPLRVAGGVRSAATIARPSEVHLCRRPPE

SEQ ID NO: 181028 - protein, 659 aa, Oryza sativa
  Clone ID: PAT_MRT4530_78341C.1.pep
MASMKYDLPLLDYKTRFLLWQVKMRAVLAQTSDLDEALESFGKKKSTKWTAEEKRKDRKALLLIQPHLSNDILQEVLQEKTTAELWLKLESICMSKYLASKMHIKMKLFSHKLQESGSVLNHISVFKEIVADLVSMEVQFDDEDLAEAYEALQNREKMKGMVQSDASSSKGEALQNKEKRKSDGKASVVTSAENSDSGDCLVVFAGCVASHDEWILDTTCLFHICINKDWFSSYKSMQNGDVVRMGDDNPCEIVGIGSVQIKTHDGMTRTLKDVRHIPGMARNLISLSTLDAEGYKYSGSGGVVKVSKGSLVYMIGDMNSANLYVLRGSTLHGSITAAAVSKDEPSKTNLWHMRLGHMSELGMAELMKRNLLDGCTQGNMKFCEHCVFEWKVMIERQTEKEQNGVAERMNRTIISKARCMLSNARMNKRFWAEAANTACYLINRSPSIPLNKKTPIEVWSGMPADYSQLRVFGCTAYAHVDNGKLEPRAIKCLFLGYGSGVKGYKLWNLETNKMFMSRSVVFNESVMFNDSLPTDVIPGGSDEEQQYPQDEPIAHHRTKRSCGAPVRLIEECDMVYYAFSCAEQVENTLEPATYTEAVVSGDREKWISAMQEEMRSLEKNGTWELVHLPKQKKPVRCKWIFKRKEGLSPSEPPRFKARF

SEQ ID NO: 181029 - protein, 108 aa, Oryza sativa
  unsure (1)..(108): unsure at all Xaa locations
  Clone ID: PAT_MRT4530_78342C.1.pep
SRSNEDHFSSYALLAISCMQTPQQQIKMFLGQSYRQYQLQSPVLLQQQVLXSPYNESVRQQVWHRRQSPYLANPAAINKLRKTNQSPGQSFFNNQNGHQQNLHLFREH

SEQ ID NO: 181030 - protein, 1479 aa, Oryza sativa
  Clone ID: PAT_MRT4530_78343C.1.pep
MAKPLDLPLLLIPVMVVILISVSFAQTNVTSGASVQAVAGAGWSSPSGHFVFGFYATDGGLAVGVWLATAPSITVTWTASRNDTPATGGALRLTYDGRLLWTGANGQDRTVAAPPQPAVAAAMRDDGNFVLYAANATVAWSTFAAPTDTLLAGQDLAPGAQLFSSVSATSRATGKYRLTNQLNDGNLVMYPAGTMNVAAAAYWDTGTFQIGFPLTLRLDASGVLYLVGNNGSYTKNLTKASAAQAVEQAHYHRVTLDPDGVLRSYRHGLLSSGGWKTDVEWIGPSDRCHVKGACGFNSYCVLDRDAQPSCLCPPGFDLIDAGDAAGGCTASSGAGECTGGREPTLAACMSDCFCVAALLDTNDGTCTKQQLPLRYGRAGGGYTMFVKTGGAASPALGGGGGGNHHHHRLRRASTVALVCVGLLTFVALCALLASARLLWLNQRMVRRRVALADAEALDEEAPLRSYSYEELEHATYSFRHPLGRGAFGTVFKGTLRRGGERTVAVKRLEKLVEDGEREFQREESGSVLNHISVFKEIVADLVSMEVRGRSEQRTYNDNNDRDKSQSRGRSKSREWKVMIERQTEKEVKVLRTDNGGEFCSDAFDDYCRKEGIVRHHTIPYTPQQNGVAERMNRTIISKARCMLSNVHMNKRFWAEAANTACYLINMSPSIPLNKKTPIGVWSGMPANYSQLRVFGCTAYAHVDNGKLEPRAIKCLFLGYGSGVKGYKLWNPETNKTFMSRSVVFNESVMFNDSLPTDVIPGGSDEEQQYVSVQVEHVDDQETEIVGNDVNDIVQHSPPVLQPQDEPIAHRRTKRSCGAPVRLIEECDMVYYAFSCAEQVENTLEPATYIEAVVSGDREKWISAMQEEMQSLEKNGTWELARLVAKGFSQIAGVDYNDVFSPVVKHSSIRTFFSIVAMHDLELEQLDVKTTFLHGELEEEIYMDQPEGFIVPGKEDYVCKLKRSLYGLKQSPRQWYKRFDSFMLSHGFKRSEFDSCVYIKFVNGSPIYLLLYVDDMLIAAKSKEQITTLKKQLSSEFDMKDLGAAKKILGMEITRDRNSGLLFLSQQSYIKKVLQRFNMHDAKPVSTPIAPHFKLSALQCASTDEDVEYMSRVPYSSAVGSLMYAIVCSRPDLSHAMSLVSRYMANPGKEHWKAVQWIFRYLIGTADACLKFGRTDKGLVEYVDSDFAADLDKRRSLTGYVFTIGSCAVSWNATLQPVVAQSTTEAEYMATAEACKESVWLKGLFAELCGVDSCINLFCDSQSAICLTKDQMFHERTKHIDIKYHYVRDVVAQGKLKVCKISTHDNPADMMIKHVPVAKVKDWFMLQEGICLKVEFVEFWVIHCDVKPQNILMDAAGTTKISDFGLAKLLQPDQTRTFTSVRGTRGYLASEWYRGAGPVMVKADVYSYGVVLLETVACRRSMEMEEAAGEEERTLAEWAYEWLLVKSEAKSAMSSDETVEAAEVERVVRVAMCFFLRCYY

SEQ ID NO: 181031 - protein, 232 aa, Oryza sativa
  unsure (1)..(232): unsure at all Xaa locations
  Clone ID: PAT_MRT4530_78344C.1.pep
MRMPEGPCIEAQQLAKEPKGTRGERGRGNRWAGSTSRGPEWDPLVGGSAHHERGARDXGARVRRGGRGARARLAVGADALDPVAAEVAPTWRLRGSHAGRRXEDDAAGRNGRRTAAASGGAIYGDAGEGEHTGRLHWTRGDEPTARIRRREFDGGGLWRRQPAARKEGNSDGATGVRFLRTRASTRPPESVSSVGLDGDTTREAGDMRALPSTGGDGGEHTASGGSGRGGAS

SEQ ID NO: 181032 - protein, 77 aa, Oryza sativa
  unsure (1)..(77): unsure at all Xaa locations
  Clone ID: PAT_MRT4530_78345C.1.pep
FPGERSSPFAHMLLLNQRYNSVITVPCHKKIQRRRLTDNTVEARLEPLHGLEAVDPVAGTXLCSCSGGGGRHAYQGG

SEQ ID NO: 181033 - protein, 363 aa, Oryza sativa
  unsure (1)..(363): unsure at all Xaa locations
  Clone ID: PAT_MRT4530_78346C.1.pep
VLDKDMPRKSFYCKRGVRQGDPLSPLPFVLGEDLLQXINKANQNNLISMPILTLENEFPIVQYANDTLLFLTASSKELFCLKAILNTSSSSTGLKINFSKSCMIPLNVQPDKVEHLSKMFGCLVGDLPFTYXGLPMGISRPKVIDFSPLVDRIETRLPATSSLLSYGDRLTMVNSVLSSLPIFYTCTLSLPKSVILSINRARRHCLWRGSDINSSRKSLILWDRVCQPKSKGGLGVIDLRLQNNALLMKNLHKFYNRHLVPWVKLTWSSYYSDKVPHALSLKGSFWWKDALQFVDIFRGLLKCTIGDGRTCLFWSDLWNDKIRQRSYPRAFSFARNQKDSIHLTSLMDLSXTFTLPLSKQAFQ

SEQ ID NO: 181034 - protein, 60 aa, Oryza sativa
  Clone ID: PAT_MRT4530_78347C.1.pep
HIYFLNLAIGAESISKGRVYASCFLTFYSFFLLALYYILAVTHHIDLLSFSFSHARGVKS

SEQ ID NO: 181035 - protein, 170 aa, Oryza sativa
  Clone ID: PAT_MRT4530_78348C.1.pep
LNVSVFYLIMPDLVHLYFVFSINSTLWRQIHLKHPLVINRRGSRGGEPEEEGAEDQHERDAVHGALQRPRPRRLPPPRRRLRVARRQPHSFDLSAAAAAALRRQRAPRSTTAASPPPRRLLSSPTDQQRGAARRGDRNTQVGDPALRCARAGDDELLAFLFAAAAAAASA

SEQ ID NO: 181036 - protein, 61 aa, Oryza sativa
  Clone ID: PAT_MRT4530_78349C.1.pep
MAQAGVALTYMGLSNDAHTARWQACSCRVIVAELRDEASNALGEAWPCATPPYLVQGSSGH

SEQ ID NO: 181037 - protein, 59 aa, Oryza sativa
  unsure (1)..(59): unsure at all Xaa locations
  Clone ID: PAT_MRT4530_7834C.1.pep
YFFFFXYTXXXIVXLSSTXXITXFXTIXTXEANXRXXXKRXTSXVSPQPXXKQXTSPXL

SEQ ID NO: 181038 - protein, 479 aa, Oryza sativa
  Clone ID: PAT_MRT4530_78350C.1.pep
MAQNWAEEAKKHLGEASNSYGMEKQNGSSAFPVSARSDGRGGIGSSGGALSSTRSGRRRGGDNGGLSTGSGGGLRTGDGGSSLRQIRWEGRRQDTHRRRQLYPLPDPVGGETAGYPQVTTTLLSARSCGRGGRRFTTMAPSKSILVVVFALFAVAASLPPSAAARDAQVFKPTVAVDVVHQEQQQQQQPAVNAIADVSQPSTSLVGLPGLPPLPPLPTIQIPGLPPLPQLPTIQIPGLPPLQPLPAIQIPGLPPLPQLPTIQIPGLPTLQPLPTIQIPGLPPLPQLPTIQIPGLPPLQPLPAIQIPGLPPLQPLPTIQIPGLPPLPQLPTIQIPGLLPLPPLPSIPITLGSPGAQIPINSQSALSTSTTPQVITECLSSLMQLMPCMEYLTKADEPAPPSIGCDSFKSLVEKAPICLCHGINGDISKFMPAPIDFARMMSLPATCGVAPPVEALTNGTSAAVDACSYSRCCSISGAICV

SEQ ID NO: 181039 - protein, 81 aa, Oryza sativa
  Clone ID: PAT_MRT4530_78351C.1.pep
LDEASAVGEAMAMCNGLLKSKKKIFLITSNCSPQTIDLCQNRAGGFNLNVILTDPKDFDYTSCDLCRVLVHYPSPEGEVLG

SEQ ID NO: 181040 - protein, 35 aa, Oryza sativa
  unsure (1)..(35): unsure at all Xaa locations
  Clone ID: PAT_MRT4530_78352C.1.pep
KXHSRKSHAKSNALSGDKWVSNGWVFQGVTESQRV

SEQ ID NO: 181041 - protein, 37 aa, Oryza sativa
  Clone ID: PAT_MRT4530_78353C.1.pep
PLLELQRKNFPSWIPTWKPDLTLTILNYLTVYEVLRI

SEQ ID NO: 181042 - protein, 60 aa, Oryza sativa
  Clone ID: PAT_MRT4530_78354C.1.pep
MGTGGGATGGRERSAMGGEQRVQALKMLWSTGHSILAFLGGFWGGGEPATLKSNSPAVAW

SEQ ID NO: 181043 - protein, 37 aa, Oryza sativa
  Clone ID: PAT_MRT4530_78355C.1.pep
LAEFQARMAKSSMNGRARINLAFPHLFIYLAYKPGFE

SEQ ID NO: 181044 - protein, 1727 aa, Oryza sativa
  Clone ID: PAT_MRT4530_78356C.1.pep
MDGNIPEYGGSGIENEGIDFDLEDMLRHFEPEVLTGTRRGLDNWEALEKAAKELLYDEAKGCDKDYSVLRSVLELLRLKARHGWSDTSFNDLMDLLRVMLPKPNLLPTNTYEVKKLICPLSLGVQKIHACENHCLLYRKEFADLDSCPTCGTSRYKMDNGATDGEVVDKDDAPVDENKKIARMVMWYLPVKDRLKRLYSNRDDAELMRWHQEGRKIDGKIQHPADARQWKNFDALHPEFAKDPRNVKFALSTDGMNPFGDLSSTHSTWPVLLTMYNLPTWICQKRKYILLSILIQGPRQPGINVDVFLEPLMEDMQELWEEGLRMWDEYRREHFTLHAIIFIMINDLLANFSLSGQFKGKFGCLICIDKTSYKYLTSLTKGRSIFELTKNIKVVFGKPKKKPVKRKKRTDQDTTDAPLDESNQPFKKNSIFFSTIGTLLDIPSKTKDGLKSRTDLVNLDIRRGLHPKELPNGKIEIPPACYSLTPDEKKSLCRCLHSVKVPTACQLEMFFPPAYFNMMEHLIVHIVPQIIEIGQLYLNQMWAYKRYMSVLKGYVRNRAHPEGSMIEGYTTKEVVECCIDYMKDAEPIGVTLPLHEGRLAGTGIVGKKRFYDEDFKDVAEAHSSILQQLAIVEPYIQEHMNEIRARNPRITDIWICKEQKQKFPEWLKEKDLPLGVSLEEKTLCRLANGPTSLVISWQGYDISGNRFYTMFKDRKSAAQNSGVRVEAFDTSGEKKSYYGIIQDIWELDYGLNIQILVLRCQWVRDTTNVFIDDYGLTVVDRSKLGHKDNPWVLAERVAHVFYVSDPSDDKMAIAVPGKQNIVGIDSIEDASDYNQYDDVPLFTDFPNRIKEVETSLDEDLFSSARKDGVSKIPQIWAARLLSTSPLPPSSPSSTSPSPPLPLLHRALAAFFPELHLALAAVASSPPRPFSPPLLHLARAAAVFSRPHRPASVADASSPVSTDAATASSGADAATASSTASEIRTAAGLFSTPSRPMPASRAPSSRRPPRPPPLGVKSTVKPLASATKDAAIVLPKPAPSSSPSSRRPPRRQATAGHLATNPPAASYLLPKPPRSRKWNLVRVGTNCLKEVDAPECASKMSGKTALAGTEPTVNKPDGQDSSVGHRTDVTNNPQHEKDVGKVPESSEESWRTLSDPFELELAQLQYERPEDDPDYIPIEQATQRPRDHRERTRRRAGELVQRKKRGEKGRNLMSKETYYILALDDDGKPVEPQHVRAKFSTSCGALAKLHGPLNVDKWKHKNKTPFEELGTILAAEWDKFVAKMTTPQALERRKKMSDLAKKNIYPHGLGSSGYAGHEKKWQTTEEKFAAEDKPLIVQPLNKQTRNWVWARTSGQVTEEGEMLLDCPDIQNVTTSLQQIVQKEDRMNWNVGFPQEAQSYKKRDAYKAKMRQEITDQVIQQVTQQFYSLAAQHPQAFPDLVPHGRAGKTKEVASGLAIPGRQFHNSPIPADYARVQVARVNGDQMSLELDIPTPEGIELLGDAPSPAPQSYLALPLDEHVPPPQPDTSKEQPKTCEARKLIPIMMSVVGLTDKMQSWTSDEVPKEYEYGKPFLPFNLMCELPWPMRLMHEWYLRASELGLGMITVHVPEGAFKDGPNANFAFSFKDLHAFFKMDKMNINLVGAWCLLAFHEKNDYIKRLHKRKMAEVGNYLATSFLAHSDKRVIMVPYHFGEHYILFLVYPMDQTVVVLDPADYDKDAYMKAHGRYKKHG

SEQ ID NO: 181045 - protein, 1074 aa, Oryza sativa
  unsure (1)..(1074): unsure at all Xaa locations
  Clone ID: PAT_MRT4530_78357C.1.pep
LYCRSWMYSKKRAHPTFLKEAAKFVEVAKAHAVRENLRSVFCPCKVCKNEXLLQDPNEVLSHIVEQGFKEGHKIWTFHGEVGGRNEVMDDFCFDDAENFIIKDMSQGNIPECGGSDIENEGIEFDLEDMLWHVEPEVLTGRRXGLDNWEALEKAAKDLLYDEAKGCDKDYSMLRSVLELLRLKARNELSDTSFNDLMDLLRVMLLKPNLLPTNTYQVXKLICPFSLGVQKIHSCENYCILYSKKFADLDSCPTCGTSRYKTGNGASDGEVVDKDDAPVDEKKKIPRMVVWYLPVKDRLKRLYSNRDDAKLMGWHXEGKKNDGKIRHPADARLWKNFEALHLEFAKDPRNVRFALSTDGMNPFGDLSSTHSTWPVLLTVYNLPTWICQKRKYILLSILIQGPRQPGINIDVFLEPLMEDMQELWEEGLXMWDKYRREHFTLHAIIFVTINDLPANFSLSGQFKGKFRCLICIDKMSYKYLTSSTKGVYMRHRRFLPQRHRCHVKARLFDNTVENDLAPETRTGGSVFELTKDIKVVFGKPKKKPIKRKKRTDQENTDAPVEESNLPFKKHSIFFRYLNYWKDLEVRHAIDVMHLEKNVFDSTIGTLLDILSKTKDGLMSWTDLVNLDIRHELHPKELPNGKIDIPPACYSLTPEEKKKLCRCLHSVKVPTGFSANVRKLVSLKDLTISGYNAHDCHKMLTVFLPIAIRAVKPVHTRLVITKLCYFFNRVSQKVFDPEELGPLQKFAIETACQLEMFFPPAYFNMMEHLIIHIVPQIFEIGPLYLHQMXAYERYMSVLKGYVRNRAHPEVSMIEGYTTEEVVECCIDYMKDAESIGVTPXLHKGRLVGTGIIGKKRFYDEDFKDVAEAHSSVLQXFAIVEPYIQEHMNKIRACNPRRMAIWIXKNXKRKFPEWLKEKDLPLGESLEEXTLRRLANGPTSLVTSWQGYDIGGYRFYTMFKDKKSTAXNSGVRVEAFDASGKKKSCYVIIQDIWELDYGLNIPIPVLRCXWVRDTTGVSIDNYGLMIVDRSKLGHKDDPWFLVECVAQVFYVNDPSILQIMVCGRYRTEFTNVSHLAP

SEQ ID NO: 181046 - protein, 63 aa, Oryza sativa
  Clone ID: PAT_MRT4530_78358C.1.pep
QPLLTKSKFLPREPARTAAAAMSGRGKGGKGLGKGGPKRHKKVLRDNIQGITKPGIRSWQEAA

SEQ ID NO: 181047 - protein, 778 aa, Oryza sativa
  unsure (1)..(778): unsure at all Xaa locations
  Clone ID: PAT_MRT4530_78359C.1.pep
MVDTSFNDLMDLLRVMLPKPNLLPTNTYQAKKLICPLSLGVQKIHACENHCILYRKRFADLDSCPTCGTSKYKTGNGASDGEVVDKDDALVDENKKISRMVMWYLPVKDRLNRLYSNRDDAELMRWHQEGRKIDGPRQPGINIDVFLEPLMEDMQELWEEGLRMWDEYRREHFTLHAIIFVTINDLQANFSLSGQFKGKFGYLICIDKTSYKYLTSSTKGVYMRHRRFLPQRHRWRAKARLFDNTVENFLAPETRTGRSVFDLTKKKPVKRKKRTDQDTTDAPLEENLEVRHAIDVMHLEKNVFDSTIGTLLDIPSKTKDGFKSRTDFVNLDIRHELHPKELPNGKIEIPPACYSLTPDEKKSLCRCLHSVKVPTGFSANVRKLVSLKDLTISGYNAHDCHKMLTVFLPIAIRVVKPVHTQLVITKLCYLFNRVSQKVFDPEELGPLQTFAIETACQLEMFFPPAYFNMMEHLIVHIVPQIIEIGPLYLHQMWAYERYMSVLKGYVRNRAHPEGSMIEGYTTEEVVECCIDYMKDAKPIGVTPPLHEGRLAGTGIVGKKRFYDEDFKDEKDLPLGDSLEEKTLRRLANGPTRLVTSWQGYDIGGYRFYTMFKDRNSAAHNSGVRVEAFDASGEKKSYYRIIQDIWELDYGLNIQIPVLRCQWVRDTTCVFIDDYGLTVVDRSKLGHKDDPWVLAERVAQVFYVNDPSDDKMAIAVPGKQNIVSIDSIEDVSDYNQYDDVLLFTDFPNRXHRIKEVETSLDEDLFLSARKDGVSKIVKH

SEQ ID NO: 181048 - protein, 486 aa, Oryza sativa
  unsure (1)..(486): unsure at all Xaa locations
  Clone ID: PAT_MRT4530_7835C.1.pep
WWASVKREIAEYVPVCDVRQRVKAEHQKPAGLLQPLKIPEWKWEEIGMDFITGLPRTSSGHDSIWVIVDRLTKVAHFIPVKTTYSGSRLAELYMARIVCLHGVPKKIVSDRGSQFTSNFWKKLXEEMGSKLNFSTAYHPQTDGQTERVNQILEDMLRACALDFGGSWDKNLPYAEFSYNNSYQASLQMAPYEALYGRKCRTPYEVAYQLELPQSLAGVHNVFHVSQLKKCLRVPTEEANLEQIEVQEDLTYVEKPIRILETNERRTRNRVIRFCKVQWSNHSEEESTWEREDELKVGFEFVSDSFFPIFPSSSPAAVGLCRRLRAPLNGPPVSPLPAATLAFASRRRKSSSAPCAAVVSAVAVAREDRRRGRQVVAVLVRPFAVAGDRRSLVAVVNPKVSAVSSSSPSPSVDLPPPFWSPRRRSPASVRRPSRPLRRAAAAVGDVTADVIGVVRHSVVSGESVFAGEEFEEFQGQQGKSHRSQTTL

SEQ ID NO: 181049 - protein, 227 aa, Oryza sativa
  Clone ID: PAT_MRT4530_78360C.1.pep
ARRAAGVAVARWAWWSSGRRWAWWGCGGHGGAAAAGRKATAGGGCADLPATDASSPTARHRRLLSRCPPRPHCHRHLLSRPPPPDLLATSHAGAPRPPPIPSLPPASLARAVTACHRRHPSHPQVEDDDDELGCGGGDGGNRRGLGAEGRRRPPPPPSPLRRPPPRQAESGTARGRAVGRSGSTGARASPPLRRHPLRPPSSELLPPSRAPPPPSSPQVLPNTVLEV

SEQ ID NO: 181050 - protein, 1119 aa, Oryza sativa
  unsure (1)..(1119): unsure at all Xaa locations
  Clone ID: PAT_MRT4530_78361C.1.pep
MDRTWMYNTKRAHPTFLKEAAKFVELAKAHAASENLRSIFCPCKVCKNEILLQDLNEVLSHIVERGFKKGYKIWTFHGEAGGRNEELDDFCFDDAENFIIEDMSXETSGNTVXSGIENEGIDFDLEDMLRHVEPEILTGTRRGLDNWEALEKAAKELLYDEAKGCDKDYLVLRSVLELLRLKARHGWSDTSFNDLMDLLGVMLPKPNLLLTNTYQAKKLICPLSLGVQKIHACENHCVLYRKEFADLDSCPTCGTSRYKTGNGASDGEVVDKDDAPVDENKKIPRKVMWYLPVKDRLKRLYYNRDDAELMRWHQEGRNIDGKIRHPVDARQCXNFDALHPEFAKDPRNVRFALSTDGMNPFGDLSSTHSTWPVLLTMYNLPTWICQKRKYILLSIIIQGPRQPGINIDVFLEPLMEDMQELWEEGLRMWDEYRREHFTLHAIIVVTINDLPANFSFSGQFKGKFGCLICIDKTSYKYLTSSSKGVYMHHRQFLPQRHRWCAKARLFDNTVENFLAPKTRTGRSVFKLTKNIKVVFGKPKKKPVKSXKRTDQDTTDAPVEESNQSFKKHSIFFRYLDYWKDMEVRHAIDVMHLEKNVFDSTIGTLLDIPSMTKDGFKSRTDLINLDIRHELHPKELPNGKIEIPPACYSLTPDEKKXLCTCLHSVKVPTGFSANVRKLVSLKDLTICGYHAHDCHKMLTVFLPIAIRVVKPVHTRLVITKLCYFFNRVSQKVFDPKELGPLQTFAIETTCQLEMFFPLAYFNMMEHLIVHIVPQIIEIGPLYLHEMWAYERYMSVLKGYVCNRAHPEGSMIEEYTTEEVVECCIDYMKDAEPIGVTPSLHEGQLAGTGIVGKKRFYDDDFKDVAEAHSSVLQQLTILEPYIQEHMNEIRARNPRRTDIWICKEQKRKFPKWLKEKDLSLGDSLEEKTLRRLANGPTSLVTSWQGYDIGGYGFYMIFKDRKSTTQNSGVRVEVFDALGEKKSYYGIIHDIWELDYGLNILIPVLXCQWIREXTGVFIDDYGLMVVDRSMLGHKDDPWVLAERVAQVFYVSDPSDDKMAIAVLGKQNIVGIDSIQDASDYNQYDDVPLFTGFPNRIKEVETSLDGDLFLSARKDGVSKIVKH

SEQ ID NO: 181051 - protein, 88 aa, Oryza sativa
  Clone ID: PAT_MRT4530_78362C.1.pep
MGWKRKTHHGGSCHQQQSCPSHGNELSAIDEEVSHLTRLKSEPCERTRASLHAGKKRHISTFKLLSGRESNCLGIGRFSSADCSYALR

SEQ ID NO: 181052 - protein, 64 aa, Oryza sativa
  Clone ID: PAT_MRT4530_78363C.1.pep
YKKILSPCGYYSQLLSVLGVFSFCSLLCYEFWSPFWPCRLSLLRHLIPSNSSSMQTHHSNLLLL

SEQ ID NO: 181053 - protein, 516 aa, Oryza sativa
  Clone ID: PAT_MRT4530_78364C.1.pep
MGWKRKTHHGGSCHQQQSCPSHGNELSAIDEEVSHLTRLKSEPCERTRASLHAGKKRHISTFKLLSGRESNCLGIGRFSSADCSYALRKHLPVKGPWCVDDMDSEAYISQFSADGSLLIGGFRGSHIRIYNAEKKWTIHKDITCKKLRWTVSDIALSPDQRYLAYSSLSPIVHMVDIQNGMRESHANITQVHEGLEFSNDDDGFSFAIFSVKFSKDGRELVVGNNNESICIYDIGSNKVTERIHAHSADVNAVTFADEGSDVLYSGSDDSLCKVWDRRCNKRGKQVGVLTGHLDGITFIDSRGDGHYFISNCKDQTIKLWDIRKMSSTVKDCTPKAYEWDYRWMTYPSEARYFKHPYDQSLSTFRGHSVLRTLIRCYFSPIHRLITPKPPFSLGMHTLSQEARDFLVEEGLLPLHRQFLRAVSMALMTVTGSCNEDITGQSFSAHRATGKIVEKLRWHGSIIRDCSWHPYFPTLVSSSWDGYLVRWEATEDDKDPSMLKTGKQRMHPEGYTFSFVF

SEQ ID NO: 181054 - protein, 415 aa, Oryza sativa
  Clone ID: PAT_MRT4530_78365C.1.pep
MSCVTTVRYAVKFNGTILSTFAPSRGLCQGDPLSPFLFLLVADGLSLLLEEKVRLGAITPVKVCRGAPSISHLLFADNTLLFFKAKREEAVVIKEVLECYADGTDQLINPGKCSIMFGDISDLSIRQEISSVLQVANSDFDDKYLGFPTPQGRMHKGKFQNLNERIWKRTMLWGKKFLSAGGKEILIKAVLQSIPVYVMSLFKLPGSVCNDLVKAIRNFWWGADNGKRKTHWRGQEDDFVAWHLDKWSCFSVRSAYHLALSLKNMDQAESSSDVNLRRSWGLLWKCNVPQKVKIFSGKAANNCLATSENKKKRKLEQVDVCGWILDHLGSLEEERNMFLMLLWRIWEACGTSSQAAMGHRKQEVTDIPWTKPGMGWMKLNVDGSYDATVGTGGIGAILRNSSGEVIFSACDSIDE

SEQ ID NO: 181055 - protein, 150 aa, Oryza sativa
  Clone ID: PAT_MRT4530_78366C.1.pep
VKFLNKQSILICLFHVKKHCREKTGSTFSDKTKKDLHKDFEDIVNNCLTREEFESLWPQMIEKYSLHNVKYFEHMWKTREQFVPVYFKTDFCPFIQSTALSEGTNARFKRSVGPKHSVMSFMNEYESIYDTIFSTEYSKDHESRTKRPDF

SEQ ID NO: 181056 - protein, 70 aa, Oryza sativa
  Clone ID: PAT_MRT4530_78367C.1.pep
FKHVPTSCSDNCHSGNAHSLGKVLLRPTYFWVKLCPYDKQPLYRDHMAQVLISRRADWDHIPCPGNPGRV

SEQ ID NO: 181057 - protein, 476 aa, Oryza sativa
  Clone ID: PAT_MRT4530_78368C.1.pep
MEAVIAECRPKPLFTTGPFLSAVGGGGGGVDRISGLPDDLLFVILSKLPVRDAVATSALSPRWKSLWSSVPLRLDDAGLLHRRDGTRLGREGVAATVSAVLAAHPGPVPAASVGCCLSSDDQGYQLGGWLRALAAKGVRQLCLMGAPWSPRAALPSAVFSCSSLRRLFLGSVQCNWDLIPDHACFPELREIQICNALMKSQDLSLVLAVCPALETVEILASRNKIPTVRMSSHTIRNTLLWKSVAKEVNVLDTPCLSRVVLWQDLLLPHSRYNSKVTISRATKMRISGYLDTGINTLVINETTVKVNTNISFKTLIPSVKVLGLSVHFGVRKEALMSISFLRCFPEVETLHITSKTDKASEAEQFSFWGKVDPVECVTSHLKKLVFHGMPWCPGNLEFLKFIVEGAYLLEKVLIVLPKGTYTSMHSVITKLKLAPLTSASWASHICKMEVVQSSQGTLSYQRASDHSVDDPLDYSL

SEQ ID NO: 181058 - protein, 40 aa, Oryza sativa
  Clone ID: PAT_MRT4530_78369C.1.pep
HTSILCRHRGGNRRGLLVCQALCTPKEAQGRNRRGIAAPP

SEQ ID NO: 181059 - protein, 140 aa, Oryza sativa
  Clone ID: PAT_MRT4530_7836C.1.pep
GCRNSARGDEAVRESLGIHKGTVTTWERCNHDLLYKKQIVSSVEYHLSLITQGYRGLVYSGDHDSVVSLIGTQGWLRSLNLSITHGWRPWYVNSQVVGFTRTYSNNLTYATVKGAGHTAPEYMPKECLAMVDRWLSGEPL

SEQ ID NO: 181060 - protein, 171 aa, Oryza sativa
  unsure (1)..(171): unsure at all Xaa locations
  Clone ID: PAT_MRT4530_78370C.1.pep
EGXAAAAASPRERRRPTAIRRHRARPAALLMAXPPRRXSMXIDPPPXAXIPAVXAQSAARRQCRHHQSPSTAGSDDDAAIMDDDDRHAAGRDDPAPXAHPPXAAXAGIIXHLARPSAMMMMIAAMMMMMIRSASAGMHSYRRXYISSPALYDPIEYTPTRPSSPRIDMGEG

SEQ ID NO: 181061 - protein, 49 aa, Oryza sativa
  Clone ID: PAT_MRT4530_78371C.1.pep
ATSAKRSSCTSRSTSSGGRHGRGQGRGWHASMGLWESSRSRRGMTIAEI

SEQ ID NO: 181062 - protein, 483 aa, Oryza sativa
  Clone ID: PAT_MRT4530_78372C.1.pep
MAPPPRLPAGAAALLLLLAVASRAAADGNAVDVGVNWGSQLSHPLLPKSVVQMLKENGILKVKLFDADPWPVGALVDSGIEVMLGIPNDMLETMNSYGNAQDWVKENVTSYGDKLKIKYVAVGNEPFLKAYNGSFMKTTFPALKNIQKALNEAGVGDKVKATVPLNADVYVSPDNKPSSGAFRPDIQGLMTDMVKFLHEHGSPFVVNIYPFLSLYQSDDFPFEFAFVDGGKTIQDKGGISYSNVFDANYDTLVTALKKAGVPSLKVVVGEVGWPTDGDKNANLKLARRYYDGLLKKLSKKEGTPLRPGKMDVYMFGLFDEDMKSILPGNFERHWGIFTYDGKPKFPMDLSGHGNDKPLAGVPGVEYLPKQWCVFDDGAEDKSKLPGNIQYACASGDCTALGYGCSCNGLDEKSNISYAFNMYFQMQDQDVRACDFDGLAKITTKNASARGCAFPIQIISAAAPAVAGVGLSAAALLALLMVLV

SEQ ID NO: 181063 - protein, 257 aa, Oryza sativa
  unsure (1)..(257): unsure at all Xaa locations
  Clone ID: PAT_MRT4530_78373C.1.pep
MDRVQLLLVGLPALLFLSDLSHIFAPPPPXSPAPPPPPAAPPSPSASPPPPASPPPASPPASAASPPPASPPASAAPSPPPSPRSXAEAIQANVDGAGYGTTVELQFCASCSYKGTAMTMKRMLETSFPGIHVILHNYPPPFPKRVLGKLVPILQVGAIATIMAGDHIFPRLGMVPPPWYYSLRANRFGTMATIWLFGNFAQSFLQSSGAFEVYCNGDLVFSKLAEQRFPSEFELRDLINSRLPDSLVGKNVGKSLS

SEQ ID NO: 181064 - protein, 326 aa, Oryza sativa
  Clone ID: PAT_MRT4530_78374C.1.pep
MRQLKYVGNFHPYDTAFKRDCKAGKLPNYVVIEQRYFDLKLLPGNDDHPSHDVAHGQRLVKDVYEALRSSPQWHEILFVITYDEHGGFFDHVPTPVAGVPSPDGIVSAAPVSFAFDRLGVRVPTLLVSPWIEPGTVVHDPASCGGAPEPTSQFEHSSIPATVKRIFGLKEFLTRRDAWAGTFDTVLTRAAPREDCPATLPEPPRLRAAEAEEHREVSEFQAELVQLGAALNGDHDGEGYDPEVFVRGMTVAGAAQYCRDAFDRFREECHRCRDGGMDGSHVPMLQPASASASSSAPAADPPATAPAPATPSALSKLCGCFPCFNAS

SEQ ID NO: 181065 - protein, 616 aa, Oryza sativa
  Clone ID: PAT_MRT4530_78375C.1.pep
MLFCCPASPPPPIQASSLPPFRTNSLSPTVRGGNAAPRRPLARSFSAKNRSPRARNRHAAAGDGGGYGSPEQEGRGESSLPNAEALASSLRDCGGADGVRRVHAVAVRSLDSLGTFVANNLISAYARFDEVSDAREVFDEMPERSVVSWTAMMNVYLKLGHYGEVVRLFFDMVGSGVQGNSLTFVCLLKSCGERCDAKLGQQVHCCIVKGGWSNVIVDSAIAHFYAQCGDVASASAIFDKMAYRDVISWTTMITAYVQHGHGGQALRMFSEMVSEGFRPNEFTVCSVLKACAEEKAVRFGKQLHCAVLKKMYKNDIHIGSALVTMYARCGEVFDAQAVFDMMPRRNTITWTSMISGYAQSGHGEKAILLFRKMKMRRVFVNNLTIVGLLSACGSLQSPYLGKELHAQIIKNSMEENLQIGSTLVWFYCKCGEYTYAARILEAMPDRDAISWTALISGYNNLGHNVEALKSLDDMLWDGVKPNTYTYSSALKACAKLEALQYGRKIHGFVNKTQDFSNVFVGSSLIDMYMRCGKVDEARSVFDAMPEHNLVTWKVIITGFAQNGLCEEALKYMYLMQQEGHEVDDFVLSTVLTSCGDLQWKSISFSDSVAGSVSARQ

SEQ ID NO: 181066 - protein, 78 aa, Oryza sativa
  Clone ID: PAT_MRT4530_78376C.1.pep
MAERQARGAGRPASTSSPAVTSPSSPSPTGDVAASEGSKASAGEQGVGGGEAVLGRGQLDPEFEVRNQHEESIKKHSD

SEQ ID NO: 181067 - protein, 354 aa, Oryza sativa
  Clone ID: PAT_MRT4530_78377C.1.pep
MNREKSPIPGDGGDGLPPQATRRAGPPAAAAAAEYDISRMPDFPTRNPGHRRAHSEILSLPEDLDLCAAGGGDGPSLSDENDEELFSMFLDVEKLNSTCGASSEAEAESSSAGAAAAVAAAEELVGASPGTEGMSSAEAKKAVSAAKLAELALVDPKRAKRIWANRQSAARSKERKMRYIAELERKVQTLQTEATTLSAQLALLQRDTSGLTTENSELKLRLQTMEQQVHLQDALNDTLKSEVQRLKVATGQMANGGGMMMNFGGMPHQFGGNQQMFQNNQAMQSMLAAHQLQQLQLHPQAQQQQVLHPQHQQQQPLHPLQAQQLQQAARDLKMKSPMGGQSQWGDGKSGSSGN

SEQ ID NO: 181068 - protein, 37 aa, Oryza sativa
  Clone ID: PAT_MRT4530_78378C.1.pep
FSIDWLCLQFVTRIKGRIIPIAYSLAPASKVTFLGGR

SEQ ID NO: 181069 - protein, 368 aa, Oryza sativa
  Clone ID: PAT_MRT4530_78379C.1.pep
MNREKSPIPGDGGDGLPPQATRRAGPPAAAAAAEYDISRMPDFPTRNPGHRRAHSEILSLPEDLDLCAAGGGDGPSLSDENDEELFSMFLDVEKLNSTCGASSEAEAESSSAAAHGARPKHQHSLSMDESMSIKAEELVGASPGTEGMSSAEAKKAVSAVKLAELALVDPKRAKRIWANRQSAARSKERKMRYIAELERKVQTLQTEATTLSAQLALLQRDTSGLTTENSELKLRLQTMEQQVHLQDALNDTLKSEVQRLKVATGQMANGGGMMMNFGGMPHQFGGNQQMFQNNQAMQSMLAAHQLQQLQLHPQAQQQQVLHPQHQQQQPLHPLQAQQLQQAARDLKMKSPMGGQSQWGDGKSGSSGN

SEQ ID NO: 181070 - protein, 1664 aa, Oryza sativa
  unsure (1)..(1664): unsure at all Xaa locations
  Clone ID: PAT_MRT4530_7837C.1.pep
ATPPPRGTGDLRDQINGRREARRTRGDANRSRRHVSSRRHDRGNRPNEDRDYDDRDRRGPDNTGHGRRRNDDDEGDRRRDNSERRRQDSRDPGRHPRNRTPEPSDPSSSSSSSASSSSSDRHPRRSRDHRQPTAPSAGCRAFGRSLRDVRWPERCRPGAIEKYDGSTDPEEFLQVYSTVLYAAEADDNALANYLPTALKGSVRSWLMHXPPYSISSWSDLWQQFVTNFQGTYKRHVIEDDLHALTQNSGESLREYVRRFNECRNTIPEITDASVIRAFKSGVRDRYTTQELATRRITTTRRLFEIVERCAHVDDAIRRQNDKPKTRGEKKSAADAFESNKKKNRKNGKRKAQAEVLAVEYANPPKRPDPQGSDTKKSWCPIHKTDRHSLEDCLVFKKSLEKHMAFEKGKRVRVVERNEESPPHESDSAYPDSDLHVSHIXAAPRRRYPIVVEPTIRNVKVARVLIDGGSSINLLFASTLDAMGISQSELTPTDQPFHGITPQSSSKPLGKITLLVTFGQANNFRTEQITFDVAEFDTAYNTIIGRTALAKFMAASHYAYQVLKMPGPKGTITIQGNAKLAVQCDKRSLDMVEQTHTPPATSEPPKKVSKPNKTPKPDSAIKIVPLSSANPDKTELALITFFRDNADVFAWQPSDMPGVPREVIEHKLMVRPDAKPVKQRLRRFAPDRKQAIREELDKLLKAGFIRXVLHPEWLANPVMVRKANGKWRMCADFTDLNKACPKDHFPLPRIDQLVDSTAGCELLSFLDTYSGYHQISMAKEDEEKTAFITPFGVFCYVKMPFGLITAGNTFQRTVQGALSNQLGNNVEAYVDDIVVKTKTSDSLIDDLRETFDNLRRYRLMLNPEKCTFGVPSGKLLGFLVSGRGIEANPEKIKAIENMKSPTRLKEVQKLTGCMAALSRFVARMGERRQPFFALLKKQDNFVWTQEAKEAFIALKRYLSNPPVLVAPQPNEKLFLYIAATPYSVSTVIVVERDKVQRPVYYVSEALHDAKTRYPQIQKLLYAIIMTSRKLRHYFQAHRVIIVSSFPLGEVVRNKDVVGRIAKWVVELSQFDVHFVPRTAIKSQVLADFVADWTMPDNKSDNQGDNETWTMAFDGALNSQEAGAGFILTSPSGDQFKHAIHLNFRATNNTAEYEGLLAGIXAAAALGAKRLIVKGDSELVANQVHKDYKCSNPELSKYLAEVRKLEKRFDGIEVRHVYRKDNVEPDDLARRASRREPLEPGTFLDVLTKPSVKEVSGEVGPSTPDISSEVTEAERAVADIETTDDWRTPLIKFISSEELPEDDTEAEKITRKAKIYCMVGNDLYKKAPNGILLKCVSTDEGRQLLLDIHEGICGSHAAGRTLVGKAFRXGFFWPIALKDACDMQTHKATCTSASDNPSDLAVLVLGARHTWAIPTRTGRLQIXFVAIDKFTKWIEAVPTGEIKADNAIKFIRGIFCRYGLPHRIITDNGSQFISADFQNYCIGLGVKICFASVSHPQSNGQVERANGIVLQGIKTLLWAVRTTPTTSNKETPFFLVYGSEAMLPSELRHQSTRVQKYSDENQEEQRDIDVNLLEEHCDRVAVRAASYQQALRRYHKKRIRARILSIGDYVLRRVQTQAGRNKLSPKWEGPYTITQVLRPGAYKIADGDGCELAISWNIDQLRKFYV

SEQ ID NO: 181071 - protein, 87 aa, Oryza sativa
  unsure (1)..(87): unsure at all Xaa locations
  Clone ID: PAT_MRT4530_78380C.1.pep
TPSPLPAPPRPPPTXAPPPPAPPPSHHPPXPQPPPLSASPCTRAPPPPGTRWPATSRRRRRGRRRGRAGQRWPGSRRAGRGCCRRSP

SEQ ID NO: 181072 - protein, 72 aa, Oryza sativa
  Clone ID: PAT_MRT4530_78381C.1.pep
SGDLGVGPLAEDEIRTTGAVRAVGGGGVDAPPGGSSETGVRAERRPGSVGADGREPEVEVEAGGGPRAFLPH

SEQ ID NO: 181073 - protein, 104 aa, Oryza sativa
  Clone ID: PAT_MRT4530_78382C.1.pep
MPKATRVEEELSDDKLLEDVIPAVASGIMKWGNNLPLGSSIGSIAFRERRSKGLQVVAVGSRCYSCFPSSLRWLNSEPTTSAGKHAGDKWKRRGEGKKWKKARR

SEQ ID NO: 181074 - protein, 182 aa, Oryza sativa
  unsure (1)..(182): unsure at all Xaa locations
  Clone ID: PAT_MRT4530_78383C.1.pep
TLTCPSQNXYDLVYKKTHIFFLKALLGKNLHLVSIDFQNISKYLKFPNLIVLTKEKKETKKTNQAKDQPQKCKLTGALARDQTEARGDNGRRTILHPRGTHLLVHESAPLIHSLSLTSSLAAGHRHGRRRRSSSSSRRPPAPGGFSRAVAAALRWRCASPSWGIVRAGPPASTDGAPPPLAV

SEQ ID NO: 181075 - protein, 109 aa, Oryza sativa
  Clone ID: PAT_MRT4530_78384C.1.pep
MRYNKKTYGYDHIVCMHSAATSTPPWASSALAQPRYFSTRATRVMMRRLEQRIRKQERAAGSMHGWRIAHLKANHRLDLLKSDMRGDQLKVTAHMYRGTCSSYLPVHTR

SEQ ID NO: 181076 - protein, 99 aa, Oryza sativa
  Clone ID: PAT_MRT4530_78385C.1.pep
GTPGAEPGGQDKNQTLGGGSPPPIFISHPMGPPQNHFCNHLQGIMPQGPFGPLFQIIQSIPQFFFFGPGPPQFFKMAIQNPKICKMAPFNFQLFSWGFF

SEQ ID NO: 181077 - protein, 468 aa, Oryza sativa
  unsure (1)..(468): unsure at all Xaa locations
  Clone ID: PAT_MRT4530_78386C.1.pep
MATKQTSNSTMFFMIVLLILGSTVLGKEPPNPCLAPVPTPAKPPSIITPAKPPSTIAPTKPPIKSPPTIGPAIPPSTIAPAKPPTKPPLTITPAKPPTKPPPPIAPAKPPSTITPAKPPSTIAPTKPPIKSPPTIAPAIPPSTIAPAKPPTKPPPTIAPAKPPSTIAPAKPPTKPPPTIAPAKPPTKPPPTIAPAKPPTKPSPTITPASPPPSSLPPSVNPPKPKPLPKCPLLLTNLGGCISLGIGNSLMKYPCCSQLYNLQYDTAAACLCDAIKIDRCCPPLLLVALHRTLPSPAAPRARAGPPPXRRPRFHERWPPPPRPRLRERRRPQPQPRLHETQPPPLPWPRLRESRPPPLRPXPPRAPASTAAGHPSIYALRPDPAEAAPDPPPLRREESPPPRPSRRRRAAPSPPSPPPPSRGHPPLPPAHRRVPSPDPLPGAPDPPRPCRRRPPEPPTVARRSVLPRRG

SEQ ID NO: 181078 - protein, 62 aa, Oryza sativa
  Clone ID: PAT_MRT4530_78387C.1.pep
GSPGCRNRHEADLSLKSSCFIQETPNQYPLFYLEDGNGSSEQYLDHEMVEQASCCTAETCHA

SEQ ID NO: 181079 - protein, 70 aa, Oryza sativa
  Clone ID: PAT_MRT4530_78388C.1.pep
LERGSGNITGVCFSRSVLNTHVKVYLCCLNLSHLGCQNAFSARKHPRLTNNLSAAMVAVVIGAMCMRRYD

SEQ ID NO: 181080 - protein, 141 aa, Oryza sativa
  Clone ID: PAT_MRT4530_78389C.1.pep
MPELAMVTAARAIAEWDHPAADITHLVISTNAGAHTPGADKRLAALLGLRPARHPLHARLLRLAKDIADNTHGARVLVACAKVFLIAPVAPDEAHLDTLVAASLFGRGASAVIVGTNPRAPVKNPVFHMVSNRMGVRARVW

SEQ ID NO: 181081 - protein, 1519 aa, Oryza sativa
  Clone ID: PAT_MRT4530_7838C.1.pep
MSYYVDPCTNVPQYPLYPVYGYHPSTVARQVGGFGTQGSTTMSSSFVDNNVNTSLSQALPASTMLVWTQVGEIVFPFYTTTLISTGPPMTGNENAVATNQGDFMSKNPPVETENGSSTTSKLGKDSDTAKPCPSDMNHEPAKMTSEATRSWCPIHKTKKHTLQDCWVFLNVHAEIRACKERGIQRTSPTRDVYCPIHKTKNHNLSSYKVFLGAMKAPSPESYVPVRDNGKEQGATPASDRFVEVIDIDPHEPPVLHLLEDYGSSTMSVPQEVLAIDDVGTAFGRSLRDVRWPERFRPGAIEKYDGSTNPEEFLQVYSTVLYAAGADDNALANYLSTALKGSARSWLMHLPPYSISSWADLWQQFVANFQGTYKRHAIEDNLHALTQNSGESLREYVRRFNECRNTIPEITDASVIRAFKSGVRDRYTTQELATRRITTTRRLFEIVERCAHVDDALRRKNDKPKTGGEKKSATDASESSKKKNRKNGKRKAQAEVLAAEYANPPKRPDPQGSDTKKSWCPIHKTDRHSLEDCLVFKKSLEKHMAFEKGKRVRIVEKNEETAPHESDYAYPDSDLHISHIFGGSTTYSSNTLDAMGIPQSELTPTDQPFHGITPQSSSRPFGKITLPVTFGQANNFRTEQITFDVVEFDTAYNAIIGRTALAKFMAISHYAYQVLKMPGPKGTITIQGNTKLAVQCDKRSLDIVEQTPSPPATTEPPKKELALITFLRDNACMFVWQPSDMPGVPREVIEHKLMVRPDAKSVKQRLRRFAPDRKQAIREELDKLLKAGFIREVLHPEWLANPVMVRKANGKWRMCVDFTDLNKACPKDHFPLPRIDQLVDSTAGCKLLSFLDAYFGYHQISMAIEDEEKTAFIMPFGVFCYVKMPFGLITVGNTFQRTVQGALSNQLGNNVEAYVDNIVVKTKTSDSLIDDLREMFDNLRRYRLMLNPEKCTFGVPSGKLLGFLVSGRGIEANPEKIKAIENMKSPTRLKEKAKEAFIALKRYLSNPPVLVAPQPNEELFLYIAATPYSVSTVIVVEREKVQRPVYYISEALHDAKTRYPHIQKMLYAVIMTSRKLRHYFQAHRVTVVSSFPLGEVVRNKDVVGRIAKWVVELSQFDVHFLPRIAIKSQVLADFVADWTMPDNKSDNQGDNETWTMAFDGALNSQGAGAGFILTSPSGDQFKHAIHLNFRATNNTAEYEGLLARIRAAAALGAKRLIVKGDSELVANQVHKDYKCSNPELSKYLVEVRKLEKRFDGIEPSVKEVSGEVSPNTPDISSEVTEAERAVADIETTDDWRIPLIKFISSEELPEDDTEAEKITRKAKIYCMVGNDLYKKALNGVLLKCVSTDDDRHLLLDIHEGICGSHAAGRTLVGKAFRQVFFWPTALKDAFDMVQRCEACQFHSKHTKLPAQALQTIPLTWPFSCWGLDILGPFPRGQGGYRFLFVAIDKFTKWIEAVPTGEIKADNAIKFIRGIFCRYGLLHRIITDNGSQFISTDFQDYCIGLGVKICFASVSHPQSNE

SEQ ID NO: 181082 - protein, 478 aa, Oryza sativa
  unsure (1)..(478): unsure at all Xaa locations
  Clone ID: PAT_MRT4530_78390C.1.pep
MFRSPAAAAASALLRRLGPRVSGGGGGASTHRRFAPPVSTSILSRYSSAPTSSPSPPPPPPPPPSDAAADGDNRAESGEPGSSLSITIDRSGLYNPPEHSHEPSSDSELVKHLKSIIKFRSGPISVAEYMEEVLTNPQSGFYINRDVFGTSGDFITSPEVSQMFGEMTGVWAMCLWEQMGQPEKVNLIELGPGRGTLLATFFWRSSKFVNSTKALNINLVECSPTLQKVQYNTLKCEDEPIGDKTRTVSKLCGAPVHWHASLEQVPSXLPTIIIAHDFYDALPIHQFPPTAFLLHRSTRCGWASCXDLEKEYHIDGYPKAMEITEQIADRISSDGGGALIIDYGKDGIVSDSLQAIRKHKFVHILDNPGSADLSAYVDFASIRHSAKEASDDISVHGPMTQSQFLGSLGINFRVEALLQNCATDEQAESLRTGYWRLVGDGEAPFWEGPDDQTPIGMGTRYLAMAIVNKKQGTPVPFE

SEQ ID NO: 181083 - protein, 933 aa, Oryza sativa
  Clone ID: PAT_MRT4530_78391C.1.pep
MAEAVILLAVKKIGVALGNEAINQATSYFKKFVTQLTELQGSMGRIKRELRLMHEFLSRMDVRNRNNQTYEIWVEEVRMLVHRIEDIVDDYLHLVGHKQDTGWGTYLKKGFKRPNVLFSLNRIASSIKDAEANLVHLFQAKERWVWMAGGRATGSKSSSYIIETSRHLANISRSLDEDLVGVDENIRKLHEWLTSDELQREVIALHGMGGLGKTALAANVYRNEREKFECHAWVSISQTYSIKDVLKCLVTELDLKKKIQGNIGDMDTATLQNELKKFLMDQKYLIVLDDVWVPETVNDLFSIFVSNLKGSRVLVTTRIDGVAHLAFPDKRITLEPLSEKKSWELFCKTAFPRDKNHECPTKLTVLAQQIVSKCEGLPLAIVSVGRLLFVRDKTEEEFRRIQNQLDWELINNPSLEHVRNILYLSYIYLPTHLKSCFLYCSMFPEDYLITRKKLIRWWVAEGFIEERGGNTMEEVAEEYLKELVHRNMLQLIEMNGFGRIKSFRMHDIVRELAIDLCRKEHFGCSYNCENKHGKFLEGKDERRVVIHKLDKHINQAILNECHSLRCLITLDEATPPSPCLLHLVADKCRYMSVLELTGLPIEKVPDAIGDLFNLRHLGLRGSKVKHLPNSIEKLSNLLTLDLNETEIQEVPNGIVKLKKLRHLFVEKMNELYGREFRPRTGVRIHKGLEKLNELQTLQGLEVQDEVSLRRLGELRQMRSIRIWGVKESYCESLCESLQQMEFLSFLSVNASGKEEVLKLDGLNPLPPNLRKLNLRGILAEAGMLLGSPAAGDQNNHSLYSVHLSWSQLIEDPLPSLSRWSSLTDLMLTRAYVGEQFVFHQGWFPNLKELVLRDMPDLKRLEIHDGAMTSLQDLTLVNLSGLTEVPSGIELLSTLKNLGFWEITQDFLAALRQCHRIHHMQWWYSVRGETDGAL

SEQ ID NO: 181084 - protein, 165 aa, Oryza sativa
  unsure (1)..(165): unsure at all Xaa locations
  Clone ID: PAT_MRT4530_78392C.1.pep
FIPKFNXNFLVXLVPFPGILEEILGSPLGPKTNFFWPWGGPIPLGEXAXWFXLKTKKNSFIPFXGXGRXIYLXXKFPXPVYFGXFSXXAXSXAPWGGFXKXXPXSXXXXFXXLPKKGGGGAPGFXPPNFPPPPQKRLXXXXXIXXKXSPWGPGPFFLXKNDXVGK

SEQ ID NO: 181085 - protein, 123 aa, Oryza sativa
  Clone ID: PAT_MRT4530_78393C.1.pep
MEVKKVAMVAVCCMFILLFPGQQQQVAAMSRICRCYHECLPNCGLRNSRSFCKVFCGSCCVFNPVHNCTSTDAAAAAPAIAGDDCRMICLNSFCGEAATGYLFKYSRILCEQCNLVYELKDGV

SEQ ID NO: 181086 - protein, 87 aa, Oryza sativa
  Clone ID: PAT_MRT4530_78394C.1.pep
LSSSAAQSRRTTLLAAAAKILPPPFRPFSSLPMPSSTFLGCASVGNTTGRRRRRSSATGAPTPFSLPLLCTRLSSSVELQVSRRNTF

SEQ ID NO: 181087 - protein, 170 aa, Oryza sativa
  unsure (1)..(170): unsure at all Xaa locations
  Clone ID: PAT_MRT4530_78395C.1.pep
PAAAASSPRTLGKTYLKNGPFWGPKVAIAVLLPLWWVGAEVAGGARQCGWRPPHSKHTRTNHRKNKLKCTKYVTYKIFQSSTEKFLASKTXSCKXNLEILILLNPAKRGRIEYNLFYKCPWIYYLPDSESVXESYACLKKSISALPLPPQRHPATVAGGRRQRGWHCPVG

SEQ ID NO: 181088 - protein, 255 aa, Oryza sativa
  Clone ID: PAT_MRT4530_78396C.1.pep
MLPPRVAPSSLAAAAAAAPTYLAAAASTPASVWLPVPRGAGPGAVCRAAGKGKEVLSGVVFQPFEELKGELSLVPQAKDQSLARQKFVDECEAAINEQINVEYNASYAYHSLFAYFDRDNVALKGFAKFFKESSDEERDHAEKLIKYQNMRGGRVRLQSIVTPLTEFDHPEKGDALYAMELALALEKLVNEKLHNLHSVASRCNDPQLTDFVESEFLEEQVEAIKKISEYVAQLRRVGKGHGVWHFDQKLLEEEA

SEQ ID NO: 181089 - protein, 47 aa, Oryza sativa
  Clone ID: PAT_MRT4530_78397C.1.pep
ESEFSANVQEDMLRHVKQEVLAARSRELYNWQALEKALKDLLYDESN

SEQ ID NO: 181090 - protein, 81 aa, Oryza sativa
  Clone ID: PAT_MRT4530_78398C.1.pep
AGGGDGAAGRCSGEEGEAAGGRPATRGEGTGHGGGRNGGENHGRRQWLVAGENASVPGDWGRHSRGKTGEIEEESMGINCP

SEQ ID NO: 181091 - protein, 1080 aa, Oryza sativa
  Clone ID: PAT_MRT4530_78399C.1.pep
METILAGYTKDVVRSLGELAANEIAKVLCVKNEINKLKRKLETMSAIIRDAEQTVVQYETTRDWLKQLRGIAYEAENIIDRCRIEQERLQMFQPQECNPSSLFKCCRDVAVDYIIANDIHELNQELESIRSESTLLHLNPVAEDQIRLDLDVAPHLEPDIVGREVENDSDNLIQLLTRDYNTTCPLFAIIGTIGVGKTTLARKVYHKAAAMFETRLWVHVSKDLRHLTMWSDGMFSKAEIAEQQALLLSYLQDKRFLLVIDDVWGENVWDGRLEIQAQHGAPGSRVLVTTRDERVARRMGAIHLHRVKMLNEDDGWWLLRTRAFLDEGAGNMQDMGRRIVQKCNGLPMAIRRIGCHLRDVDHKEDEWGRVYSSDFCGISARIRSTINMSYLELPYYLKRCFLYCALYPEGSVIERQCITQQWIAEGFIVTQTNSTQRHSATVEEEAERCYDELLGRGLLLPENEACDVVGSKMPHLFRSFALLQSQDENFTGNPQDIGDVFKPCRLSVTNGGVESIRNGLKKLRNLRTLLLSGGTLNDRALSDIFLKFTHLRVLDLGNTQIDCVTASLGRMAHLRYLSFANTQIREIPGSIENLRMLRFLILRNCIRLNSLPESVGRLKNLRSLDMSGAGLNIVSFKFSQMRELNCLQGFLVSPSGTQNKCGWPFQELSSLSKLTSLQMLRIERELNAEGAKQSALREKRHLKELELCCSIDEQTTQIGRAENIKDVFEELAPAPSVVSIKMANYYGHEFPSWLSFPGLSELQRLTIDGCSHCSQLPSLGQMSNLKYLAIIDSNLSATIGPELRGKPDNGVAFPKLEQLLISEMSNLKSWSGIEEGDMPSLVDFRLERCPKLDSLPRWLEHCTALRSLRIDHADSLKTIENLPSLRELEVHRNKKLKRILNLESLEDLKVVHCLVLKVVHGVPSLRAVHSDDRNSTELPQWLQPQQPFVLKRLDIIGTEELLDKCSSASSTYWSAIQHADHVFAYLPDDTFYFSYTKSNSNFHRSARSLARSLYSSQSFVMPSITPSNDVIVPEENIRRNKRIEIGRSRSQSWVRTELFAVLLFVAAHLFFLSTTHASSH

SEQ ID NO: 181092 - protein, 1637 aa, Oryza sativa
  Clone ID: PAT_MRT4530_7839C.1.pep
MVHCFELCYAEGIVTISIRWYISGQSKTIQIAVPAVMAGLTMSFVISFTPLTIINDVVLGNNLFSSWFGTMPRFKPEYLFSTEGFVQELRTMSFAIGFGTAPLYAQIPHDRDEEKCRVKITLNSNREDIPSVARIAIGELRDRYNDQLADTEYRYHPRQPQGSDFGSYLEPAGIENDATTRHLVEMLWAMDESRAEVVIAAQDRENRNRGKICKLEDKVVRLEKELAALKGEAPPQKARVRLTARKRALFVPRYQLAPKVRVVEEEAVPVPANPPIVNMVLTRSNGNGPNNNNHNNNNGENPTLAQVLAQQAQLMNMMMQQLQNQQNQGNNHAPPQNKLAEFLRVRPPTFSSTTNPVEASDWLHAIEKKLDLLQCTDQEKVSFASHQLHGPTSEWWDHFRLNRTTAEPITWLEFTAAFRKSHIPSGVLSLKKKEFRKLTQGSRSITEYLHEFNRLACYAPEDVRTDEERQEKFLEGLNDELSYPLMTGDYHDFQKLVDKAIHQEDKYNRMEQKKRRIAHFKAQQGNSQRPRLAMGPQAVSQGGSSSVVRPQRQFFNNNAGNNNHNQAPRPVATPTQHQPAKREQGNKPGVCFNCGEPGHYSDKCLKPRRVKVVPAQNNSTTPASKSRVNHVAAAEAQGAPEVILGMFPVNSVPATVLFDSGTTHSILSMSFAGNHGMEIEDLRRPLMISTPSNQALSSQRSPSVRIEIQGVPFLANLILLESKYLEVILGMDWLARYKGVIDCANRKVTLTSNDGQVVTVHALPSEPLRSSLNQITLEEIPILRDYPDVFPDDLPGMPPKRDIEFRIDLVPGTTPIHKRPYRMAANELAEVKRQVDDLLQKGYIRPSSSPWGAPVIFVEKKDHTQRMCMDYRALNDVTIKNKYPLPRIDDLFDQLKGATVFSKIDLRSGYHQLRIKEEDIPKTAFTTRYGLFECTVMSFGLTNAPAFFMNLMNKVFMEYLDKFVVVFIDDILIYYRTKEEHEEHLRLALEKLREHQLYAKFSKCEFWLSEVKFLGHVISAGGVAVDPSNVESVTNWKQPKTVSKIRSFLGLAGYYRRFIENFSKIAKPMTRLLQKDVKYKWSEECEHCFQELKNRLLSAPILILPDPKKGLQVYCDASKLGLGCVLMQDGNVVAYASRQLRPHEKNYPTHDLELAAVVHALKIWCHYLFGTRTEVYTDHKSLKYIFTKPDLNMRQWRWLELIKDYDMRIHYHPGKVNVVADALSRKGYCNATEGRQLPWELCKEFERLNLGIVSRGFVAALEAKPTLIDQVREAQINDPDIQEIKKNMRRGKAIGYLEDEQGTVWLGERICVPENKELKDAILKEAHDTLYSIHPGSTKMYQDLKEKCWWAIKAEHQKPAGLLQPLKIPKWRWEEIGMDFITGLPTTSSGHDSIWVIVDRLTKVAHFISVRTTYSGSRLAELYMARIVCLHGVPKKIVSDRGSQFTSKFWKKLQEEMGSKLNFTTAYHPQTDRQTERVNQILEDMLRACALDFGGSWDKNLPYAEFSYNNSCQARLQMAPYEALYGRKCRTPLSWDQTGERQVFGTDILREAEEKLKKCLRVPTEEASLEQIEIQEDLTYVEKPIRILETDERRTRNRVMRFCKVQWSNHLEEEATWEREDELKSAHPHLFASSSQS

SEQ ID NO: 181093 - protein, 51 aa, Oryza sativa
  Clone ID: PAT_MRT4530_783C.1.pep
VIKNVKMNLNNRWKLTSLGGRRKKSIAPLLEKIYFICKKTISIACYHLSTN

SEQ ID NO: 181094 - protein, 118 aa, Oryza sativa
  Clone ID: PAT_MRT4530_78400C.1.pep
GLASLMRVLALPLTAMSASSPCGVCRSLVRDGAIARKLLFQLALDVADLHALRGCLVCLHHPPTVATLCFLVGLCQLVPHGEERETREGRERRGKGEQGRINLWVPTPHWMKILRETI

SEQ ID NO: 181095 - protein, 124 aa, Oryza sativa
  unsure (1)..(124): unsure at all Xaa locations
  Clone ID: PAT_MRT4530_78401C.1.pep
CECATRTVKGTDRRCGMRRRWRTGCSHRGDDRGTSHPDIIMVSFYVRTRHXVRPPTPYCPCLPSTVSVTPTLPPAASISLRLMCRTSFETFGVXALDPLARAACVYFQPHSFCFFRADRLFKTC

SEQ ID NO: 181096 - protein, 58 aa, Oryza sativa
  Clone ID: PAT_MRT4530_78402C.1.pep
MFSGGEDGREVSLELLEGVRVEALIKHRSRTGSFRLATLEGEEFNHSWNAASLNRFYV

SEQ ID NO: 181097 - protein, 114 aa, Oryza sativa
  unsure (1)..(114): unsure at all Xaa locations
  Clone ID: PAT_MRT4530_78403C.1.pep
AKGLVRTSSLHALLMAAMVDIYSAQLSELQMRFRGQXQAHREAQTARLTLCSQVLDRQITARQRIQPIFRRPGXALGLRMQCCQQLPDASXRCRCADIRRKWRSFKESMPMPLE

SEQ ID NO: 181098 - protein, 438 aa, Oryza sativa
  Clone ID: PAT_MRT4530_78404C.1.pep
MEKERKMEGERRVEATRRWVIAVGFWVQGFRLFPWLGVNFFLKDGMGVAASSLQILQASANLPMVAKPLLGLLSDAVPIRGHRRLPYVAIGALLQAISWLAIALWPAISLPVLTIFLLLSNFGASICEVANDAIVAEAGKQATLSSGSGQLQSFAWMFGSSAGALGNLVGGIALSYFSPKIMFLFFAILLVLQFCTTVAIPESSLQLPKADTNLSAVSSVRKQIKELSYALCMPEIFWSVIWFSLSYAAIPFLLGTMFFYQTEVLRLDSSVIGLSKVFGQVTLLAWSVAYNKYFKTTPAQKVLSVLQFLTALVMLSDVLFVQGIYRNFGIPDSMYTIVFSGLLEGLMLFKVLPFSVLVAKLCPSGCEGSLMAFVMSALALATIISGYLGVALAEFMGVSGGDFSALPTCLLIEAACTMLPLFFSSLIKERREKEKKEE

SEQ ID NO: 181099 - protein, 331 aa, Oryza sativa
  unsure (1)..(331): unsure at all Xaa locations
  Clone ID: PAT_MRT4530_78405C.1.pep
MAVAAAASSSPAVVAASPACRRVAPTGEKARGRVIGVRCLLIRTYSKLVVSHVDKSFEAKEEGMKRNLEAVRSMEKCFAGITVEHLPRDRNEEAGALAKSAASGGPHSPGIFFEVLYALSVPTESLDIMAFDQAELGEDPEDWRTPFVKYLKNGXAEAKRLQLRATRXKLTSGQLYRSGVLQPLLRCISFTEGEEIAKEIHXGVVRDEAMTPTELGANSSRVMFSGGEDGREVSLELLEGVRVEALEHMHEYAKSTSATYNKKVRSTELLPGHLVLRKKANLVAVGKLESKWEGPYLIKHRSRTGSFRLATLEGEEFNHSWNAASLNRFYV

SEQ ID NO: 181100 - protein, 63 aa, Oryza sativa
  unsure (1)..(63): unsure at all Xaa locations
  Clone ID: PAT_MRT4530_78406C.1.pep
MGSVHKYRDILLMKTTTTHGXSAQYATYTDPKHPGCVAVKDLLGRMTLAANIAQMTHTERKNA

SEQ ID NO: 181101 - protein, 574 aa, Oryza sativa
  unsure (1)..(574): unsure at all Xaa locations
  Clone ID: PAT_MRT4530_78407C.1.pep
EPEPVEQPCVMYSDGSWSHKGAGAAAVLTSPGGVPIRYATRLQFDTINNTTEYDAVLMGLRKAKALGVRRLLIRTDSKLVASHVDKSFEAKEEGMKRYLEAVRSMEKCFAXITVEHLPRGQNEEPDTLAKSAACGGPHSPGIFFEVLYAPSVPTESLDIMAIDQAELGEDPEDWRTPFVKYLKNGWLLEDEVEAKRLQLRATRYKXGQLYRSGVLQRLLRCISFAKGEEIAKEIHXGLCSAHQAARTVASKVFCQSVYWPTVLKVCVEQAKKCKSCQRHGRSQTAPQYELXPIAVVWPYARWGLDIIGPFPVARNGYKFAIVAIEYFSRWIEAESLGAITSAAVXKFVWKNIVCHFGVPKEFITDNGKQFDSDKFREMCEGPDLQIKFASVAHPQSNGAVEXANGKILEALKKRLEGAVKGKWPDEMLSVLWALRTTPTRPTKFSLFMLLYGDEAMTPTELEANSPRVMFSEGEDGREVLLELLERVRVEALEHMRKYAKSTLAPYNKKVQPIELLPGXRKKANPMAVGKLESKWEGPYLIKNRSRTGSFRLATLEGEEFDHSWNAASLKRFYV

SEQ ID NO: 181102 - protein, 94 aa, Oryza sativa
  unsure (1)..(94): unsure at all Xaa locations
  Clone ID: PAT_MRT4530_78408C.1.pep
PSSSRRDCCXRQARRTSDDSWCRCXEAISHMLGGIYRELGAPDVGHPMSEXFRGCRRGDIGAQQAASTPGSSCNVDIXNGGGGVCYXWLARSGY

SEQ ID NO: 181103 - protein, 215 aa, Oryza sativa
  Clone ID: PAT_MRT4530_78409C.1.pep
MAPMKLYGSTLSWNVTRCVAVLEEAGAEYEIVPLDFSKGEHKAPDHLARNPFGQVPALQDGDLFLWESRAICKYVCRKNKPELLKDGDLKESAMVDVWLEVESNQYTPALNPILFQCLIRPMMFGAPPDEKVVEENLEKLKKVLEVYEARLTKCKYLAGDYISVADLSHVAGTVCLGATPHASVLDAYPHVKAWWTDLMARPSSQKVASLMKPPA

SEQ ID NO: 181104 - protein, 54 aa, Oryza sativa
  Clone ID: PAT_MRT4530_7840C.1.pep
FGLFIYFFFFFFTYLTLQLPCNPKTNYQNNKNPPNHRPPTTNIKPIPKINQHYF

SEQ ID NO: 181105 - protein, 149 aa, Oryza sativa
  unsure (1)..(149): unsure at all Xaa locations
  Clone ID: PAT_MRT4530_78410C.1.pep
PVLVGDATMAEYHHQDHVVYPRAQRRPPGLGYPNGTQLPQXRALVKRQCESGQWHRPPTTHEQXRRDCCRQLSRQSTDSWCRCEAIXHMLGGIYRELGAPDVGHPMSEVFXGCRRGDLERAAASLPAFCNVDIPNGGGGVCYWLARSGY

SEQ ID NO: 181106 - protein, 156 aa, Oryza sativa
  unsure (1)..(156): unsure at all Xaa locations
  Clone ID: PAT_MRT4530_78411C.1.pep
ASPVVSVLSGDGDHAEYHHQDQVVYTPXPALSSQGMGYPDVPAPALPGQLVKQPVRQASGTATPPSRSRRDCCRQAQPAVDXTSWCRCEAISHMLGGIYRELGSPQMSGHPMSEVFPGCRRGDLERAAASLPAFCNVDIPNGGGGVCYXWLARSGY

SEQ ID NO: 181107 - protein, 187 aa, Oryza sativa
  Clone ID: PAT_MRT4530_78412C.1.pep
CPPAAPPRRRRRDLAVPQPDDASVERRHVEVAVPPQVSPPPHGHLPLLPRRRHEWRRRRRRRRRPPPPPRRRPPHRRRRRLPLAVAVACSARSGRSASSPPTPPPRREPAVPRRRRQAAEHRAAASPCAACSRRRPRGRYGHRRRRGCATGRRRRRGRRRATPRASGRPPPPPGGSRGGARWRPRAP

SEQ ID NO: 181108 - protein, 100 aa, Oryza sativa
  unsure (1)..(100): unsure at all Xaa locations
  Clone ID: PAT_MRT4530_78413C.1.pep
WHSPAVRAGPARTCLPARLPPVDXSWSRCRAITXHLGGIYQGARRTPDVGHTPCPRCSSGCRRGXTWSARRRASHGVLQXVTSPNGGGGVXCYWLARSGY

SEQ ID NO: 181109 - protein, 1642 aa, Oryza sativa
  Clone ID: PAT_MRT4530_78414C.1.pep
MAFEMYGMLVGNVSALTGEYVKPAYGGEKEAFLKKVVTPIYLTIAKEAERSKREKGNHSEWRNYDDLNEYFWSAECFRLGWPMRADADFFCQHLNSPDQRNETTRTEKQKGKVNFVELRSFWHIFRSFDRMWSFFILALQVMVILAWNGGSLGNIFDPVVFKKILSIFITSAILNLGQATLDIIFNWKARRTMEFAVKLRYVLKFTLAALWVVLLPVTYAYTWENPTGIIRAIKGWFGNGQNHPSLFVLAVVIYLSPSLLAAILFLLPFLRRILESSDYKFVRFVMWWSQLTTDQDNVENIVVSYYLRRRPDMTKQNPRLFVGRGMHESAFSLFMYTMFWIALLLIKFAFSYYVEIKPLVEPTKDIMKLPIHTFQWHEFFPKANGNIGVVIALWAPIILVYFMDTQIWYTIFSTLLGGIYGAFQRLGEIRTLGMLRSRFGSIPLAFNACLIPAEESDAKRKKGLKSYLHSRFERKHTDKEKIAARFAQMWNEIITSFREEDLINNKEKELLLVPYVADQALEIMQWPPFLLASKIPIAVDMAKDSNGKDRDLKKRLENDYYFKCAIEECYASFKNIIKDLVQGEPEKRVINTIFAEVEKYIADDKVITDLNMHALPDLYNKFVELVKYLEKNDKNDRDAVIKIFQDMLEVVTRDIMEDQLSSILESSHGGSYQRPEGTTTWDQEYQLFQPAGAIKFPVQFTDAWIEKIKRLELLLTVKESAMDVPSNLEARRRLTFFTNSLFMDMPDAPKVRNMLSFSALTPYYNERVRFSIKELQEENEDGVSTLFYLQKIYPDEWKNFQQRVEWDEELKENEDKNEELRLWASYRGQTLARTVRGMMYYRKALVLEAFLDMAKHEDLMEGYKAVESTDEQWKLQRSLFAQCEAVADMKFTYVVSCQQYGNDKRAALPNAQDILQLMRTYPSLRVAYIDQVEDRVEEKKMEPAYYSTLVKVALTKDSESTDPVQNLDQKWIKCESSFCDPVKLQHLHFFVFKVIYRIKLPGPAMLGEGKPENQNHAIIFTRGEGLQTIDMNQDNYMEEALKMRNLLQEFLTEHGVRRPSILGVREHIFTGSVSSLAWFMSNQEHSFVTIGQRLLANPLKVRFHYGHPDVFDRIFHLTRGGVSKASRSINLSEDIFAGYNSTLRGGNITHHEYVQVGKGRDVGLNQISKFEAKVANGNGEQTLSRDIYRLGHRFDFFRMLSCYFTTVGFYFSTLLTVVTVYVFLYGRLYLALSGLEEGLLTQRRYIHNHPLQVALASQSLVQLGFLMALPMMMEIGLEKGFGQALSEFIMMNLQLAAVFFTFSLGTKTHYYGRMLLHGGAQYRATGRGFVVFHAKFAENYRLYSRSHFVKGIELLILLIIYQLFGQSYRSTIAYIFVTFSMWFLVLTWLFAPFLFNPSGFEWTKIVDDWSDWNKWISNRGGIGVSPDKSWESWWEIELEHLKYSGTIGLFVEIILSLRFFIYQYGLVYHLNITGDKSILVYLISWLVILVVLLVMKTVSVGRRRFSADFQLFFRLIKFMIFVSFIAILIVLIAILHMTLRDIFVCFLAFLPSGWGILLIAQACKPLARRAGLWGSVRALARAYEIIMGVLLFTPITILAWFPFVSEFQTRMLFNQAFSRGLQISRILGGQKKERERSSRNKD

SEQ ID NO: 181110 - protein, 431 aa, Oryza sativa
  unsure (1)..(431): unsure at all Xaa locations
  Clone ID: PAT_MRT4530_78415C.1.pep
DWPIHQLDVKNAFLHGTLQETVYCSQPAGFIDPTKPDMICRLNKSLLLRWTISALQAEFSMKDLRPLHHFLGISVTRTSTGLFLSQQQYILDVLARAGMSECKPCSTPVDTNAKLSAVDGAPVADLTDYRSLAGALQYLTFTRPDISYAVQQICLHMHDPREPHLAALKRILRYTQGTIDHGLHFQRSRTVDLVAYSDADWAGCPDTRKSTSGYAVFLGANLISWSSKRQAXNTVSRSSAEAEYRAVANAVAETCWLRQLLHELHTPPSXSYVQHQRTKHIEIDLHFVRDRVAAGVVRVLHDPGFHHDSAWSHFQEFPSPSCFPSLPPSPPPPPATSPSPYPFNTDLIYTMQEMIRTEVCNYMAGVGLRVGCGPGALAKCSMPQLVDGVMCAAAEREMGKSRSRGLSLYRPEGRRSTARTENNVGDGGAPY

SEQ ID NO: 181111 - protein, 129 aa, Oryza sativa
  unsure (1)..(129): unsure at all Xaa locations
  Clone ID: PAT_MRT4530_78416C.1.pep
SPGMGYPMYPLPRCRXLVKXQCVSQWHSHQPPSRSRRDCCXRQAPTVDDSWCRCEAIXSHMLGGIYRELGAPDVGHHHVRGVPRCRRGDLERAAAXSLPAFCNVDIXPNGGVVFCYWLARSGLTSLGYW

SEQ ID NO: 181112 - protein, 121 aa, Oryza sativa
  unsure (1)..(121): unsure at all Xaa locations
  Clone ID: PAT_MRT4530_78417C.1.pep
PLCQPGMGXYPMYPLPRCRALVKPQCVXRGTPPSEQFRRDCCRXLAPVDDSWSRCEAISHXLGGIYRELGAPDVGHPMSEVFXRCRRGDLERXAASLPAFCNVDIPNGGGGVCYWLARSGY

SEQ ID NO: 181113 - protein, 117 aa, Oryza sativa
  unsure (1)..(117): unsure at all Xaa locations
  Clone ID: PAT_MRT4530_78418C.1.pep
SPRNGYPDVPAPRVPRALLKPQCSPSAHAPPRQXRRDCSASFSPVDDSWXRCEPIXHILGGIYRELGAPDVGHPMSEVFXGCRRGDLERXGDLPAFCNVDIPNGGXGVCYWLARSGY

SEQ ID NO: 181114 - protein, 362 aa, Oryza sativa
  Clone ID: PAT_MRT4530_78419C.1.pep
MAMINRNHVVSFLAGAALPTLLLFFLASDRVSEKLAIVSSWGSGGSSSAAAADHDLRGAGGDAAPPPAQQEKFPGLPELLPKVAMEDRTVIITSVNEAWAAPGSLLDLYRDSFKNGEGIAHLLDHVLVVAVDPAGFRRCKAVHPHCYLLHVKSINLTSATRFMSREYLELVWTKLSLQQRVLELGYNFLFTDCDMVLFRDPFRHIAVYADMSTSSDDYSAARAPLDNPLNTGLYYVKATSQSVEMLRYWQAARPRFPGAHDQAVFGHIKHELVAKLRARIEPLDTLYFGGFCEYHDDLARAVTMHADCCVGLDTKVHDLTDIAADWKNYTGMSPEERKKGGFKWTYPTRCRNSIGWRKPVHP

SEQ ID NO: 181115 - protein, 352 aa, Oryza sativa
  Clone ID: PAT_MRT4530_7841C.1.pep
MDLLLQPRGGARGPGPRGWGPRGSPTVHGGPGAPGLTPAGAGGPTRQPHLRARAADSRAPRGSRTVRPKAATPAQRRHGGAAAEGGEGKGEKKRRSTAHPGSMATTETATGAEEGGGAARVDGVDGAPAVGERNGGVDEVAGDAAKPKEAAPRGEVVRGDNGGGPELGGDDGERGRRCELDSGGERERRVAETVEGGTGRVYIGLGVREGGRMRGKRARKIRPPLMRRRGLGGKIPNESEGEREGKMGGKGEGIPGNNSPLLIARGADGGGGIHGGGGARARARRRERRDEGDDGWAPPVSEGGGRARPSAARARGGGRMGSGERRGRGKEMGRGGPRGRGGKRDFLELLFL

SEQ ID NO: 181116 - protein, 124 aa, Oryza sativa
  unsure (1)..(124): unsure at all Xaa locations
  Clone ID: PAT_MRT4530_78420C.1.pep
HPGMGYPMYPAPAFARAFXVSSQCVGRWHRPPPAEQVQAETAARQARQPSTDSWCRCEAXISHMLGGIYRELGAPDVGHPMSEVFRGCRRGDLERXAATLPAFCNVDIPNGGGGVCYWLARSGY

SEQ ID NO: 181117 - protein, 97 aa, Oryza sativa
  unsure (1)..(97): unsure at all Xaa locations
  Clone ID: PAT_MRT4530_78421C.1.pep
MELACTCETVFAAVLKTLFLGAMRALANAVGVAGAKPVPRRALVASAKKSWLPAFKSGSRXINPPGLCCSLSGDCCLNSLGLAKDPSVLKCDRRAGL

SEQ ID NO: 181118 - protein, 106 aa, Oryza sativa
  unsure (1)..(106): unsure at all Xaa locations
  Clone ID: PAT_MRT4530_78422C.1.pep
SASAVGRVQRLSRLLEPSPGVDFLAVSSSCLSVLYSWFRCEADQATCLGGIYRELGAPDVGHPMSEVFPXRRGDLERAAASLPAFCNVDIPXGGGGVCYWLARSGY

SEQ ID NO: 181119 - protein, 51 aa, Oryza sativa
  Clone ID: PAT_MRT4530_78423C.1.pep
KHFEKHVKQGNGYCCVSSSSCFDGTRGICGQGVWPKRHFVKIFEAVSSSHV

SEQ ID NO: 181120 - protein, 349 aa, Oryza sativa
  unsure (1)..(349): unsure at all Xaa locations
  Clone ID: PAT_MRT4530_78424C.1.pep
MSASNLLPPHLPLFPSQPKPPRQPPMDGENGVGXIGKSSXRRPPADAAPNDRERARGXAQVPTATTISSLPTRVRARASVLSRWPXAPIPQAQSHPRRAAQKLMCSSVPELCLSSTEEHAWLRHIVFEVNSIYSTLWSHRLRHLRPSPHILSLXKLLDSCKPSPTHRQSSPSGFYLPPPPXPCRSPATAHLSHDXRLFVCTHGHSWSWWCLRSCSGITMYSISCLLEILSPIPMVWLTLRSATATAGSASSSSDGRSPYYHLHRSAATPASGRSRSRGRPTWRRRPSSPRRPRRRSAGARCSSAAARAQQAARPESLRRGGRRAWWPQTRRRRGLTRLAQGTRATATPS

SEQ ID NO: 181121 - protein, 58 aa, Oryza sativa
  Clone ID: PAT_MRT4530_78425C.1.pep
SLHNVDLRALQVEQPRSPGARRARYSSPCDPRGAAGDAQAQEHILPVSSTGPFQEEGP

SEQ ID NO: 181122 - protein, 151 aa, Oryza sativa
  Clone ID: PAT_MRT4530_78426C.1.pep
MWWLACGVQAGGARRWRPACSVPDDGGEGVPTAGGGAPPTSRALTHIKENHKFQLNGRKVYACQFSTKFIFVTTNFVSKISEFMQPDWDMFHSIHPMAEYHAAARAVGGCAIYVSDKPGNHDFNLLKKLVLPDGSILRTKLPEMPCHDDPV

SEQ ID NO: 181123 - protein, 237 aa, Oryza sativa
  Clone ID: PAT_MRT4530_78427C.1.pep
MEDLSGIRKGLVPSLVLYSGTAVEVGPRVVPYIGVAIDRTAMSAADRRPRDLSLTSYVRELLLPNQASTIFVVKLLRCQISVSFFVAAAGRLRALPQPLFSHTAGFHLCPPPRPDSSNPAAAAAARDAGLACAISAEASAVLAVMRRSLRHPRAVADDAAADHPLVSSLKALRRLVFSPAAVLRPFLYAVRSEDAGAAVTSASLAALHEVMALMGPSLTSAALREWACRQLPVRGRG

SEQ ID NO: 181124 - protein, 441 aa, Oryza sativa
  unsure (1)..(441): unsure at all Xaa locations
  Clone ID: PAT_MRT4530_78428C.1.pep
MALDLNIALDDGDEHAVPNLNEAVADQEDDQVGGDLQGGANHELPGGDFQGGANHVLPFDLNLYASDHQGEIHXTMLMPWIKFCKXMEVTTIMPFLLISTLMPMRKTYNTIXDMQEYGVYAGDVDVVFEQEELVDSDEEDEHQNKNLTKIQRQQIYAALTGKTNNGILRKMRKNATTEVAAMFNVKRARVQAIWRRVKQCRAQGIPIDVISRKKKNCGRKKKEINLTDVANVPLQQRGTLRLFASASAVARPRYNEEGICTFDGKIGLWPFTRKEPAQRTSHNRPRGTLVNKTIKVDRDTEFQAYDDNKLNRVFLTLQSCLLEVMKADGGNGYKIPHMGKESLERLDILPNTLSCDFELYDKITMPSRNLRAVGSGSLPKAFLQVTREIRQPRESFSLPDASEGYDSMITHIPPTTISGQYLAQAFTECTHPEDDDHEAST

SEQ ID NO: 181125 - protein, 75 aa, Oryza sativa
  Clone ID: PAT_MRT4530_78429C.1.pep
RMSKSSLFTVRRLEIHLERSRTFSIYMLVLMERRIVLGLQVHMISSSISLLLPPRPMSHDSSRCEFASISSGIRV

SEQ ID NO: 181126 - protein, 112 aa, Oryza sativa
  Clone ID: PAT_MRT4530_7842C.1.pep
MGFEKTILKAGTGPKPVKGQKVTVHCTGFGKDNDLAKKFWSTKDAGQEPFSFNIGQGSVIKGWDEGVMTMQVGEVARIQCTPDYAYGASGFPAWGIRPNSVLVFEIEVLSAQ

SEQ ID NO: 181127 - protein, 408 aa, Oryza sativa
  unsure (1)..(408): unsure at all Xaa locations
  Clone ID: PAT_MRT4530_78430C.1.pep
MALDLNIALDDGDEHAIPNLNEAVAEEAAVADQEDDQVGGDLQGGANHELPGGDFQGGVNHVLPFDLNLYASDHQGEIHXTMLMSWIKFCKXMEVTTIMPFLLISTLMTMRKTYNTIQXMQEYGVYAGDVDVVFEQEELDDSDEEDEHQNKNLTKIQRQQIYAALAGKTNNGILRKNATTEVAAMFNVKRARVQAIWRRVKQCRAQGIPIDEPAQRTSHNRPRGTLVTKTIKVDRNTVRSFLIAKVLRAIIASWPPEEAHNTIWIQQDNAPSHVPVDDPQFAYAVSQTGFDIRLMHQPPNSPDMNALDLGFFASLQSLTYRRISRNMDDLIDNVEQEFQAYDDNKLNRVFLTLQSCLLEVMKADGGNGYKIPHMGKERLERLDILPNTLSCDFELYDKVTTALANQVQ

SEQ ID NO: 181128 - protein, 501 aa, Oryza sativa
  Clone ID: PAT_MRT4530_78431C.1.pep
MAGVDATAAGGDEAGETLHVVLFPFLAFGHINPFAQLARSLLAVGGGTESTAEVDADGAELLKLALDGTRPQVEALLARLRPDVVLFDFVTPWVADAARRLGVRSARFSIFPAVSGAYFMAHGRGLYGARPTAEELASAPEGFPPSSPLSTVPTYQAAHFTHIFTSFHGMPSTHDRSVACHNACDALVIRTCHEMEGPYIDYIAAQYGKPVLATGPLVPEPPRGELEERIICMAKSIVFGHGTHMVFVIVNDADAMDQVLQVNGDHNHNAFPFNLNFDADEEDLQIHPDMQEYGVYAGDVEVVFEQEELDDSAVARPRYNEEGICTFDGKIGLWPFTRKEPPQRTSHNRPRGTLVTKTIKVDRDTVSFPKGFDIRLMHQPPNSPYMNALDLGFFASLQSLTYRRISRNMDDLIDNAEHQAYDENKLNRVFLTLQSCLLEVMKANGGNGYEIPHMGKERLERLDILPNTLSCGFELYNKLLKYVIWEVYHGFIFWAVFRLYI

SEQ ID NO: 181129 - protein, 137 aa, Oryza sativa
  unsure (1)..(137): unsure at all Xaa locations
  Clone ID: PAT_MRT4530_78432C.1.pep
RTRGREEAHNTIWIQQDNAPSHVPVDETRFAYAVSQTGFDIQLMHQPPNSPYMNALDLGFFASLQSLTYRRISRNMDDLIDNVEQXFQVYDDKLNRVFLTLQSCLLEVTKADGGNGYKIPHMGKERLERLDILPNTL

SEQ ID NO: 181130 - protein, 370 aa, Oryza sativa
  Clone ID: PAT_MRT4530_78433C.1.pep
MGLDLNIALDDGDEHAIPNLNEAVAEEAAVADQEDDQVGGDLQGGANHELPGGDFQGGVNHVLPFDLNLYASDHQGEIHLDDVDVMDQVLQVNGGHNHNAFPFDLNFDDDEEDLQYHPDMQEYGVYAGDVDVVFEQEELDDSDEEDEHQNKNLTKIQRQQIYAALAGKTNNGILRKNATTEVAAMFNVKRARVQAIWRRVKQCRAQGIPIDVRSRKKKNCGRKKKEINLTDVANVPLQQRGTLRSFASASDWHTLPNQPKFIDMRNIVHIDEKWFNTTKRTRTIYMVHWEDDPYRPVQNKNSIDKVMFLAAITRPRYNEEEVMKADGGNGYKIPHMGKERLERLDILPNTLSCDFELYDKVTTALANQVQ

SEQ ID NO: 181131 - protein, 88 aa, Oryza sativa
  unsure (1)..(88): unsure at all Xaa locations
  Clone ID: PAT_MRT4530_78434C.1.pep
PRKVSSFSSAAYSSVCVLATXLXCWSGYWHEEITGGVEAAARRCGRRSTAAQCGSGYLASRGGPGFSTXLFEIVKDRKIFPTQDLIVV

SEQ ID NO: 181132 - protein, 80 aa, Oryza sativa
  Clone ID: PAT_MRT4530_78435C.1.pep
IMASVIFRPLSMMAPSGLLISLVLHSFIPHNGGLHLAASHVIISTNANIMTFRVMAQCEPFLLPAPLSVYALDASIEAYE

SEQ ID NO: 181133 - protein, 267 aa, Oryza sativa
  Clone ID: PAT_MRT4530_78436C.1.pep
EESLIKIINHARSSQLLELLCECLIASGSDIVSGSTNMVPAACPACKAIWYLAHAVDIMSLGTHNFSFPLANSWRQVHAKLDGKMQDQGSLPASQKKDSLSDIDSTHLINIFVKSFLASKPMQVAVYHCLHNGLESAIHASLQLISRACLLDASFCAMICGPINPSSNVNEVEHGGDGTIVSDMFSLLSLCGSYLNKESKQNSNQKCRLSNPHALVVHCCLALATIAACLKSEGNSSASIILTSSQKKQRSRLSVLAHLSLVDDTVK

SEQ ID NO: 181134 - protein, 245 aa, Oryza sativa
  Clone ID: PAT_MRT4530_78437C.1.pep
MRPVFVGNLDYDTRHSELDRLFYRYGRIDRIDMKSGFAFVYFEDERDGDEAIRALDGYPFGPGRRRLSVEWSRGDRGSRRDGYSKPPVNTKPTKTLFVINFDPINTRVTDIERHFEPFGKLSNVRIRRNFAFVQFETQEEATKALEATHSTKLLDRVISVEYAFRDDTERGDRYDGARGGYGRRDDSPYRRSVSPVYRSRPSPDYGRQRSPVYGSYDRSPVNDRYRSRSPVRRSRSPLANRRAYD

SEQ ID NO: 181135 - protein, 58 aa, Oryza sativa
  Clone ID: PAT_MRT4530_78438C.1.pep
MARGKEPDGGKGGGDGGWQRKGQLKGPKVNLFHIGGLGMAFGPTREMLEPSDLMDDPD

SEQ ID NO: 181136 - protein, 165 aa, Oryza sativa
  Clone ID: PAT_MRT4530_78439C.1.pep
MHQSALLTSEDPGHVIVPSSVECGSSILIPDSDSAMHRIETTLVVACCVHRHCMVVVGPGTLARDWRTNRAGQTAVGPRARGPSPRRFCRKIHRPVPVPQSWATGRLLIHVAVSTARLLLTPSGACPRHVTVLEHVLYKLVAQASGSGVLPWPDSAHRRVLQVAR

SEQ ID NO: 181137 - protein, 992 aa, Oryza sativa
  unsure (1)..(992): unsure at all Xaa locations
  Clone ID: PAT_MRT4530_7843C.1.pep
DPCTNVPQYLLYPVYGYHPSTVARQAGGLGAQGSTTMSSSFVDNSVNTNXNQVFPASTMLVWTQVGEIVFPVYTTMPISAGPSMTRNENAVATNQDDSMSKDPPAEAENGTSTTSELEKDSNAAKPCHSDKNHEPTRMTSEATRSWCPIHKTRKHTLQACWVFLNVRAEIRACKERGIQRISPTRDVYCPIHKTKNHDLSSCKVFLSAMKAPSPKVQQSHVPIRDKDKERGATPTSDQFVGVIDIDPHEPSVLHLLEDYGSSTTSAPREAAAAAHPEQPPTSDANGENPEQRESPHRATPPPRGTGDLRDHLNGRREARRTRDNENRSRRHVSSRRHDNEDRGDRSNEDQDRDNRHDHNDRERRVPSDTGRGRCHNDDDDGDRRRDNSGRRRQDSREPGQHPRNHTPEPSDPSSSSSSSSSSSSDRHPRRTHDRRQPSAGCRAFSRSLRDVRWPERFRPGAIEKYDGSTDPEEFLQVYSTVLYAAGADDNALANYLPTALKGSARSWLMHLLPYSISSGPDLWQQFVANFQGTYKRHAIEDDLHALTQNSGESLREYVRRFNECRNTIPEITDASVIRAFKSGVRDRYTTQELATRSITTTRRLFEIVERCAHADDALRRKNDKPKTGGEKKPATDAPESSKKKNRKNGKRKAQAEVLAIEYANPPKRPDPQSSDTKKAWCLIHKTDRHSLEDCLVLKKSLEKHIAFEKGKRVRVVEKDVEAAPQESDSAYPVSDLHVSHIFRGSTTYSSKREYKKVEREICSTWQGAAPKMKWSEQKIEFSEEDHPKTAVIPGRYPIVVEPSIRNIKVARVLIDGGSSINLLFASTLDAMGIPQSELTPTDQPFHGITPQSSSRPLDKITLPVTFGQANNFRTEHITFDVVEFDIAYNAINGRTALAKFMAASHYAYQVLKMLGPKGTITIQGNAKLAMQCDKRSFDMVEQTPSPPATTEPPKKVSKTNKKPKPDGAIKIVPLSSANPDKTVKIGATLSEK

SEQ ID NO: 181138 - protein, 45 aa, Oryza sativa
  Clone ID: PAT_MRT4530_78440C.1.pep
MGALPDQAEDENESDVPVNSEASVVTSSISRGFTGPVFDSETLVG

SEQ ID NO: 181139 - protein, 200 aa, Oryza sativa
  Clone ID: PAT_MRT4530_78441C.1.pep
MPTPGFQPDGRSDLLTPNATVNMVMITTTETDRIAVVTRTTTSRTNKIRATTDKVNDIMTSHGDDETPDPKTSRGPEVEAVGPGVEPLTTIIPHRLRHRQEAVLAGEYMEYSASHIANMQVHKDTKRMLPVLVIKAIDTARKNCLWRGNNPSSTRKSLTSWDRVCTPKEKGGLGVINLRVQNTALLLKHMVKFYNGADLP

SEQ ID NO: 181140 - protein, 477 aa, Oryza sativa
  Clone ID: PAT_MRT4530_78442C.1.pep
MVKGGREALLGGYEMGRTLGEGNFGKVKYARHLATGGHFAVKILDRGRVVSLRAGDQIRREIATLKLLRHPHVVRLHEVAASKTKIYMVLEFVNGGELFERIVSPCFNDLLRYFLAAKIFMPATMAVKGKLSEKEGRRLFQQLIDGVSYCHDRGVYHRDLKPENVLVDQKGNIKISDFGLSALPQHLGNDGLLHTTCGSPNYIAPEVLQNKGYDGSLSDIWSCGVILYVMLIGYLPFDDRNIVVLYQKIFKGDTQIPKWLSHSAQNLLRRILEPNPMKRIDMAGIKSHEWFQKDYIPVLPYDDDDEDVQFGARLPAKEQINDEPGDKNSHQINAFQLIGMASSLDLSGFFEDEEVSQRRIRFTSTHPPKDAFDKIESSATELGFQVQRGHSKLKLMRNCKGSKNPESFMVSAEVFELGPSVNVVELRKSNGDPALYRQLCERISSDMGARNTEQIFATASLEDDLQNSNAGTPLFAL

SEQ ID NO: 181141 - protein, 61 aa, Oryza sativa
  Clone ID: PAT_MRT4530_78443C.1.pep
MAVKDRFTGNPRRLAVLTTSGSTGGEGGRDGVGSAGVSGCPAAGFTVAHEGTAHLRGRGWG

SEQ ID NO: 181142 - protein, 327 aa, Oryza sativa
  Clone ID: PAT_MRT4530_78444C.1.pep
MVVLAGPPAVDHIPLLRSPDPGDVFSGVPVVDLGSPGAARAVVDACERYGFFKVVNHGVATDTMDKAESEAVRFFSQTQPDKDRSGPAYPFGYGSKRIGFNGDMGWLEYLLLALDDASLADACTVPSCAVFRAALNEYISGVRKVAVRVMEAMSEGLGIAQADALSALVTAEGSDQVFRVNHYPPCRALQGLGCSVTGFGEHTDPQLVSVLRSNGTSGLQIALRDGQWVSVPSDRDSFFVNVGDSLQVLTNGRFKSVKHRVVANSLKSRVSFIYFGGPPLAQRIAPLPQLLGEGEQSLYKEFTWDEYKKAAYKSRLGDNRLAQFEKK

SEQ ID NO: 181143 - protein, 505 aa, Oryza sativa
  Clone ID: PAT_MRT4530_78445C.1.pep
MKYVVVMGGVISGLGKGVTASSIGVVLKACGLRVTSIKIDPYFNADAGTISPHEHGEVFVLDDGGEVDLDLGNYERFLDIKLTRDHSITAGKIHHVIPHITNEIQDWIERIAMVPVDGEVDPADVYIIELGGTIGDIESTQFIEAFSQFSYRVGAGNLCVVHVGLVPVLNVVGEQELEKNVKEKLSLFCHVPVANIFTLYDVSNIWRVPLLLRDQKADQAILKVLNLESVAEEPNLEEWMARADLYDTLHETVRIAMVGKYTGVSDTYLSVMKAPDAYSTAWSLLRGADGILVPGGFGERGVEGKILAAKHARENDVPFLGICLGMQLAVVEFACHVLKLPDANSTEFDAKTENPCVIIMPECSNEGKGGTMRRGSKRTFFKVANSKSAKLYGSVNHIDERFRHRYQVNPNVVQLFENNGLQVVGTDKTGEIVQIVEIPNHRFFVGVQFHPEFMSRPSKPSALFVGLIAASCGQLDGVLQDAACNHEPQQNQRAEKRPAASDLGD

SEQ ID NO: 181144 - protein, 563 aa, Oryza sativa
  Clone ID: PAT_MRT4530_78446C.1.pep
MKYVVVMGGVISGLGKGVTASSIGVVLKACGLRVTSIKIDPYFNADAGTISPHEHGEVFVLDDGGEADLDLGNYERFLDIKLTRDHSITAGKIHHVIPHITNEIQDWIERVAIVPVDGEVDPADVCIIELGGTIGDIESTQFIEAFSQFSYRVGAGNLCVVHVGLVPVLNVVGEQKTKPTQNSIRKLREYGLTPNIIACRCTKELERSVKEKLSLFCHVPVANIFTLCDVSNIWRVPLLLRDQKAHEAILKVLNLESVAGEPNLEEWTARADLYDTLQETVRIAMVGKYTGVSDTYLSVMKALLHACIACGRKLVVDWVPSTDLEDSTATVAPDAYNTAWSLLRGADGILVPGGFGERGVEGKILAVKYARENDVPFLGICLGMQLTAVEFARHVLKLPDANSTEFDAKTENPCVTIMPECSNEGKGGTMRRGSKRIFFKVAGSKSAKLYGSVSHIDERFRHRYQVNPNVVQLFENSGLQVVGTDKTGERVQIVEIPNHRFFVGVQFHPEFMSRPSKPSALFVGLIAASCGQLDGALQDAACNHEPQQNRRAEKRPAASDLGD

SEQ ID NO: 181145 - protein, 188 aa, Oryza sativa
  unsure (1)..(188): unsure at all Xaa locations
  Clone ID: PAT_MRT4530_78447C.1.pep
MKQLHKSSPTHAPAAAHAPAFKASKTSRPGPRSWVGYLLREQRLLFVLLGALIASSFFLLRPYLFSLSPSFHVPDRRPLFSFASHTSSALGVPPGFLPPPCRVVVTGGAGFXGCHLVYRLVGQGDXCMVVDNFFIGRKGYLFLPSCGTSGSFCYVFDVYSPFCLWGTCFFYTSVALVFPGGFHNSHPL

SEQ ID NO: 181146 - protein, 89 aa, Oryza sativa
  Clone ID: PAT_MRT4530_78448C.1.pep
LSQFFFILLIVFPFFKGVNNGFKTMFRRKVQPLQAEHLPEHYSFGNNAHRDRPNKIPSNTKPNCMFRHIAGKMPPTHLLYKMDPISLLY

SEQ ID NO: 181147 - protein, 275 aa, Oryza sativa
  Clone ID: PAT_MRT4530_78449C.1.pep
MATVQPAASDPAPPPPPETEEQPAAAGGEEIAALDEQLAVADGGGDDGKAAAAAEGGGGGGGGKLVAETMRKYAAPRSSRYHGVTRLKWSGKFEAHLWDNSSQVEGRKRKGKHGSYVTEENAARAHDLAALKYWGAGPNTKLNFNVSDYEKEIERMKTMSQDEFVVYIRRQSSCFSRGTSSYRGVTRRKDGRWQARIGRIGESRDTKDIYLGTFETEIEAAEAYDLAAIELRGAHAVTNFDISNYCEDGLKKLEASSEVPKLLEGPSKAAKLAGR

SEQ ID NO: 181148 - protein, 113 aa, Oryza sativa
  unsure (1)..(113): unsure at all Xaa locations
  Clone ID: PAT_MRT4530_7844C.1.pep
MGFEKTILKAGTGPKPVKGQKVTVHCTGFGKDNDLAKKFWRKFIDAGQEPFSFNIGQGXVIKGWDEGVMTMQVGEVARIQCTPDYAYGASGFPAWGIRPNSVLVFEIEVLSAQ

SEQ ID NO: 181149 - protein, 137 aa, Oryza sativa
  Clone ID: PAT_MRT4530_78450C.1.pep
MKQFIAHCLINLSCGRYITTFDQGWADLEKQFHDYFFAGVSKLKLLDLISVEPQEGESAMEYIQRFCNVRSRCYSLSLSDEQLADLAFQGLSAPIRDRFFCHEFESLAHLMQTISAHESRLHEAKEDRFWSYQDKKF

SEQ ID NO: 181150 - protein, 103 aa, Oryza sativa
  Clone ID: PAT_MRT4530_78451C.1.pep
FCFWGCRLCLFLVLLPVVWWVSVWGCSGLSCGCGVVRPPPRGGSWFLWPVFFCCLFRVLVFAPFLGLSPPLAFFAWPTCALWLVIFSCVPALPPNKIVKGGGP

SEQ ID NO: 181151 - protein, 158 aa, Oryza sativa
  unsure (1)..(158): unsure at all Xaa locations
  Clone ID: PAT_MRT4530_78452C.1.pep
MSSHIPKLGGHVLTVKFGKXQSHHRLRVTIGYGISESADGSYQVANSRIPAIFACFXTANKGFIGVSADFMTSDLQPMCALTFGSILVLLYHIVSRLVSTGLYCYFITSSSADCLYIIIYIGHIADCLNPIAIGWYRHRLLSAIGWNYSIGLSAVRLF

SEQ ID NO: 181152 - protein, 177 aa, Oryza sativa
  unsure (1)..(177): unsure at all Xaa locations
  Clone ID: PAT_MRT4530_78453C.1.pep
MATTRGATGQAATVAASYPSLRQPPTSGHDFSLTVKFGKXRSSHRPRVSIGFEVLRLADESCQVVSCRILAIFACFLTANKGFIGVSADFMTSDLQPMCALTFGSMLIYHIIICRLVSTGLYYCYILLSSADRLYTVIYIGHIADCLNPIAIGWYQHRLLXAIGWNYSIGLSADRLF

SEQ ID NO: 181153 - protein, 149 aa, Oryza sativa
  unsure (1)..(149): unsure at all Xaa locations
  Clone ID: PAT_MRT4530_78454C.1.pep
HQLLLTVKFGKXRSSHRLRVSIGFEVLRLADESCQVVSCRILAIFACLLIANKGFIGVSADFMTPDLQPMCALTFGSMLIYHIIASXLVYIGLYCYFITSSSANCLYIIIYIGHIADCLNPIAIGWYRHRLLSAIGXNYSIGLSSDRLF

SEQ ID NO: 181154 - protein, 228 aa, Oryza sativa
  unsure (1)..(228): unsure at all Xaa locations
  Clone ID: PAT_MRT4530_78455C.1.pep
GGERGRERWRRSALTGVRGGTGGSRPYILHDEDMPATLDVNKGDGLRHTSHEGNKDVVNQVDGFRLSKNDXTYHGSITRSHARKIQQELNSLFAQLNPNLSENFILPKCSTFVFLRFTPEDIISMPRRMGYVXVKEELAHAQPAAVYANKKMVYAVKAQFPWLVQPSQSRDGLHGXMVGKRDKSSFQRIKPHLNIIFQXEVIAFLLKTAQELKGCARTXENSLHSHLC

SEQ ID NO: 181155 - protein, 259 aa, Oryza sativa
  Clone ID: PAT_MRT4530_78456C.1.pep
MEVATATEASAPAASRRSHPFPWLDLAISEPYYFLHLVAFFSYFAARSTVPSADDGLLLRRAVLTFLVLFVVKIVKEENWETCIADSLLYAKGLLLAVTLVIDYWLTVSYLLGFVVIYAVAQQPPYDGLGHSNHLTPLQLEGLLTEEPTTRFWLVEFRTSFSGTCIEASSVLPELSNIYSNKNISFGIIDLGHFPNAAAKFGISMWDHLPTYILFDKATEVARFPEIMNESKVFVPKITKKLLCQHFDLDRRLIEYLSR

SEQ ID NO: 181156 - protein, 213 aa, Oryza sativa
  Clone ID: PAT_MRT4530_78457C.1.pep
MWTARIAPKGDRAAKGGAAELSGQIGREWRCVARQSPAATIRRGDAQWRQRKRRVGDRARSPWGAGEEIEAKLNRVATMMCERCWYFLQSQIKSTSAGIYQCSTFPTEYSKGIESKGTHLQPAVPGCRSTTYPDREDLSDLEGFHQLCTYLKHVGGIELVFNSRQQNPAHLALCSSLSKALVLYHGGDIPMDMLTCLPVKIERDWGQFWFGRT

SEQ ID NO: 181157 - protein, 295 aa, Oryza sativa
  Clone ID: PAT_MRT4530_78458C.1.pep
MAPLPSPPLLAESLATLRTASPSPPIPCSPRRTRPLVSARFARTAGRRSRSTGGRRDLRSCAYAAEAEYGSAEDEVADDFYSVLGVMPDATPEEIKKAYYSCMKACHPDLSGDNPEVTNFCMFINEVYTVLSDPVQRAVYDEIHGYTATATNPFFDDSAPKDQVFVDEFTCIGCKYCANVCPNVFRIEEDYGSPVNCIHWTSAAQLSLLENEMRRIERVNVGLMSAGMGVSVDVFRLASVRWEKRQSKVLEKIRTRMTNKKYSDISSSWTDIWGSPTRYQGNDEFRGKFPLAVVW

SEQ ID NO: 181158 - protein, 204 aa, Oryza sativa
  unsure (1)..(204): unsure at all Xaa locations
  Clone ID: PAT_MRT4530_78459C.1.pep
AGEPNLEFLGSSEEEEEEEEERGELPYVPGVRRGSTPWSRTRAPPRPAATPPARRSPLLLTVKFDKXRSSHRLRVSIGFEVLRLADESYQVVSCRILAILACFLIANKGFIGVSADFMASDLQPMCALTFGSMLIYHIIASRLVYIGLYCYFIISSSVDCLYIIIYIGHIADCLNPIAIGWYRHRLLSAIGWNYSIGLSADRLF

SEQ ID NO: 181159 - protein, 371 aa, Oryza sativa
  unsure (1)..(371): unsure at all Xaa locations
  Clone ID: PAT_MRT4530_7845C.1.pep
TNRVPTSWGFVYSRVNKPRERARGPGPREWGPRVSPSVHGGPGARGXTPTGAVGPTRQPHPRARAADGRXPPGSRGARPKAASPARPTEGGAPAPRWSPPAXQRRGGAAPEREEGRGKRTERSTAHPGTTRAAETTTGAEEGGGAVRIDEDGGAPTVGGRNEGVDEVGEDAAKPKEVTPSREEVRSDNGDEPELGGDGGERGRRCGHDSDGESERRVAETEERGTGNNYIAPGGGESGRRGRKPARRIRPPLMAPARFAEAIPNGSEGEREGKAGENGEGIAGSDFPLFMARGDGGXGGFGGGGGARARXGRRERREVGDDGWAPPVSEGGGRARPSAARARGGGRMGRGXRGERGREMGRAGPRGGERTF

SEQ ID NO: 181160 - protein, 209 aa, Oryza sativa
  unsure (1)..(209): unsure at all Xaa locations
  Clone ID: PAT_MRT4530_78460C.1.pep
QRAVYDEIHGYTATATNPFFDDSAPKDQVFVDEFTCIGCKYCANVCPNVFRIEEDYGRSRVYSQSGSTELIQEAIDSCPVNCIHWTSAAQLSLLENEMRRIERVNVGLMXAGMGVSVDVFRLASVRWEKRQSKVLEKIRTRMTNKKYSDISSSWTDIWGSPTRYQGNEEEGTERAKRAAAAARRWREYSRKGADRPPEYKLPEAAGNKE

SEQ ID NO: 181161 - protein, 174 aa, Oryza sativa
  unsure (1)..(174): unsure at all Xaa locations
  Clone ID: PAT_MRT4530_78461C.1.pep
MITALLAQSLAPRSSAKPAATVQQSQHSNVLTVKFGNRQRRHRLRIIIGCSISESADGSYQVANSRIPAIFACFXTANKGFIGVSTDEMTSNLXPMYALTFGXCLLYIVSSRLVSTRLYCYFITLSTADCLYIIIHIGHIADCLNPIAIGWHRHWLLSAIGWNYSIGLSADRLF

SEQ ID NO: 181162 - protein, 153 aa, Oryza sativa
  unsure (1)..(153): unsure at all Xaa locations
  Clone ID: PAT_MRT4530_78462C.1.pep
SAPAKIIFAGGPLKRRLRRGWLPPRLPPPPPATTTTATPPPRADGSPXITTMTFAPPXSPPPPPATTTTATPPPCAGDDDDHDAGSPPLPTSTHRRPAPSSATTTTARRRLPSSPHIRAPAAPSSPTSTTSDDDDDNGRRRRRRRRRSSSAPP

SEQ ID NO: 181163 - protein, 147 aa, Oryza sativa
  unsure (1)..(147): unsure at all Xaa locations
  Clone ID: PAT_MRT4530_78463C.1.pep
LLVTVKFGKXRSSHRLRVSIGFEVLRLANESCQVVSCRILAIFACFLIANKGFIEVSADFMISDLQPVYALTFGSMLIYHIIVSRLVYTVLYCYFIISSSADCLYIIIYIGHIADCLNPIAIGXCRHRLLSAIGWNYSIGLSADRLF

SEQ ID NO: 181164 - protein, 147 aa, Oryza sativa
  Clone ID: PAT_MRT4530_78464C.1.pep
MRIVCTCKGERVVPTLMAPAEPSGCQQPPPPVAWPINMAAASGMHGGKAAANSGKTILVTILTRRLSKLATDLSGPSPMWTEKVKGWSKSLGQYKRRRVGPEENEVEWSKWRSLASPLVEKSERNGSPSTPTNTYAFMAEDSIIVAT

SEQ ID NO: 181165 - protein, 197 aa, Oryza sativa
  unsure (1)..(197): unsure at all Xaa locations
  Clone ID: PAT_MRT4530_78465C.1.pep
HRLLSAIGWNHSIGLLADWLFDLLFANLVSCRIKLTGTPASHPYFKSGGHVLIVKFGKXRSSHRLRVSIGFEVLRLADESCQVVSCRILAIFACFLIANKVFIGVSADFMTSDLQPMYALTVGSVLVLLYHIASRLVYTGLYCYFITSSSADCHYISIYIGHIADCLNLIAIGWYQHRLLSAIGWNYSIGLSADRLF

SEQ ID NO: 181166 - protein, 146 aa, Oryza sativa
  unsure (1)..(146): unsure at all Xaa locations
  Clone ID: PAT_MRT4530_78466C.1.pep
LLTVKFGKXRSNHWLRVSIGFEILRLADESYQVVSCRILAIFACFLIANKGFIGVSADFMTSDLQPMCALTFGSMLIYHIIICRLVYARLYCYFITSSSADCLYIIIYTGHIADCLHPIAIGWYRHRLLSAIGWNYSIGLLADRLF

SEQ ID NO: 181167 - protein, 72 aa, Oryza sativa
  Clone ID: PAT_MRT4530_78467C.1.pep
MGVVGWGCCGLGIWSARRVAVGACFTRHSDSDGPAGSTIASIGATTAAAARDGRDPRSAASETEADADASAK

SEQ ID NO: 181168 - protein, 46 aa, Oryza sativa
  Clone ID: PAT_MRT4530_78468C.1.pep
NGCNISHVHSLGLTRGAVCHSIVFWPNKLWLREPMPKRLQLSVKKT

SEQ ID NO: 181169 - protein, 136 aa, Oryza sativa
  Clone ID: PAT_MRT4530_78469C.1.pep
SNPIDLAANGWGGTWGSGGTSSSLGAASSLGLFRGWSSSESSSSLSRPDWRTNGPSPCDYTSIDWSLDTTLLNPAAKSEWLSDTWSTMFMGGRSTRPSGNLGGPGIAGLHESNFPMDPSPSPRPYDWPSFCRGGSS

SEQ ID NO: 181170 - protein, 74 aa, Oryza sativa
  Clone ID: PAT_MRT4530_7846C.1.pep
MVQIPFVGGECREEATVTRWGEVGVRSLVKQKEGEVEEVPGRQPCDLSKGKKLMKGIDNSGGLRSMRVLETHAE

SEQ ID NO: 181171 - protein, 46 aa, Oryza sativa
  Clone ID: PAT_MRT4530_78470C.1.pep
LPAPAKTVSPSPAPEPPSTTSPTGAAAGLRPAFAMFAVAAAAIYAF

SEQ ID NO: 181172 - protein, 88 aa, Oryza sativa
  Clone ID: PAT_MRT4530_78471C.1.pep
MGGGAWDRDTVMSARRAAYNNPERAMEYLYTGVPEQAEAPAAVQALPIPAAVQAFPTSDQLVDLLICCVVNFVLYWMFVGLCWMLIGL

SEQ ID NO: 181173 - protein, 65 aa, Oryza sativa
  Clone ID: PAT_MRT4530_78472C.1.pep
LAKPLLIYSPTAHRVKTIYCPKNIIAFILFHTPISNPYIYENLPFPQNLFPNGLCWWKKTNPCPL

SEQ ID NO: 181174 - protein, 57 aa, Oryza sativa
  unsure (1)..(57): unsure at all Xaa locations
  Clone ID: PAT_MRT4530_78473C.1.pep
KQNNVRNATKTTHLPFTFXIVTVTFXPNVWXTLGXGININLKTDKQTNLSNNHLMAS

SEQ ID NO: 181175 - protein, 672 aa, Oryza sativa
  unsure (1)..(672): unsure at all Xaa locations
  Clone ID: PAT_MRT4530_78474C.1.pep
WLLLYMAASLAAVSAVLVLEDDXRAEAAATPVYYVSEALAGPKTWYTEPKKMAYLLVMASRKLRHYFLAHDIMVLTSYPLGDMLRNREATGRIGKWAIELASFTISFVSRSAIKSQILADFIVERTRPCSDQPEPPVEEVWIALTNGACNAFGASFAISFISRSAITSPIGRSASFAARLEFPTTNNTAEYEAIMLALRKARAMGAQCLVIHTDSQVVAGHIDKSYQARSPELAKYLEAFRKAEACFRGITVSGVPRATIADVDALAKAAAGSTLLPSHVLYEVLRSPAASDTDAPAAEVAVIDTRSQGAELLKEHDGHCGMQLALRTLVAKTLRQGLYWPTIAADAEHLVCHCQGCQWMRRASHMPPTRLTLIPPVWPFARWGIDIVGLLPRAPGNMRFALVAVEYLYFSKWVKAEALASITARTIQRFVWRNIMCRFEVPRHLTMDNGHQFDFDSFKNFCEGMWGHCTSVTWATGFTPFKLLFGDEAMTPAEIKGQSLRVVLPEHAGEREVSVDHVEEMRMAAAKKLRKYIVATQLWYNKKVAPRAFSLSEAVLRRALSPSKLQNKWESPFLVAGTGTCGACHLTELDGTPLPCSWNAYLLKCFTQKRGGAEYGKEYDDHLVGNAPASASGSAMSLPRRHLRTLTPDATCGALGRASTGLDPVRRMVTKP

SEQ ID NO: 181176 - protein, 1290 aa, Oryza sativa
  unsure (1)..(1290): unsure at all Xaa locations
  Clone ID: PAT_MRT4530_78475C.1.pep
FSSRTIVNTSGGSSAVHESKRQRRDYARDVLNLALVSSVAPPACAAAPVSFSLEDGHGRLYPHNDAMVVITAHIAEANIHRILVDGGSSADILFITPFDQMRIPRSRLSKVRWPLRGFSGDTVEALGLITLPVSFGRGRSARTKQVTFDVVDLPYAYNAIMGRGSLNKFGAAIHXNYLCTKMPGPAGVITVRGDQLGARKIAYGHEPQAEARHVHEVDGADPECTVRFVKPEADEGTHGLHPDPAHSKRAFRLGDGLASDVEVAIVAVLRENLDVFAXSASDHKGVDRCITEHRLDVHPGARPVRQGLRKMCPPSGXAAREEVKKLLEARVIREVQFSEWLLNPVLVNKANGKWWMCIDFTALNKACPRDPLLLRRIDXLVDSTAGCELLSFLDAYSSYHXICLAPEDKAKTSFVTPDRVYRYIRMPFGLRNAQLIHSALKAQLGRNVEAYINDVVIKSKLASDHVADLRETFDSLRRAGIKLNPEKCTFGATXGKLLGYLVSKRRIEANPEKIKAKEVQRLTGRLASLSRFLAKSAENCHPFFVVLRGASPFRWTPECQQAFEGLKEHLSKLTALATPPSGQWLLLYMAASLAAVSAVLVLEDDSXEAAATPVYYVSEALAGPKTWYTEPKKMAYLLVMASRKLRHYFLAHDIMVLTSYPLGDMLRNREATGRIGKWAIELASFTISFVSRSAIKSQILADFIVERTRPCSDQPEPPVEEVWIALTNGACNAFGASFAISFISRSAITSPIGRSASFAARLEFPTTNNTAEYEAIMLALRKARAMGAQCLVIHTDSQVVAGHIDKSYQARSPELAKYLEAFRKAEACFRGITVSGVPRATIADVDALAKAAAGSTLLPSHVLYEVLRSPAASDTDXACRRGRSDRHRLQITDILTGRAKPSSATEHQRFRQRARGYVLVEGAFYDXGVCAPVLRCVSRSQGAELLKEHDGHCGMQLALRTLVAKTLRQGLYWPTIAADAEHLVCHCQGCQWMRRASHMPPTRLTLIPPVWPFARWGIDIVGLLPRAPGNMRFALVAVEYLYFSKWVKAEALASITARTIQRFVWRNIMCRFEVPRHLTMDNGHQFDFDSFKNFCEGMXTELCFASVCHPXSNEAVERANGNILSSLNKRLVDASRGTWADELPAVQWGHCTSVTWATGFTPFKLLFGDEAMTPAEIKGQSLRVVLPEHAGEREVSVDHVEEMRMAAAKKLRKYIVATQLWYNKKVAPRAFSLSEAVLRRALSPSKLQNKWESPFLVAGTGTCGACHLTELDGTPLPCSWNAYLLKWYCI

SEQ ID NO: 181177 - protein, 195 aa, Oryza sativa
  Clone ID: PAT_MRT4530_78476C.1.pep
KVILGGAMSVDEVQDCVSQLISYKGYFGRGGCCGKDRLRALSSCCIESEALETVECLIKSTVNELIEPVDRDPVIFVLDTNVQMLPWENLPALRNQEIYRMPSIGSVFLALTRSNNYWKDARVIAPPFPVIDPFNAFYLLNPSGDLSSTQEEFDQMFKNYEWKGKAGSAPTAEELALALRNHDLFLYFGPGCGTQ

SEQ ID NO: 181178 - protein, 84 aa, Oryza sativa
  Clone ID: PAT_MRT4530_78477C.1.pep
IRLAGPPVQRKKLGLFRPANARFSPLFAAFLTGSPNQTLCIRWFFSIPSVILGLFRHGAQFCGPFRGVFALGPWDMGGEPSSFF

SEQ ID NO: 181179 - protein, 264 aa, Oryza sativa
  Clone ID: PAT_MRT4530_78478C.1.pep
MVGPHVSCSPLLFFFLLSLPNPHLSSLRLSPLLSPGDGEVAARGGQRPAGEEEAVRSGGGRALAVVGGRGIGDGRWLWLRRSRSLHVLDPFAAAAAAAAAEALSGEAAIAARHGGIMAGAMVMPSLGVRMYDLTDQHIEAALTNLIAGLESEYKFEVNPVLIKVILGVAMSVDEVQDCVSQLISCKGYFGRGGCCGKDRLRAFSSCCIESEALETVECLIKSTMNELSEPVDRDPVIFVLEEPAAATATTTSPRRHFRSRDTAT

SEQ ID NO: 181180 - protein, 1166 aa, Oryza sativa
  Clone ID: PAT_MRT4530_78479C.1.pep
MFCVEMQKRITNILLNKIYCSKEYYLERSRVLVRKARVLRTCGVQSISSCLESLSEAISLLRDIPLDSSQGNAPAIHQLAIAYCLHAHCAQEANLGAEVIFDSAQNVFGLWSKIKTFGYYSPGMISQQPSENLVPLLCSLVDLLAMKRLWPIDSFISTTCEPSFRREFGFGGSVHEVDSVASSLVSDATVNDQSTFLAGYLYFDLSERLLSRGELFQAFSYGKEALHLRKKLLRKKFKFNFGKFTSGEAQCSGGQNSVSLEAWGSTITEIWPDSTRSTGTRDSFLTPWTVLQCYLDSILQVALLHELIGNGAEAEVLLRTGKDISQFQGLPVFGVLFASALGQIYRKRQQWDTAEGELKYARDLLAQNATFISCKLCKLTLDISLDVQAGDLFWSLYEKDFQKQSAGNLSNALGMYQSALDKLNGTKLESPVDSYDKLKTTCIICSKYGKEPLAANDGVLPSCTVCANFSQASGDHSNEFTALKFLKHKDSECCPPLDVKVKRTTRNSSRGNDVIMSLFLLKGFLSEQSRDICCRFCSVQMSDVVPWLLKAFVLSRENPSLFQEVCRLLACIFLLATIDSTAQLPLYSSGSLSLNHWAAYFHQNSVGTYLDCQYFAGLKSLLRKMTRRFSSADIGHLEIHIKEFFHKLPDVPIVCISMLEGDFVNVLGEILLLPSYFPAWMMLSRFDSTNKPITMLLPVDAISKETQHEDSCTKELDNLMRATDKNWQCPWGYTIIDYVAPTFRKILEENFISLSSATLTLNDGQANHVKWWSHRMKLNNHLDKMLKDMEESWLGPWKCLLLGYDLTDQHIEEALTNLIAGLESEFKFEVNPVLIKVILGGYFGRGGCCGKDRLRALSSCCIESEALETVECLIKSTVNELIEPVDRDPVIFVLDTNPVLVQMLPWENLPALRNQEIYRMPSIGSVFLALTRSNNYWKDARVIAPPFPVIDPFNAFYLLNPSGDLSSTQEEFDQMFKNYEWKGKAGYAPTAEELVLALRNHDLFLYFGHGTPLSYLSAGSPAVIANLWDVSDKDIDRFSKALLGSWLQENFVAAKNCSKCCQLTREFESMTIAVEGNGRPRRRGTRGKKSERMNNCKVSILGTALHELACACDVCDIHSPSGNVDQARWCELADAFDRRFTRRSAVEMLIDRREEIQIFLLASIYK

SEQ ID NO: 181181 - protein, 120 aa, Oryza sativa
  unsure (1)..(120): unsure at all Xaa locations
  Clone ID: PAT_MRT4530_7847C.1.pep
IFYETWWRIGYGIIPVDRMIRVLGYIGTRICVIXIKRTQRQGLYWFRPLIRIDMKKPHITMGTDKLDDTDEIVVDGLNEISXRLGSTCSSFVNYGGDAFYTVDHLDLQVPATHRSTVVIH

SEQ ID NO: 181182 - protein, 156 aa, Oryza sativa
  unsure (1)..(156): unsure at all Xaa locations
  Clone ID: PAT_MRT4530_78480C.1.pep
KTPXXKNXQXXXXXXXIXXXXKXXXKXTXXXXXIXSPIXXINYPXIKIXXXXNXXKXXXXXKXPXRXKXKKNXXYXTXXXXXXXXXXXIXNXKXXIYINXPSXXRKHXLAEPXAXERRXESXXXXTSPXXKXNXXQMIXSSXXXXXXXXXTXTIXG

SEQ ID NO: 181183 - protein, 84 aa, Oryza sativa
  Clone ID: PAT_MRT4530_78481C.1.pep
MRWDEEGSGRRRRRKKGQSPGPTIPGRSDRLYAAGQTAGVLPVRPGPRSRSDRAYSAGQTAWPPADCAQPLHTGFIKRLGKDVG

SEQ ID NO: 181184 - protein, 81 aa, Oryza sativa
  Clone ID: PAT_MRT4530_78482C.1.pep
FAPHIFLNGYKNLFFFFLETKFLYPHFYKFKEFFKDPSKFVVAAPVSPDSGVVAPSAAKEEKKKEKPQEESDGYLGISLFD

SEQ ID NO: 181185 - protein, 74 aa, Oryza sativa
  Clone ID: PAT_MRT4530_78483C.1.pep
PLKNPVCSPPGSGPQKHPPQPQVPLKIPSTRILINSGFLIRYVCTGVWENVCTYVCTHLCPINGGCDQKGYVCP

SEQ ID NO: 181186 - protein, 53 aa, Oryza sativa
  Clone ID: PAT_MRT4530_78484C.1.pep
MGPYWAKWLGPIVWRSLRKTQQPAGPSLGEAMAFAHVVAFSAFVTHLRLESFV

SEQ ID NO: 181187 - protein, 117 aa, Oryza sativa
  unsure (1)..(117): unsure at all Xaa locations
  Clone ID: PAT_MRT4530_78485C.1.pep
HAHVVIGGRGGGGYPLNLDLELQGAKGGVVDPFPGKHNLLLQALAVGNGPLDDPLRLGPGAVASFKGGVTRCRGAPPRRKCRRGXXPPGCGCRPRRRTPLDHSGKGLALGDPARVLL

SEQ ID NO: 181188 - protein, 67 aa, Oryza sativa
  Clone ID: PAT_MRT4530_78486C.1.pep
HQIISCFITSWINNYCLHEVKTTQGFSNRWGIYFCVFWRITKLGAWQRSLWLQPRTGGSNELMVLTK

SEQ ID NO: 181189 - protein, 151 aa, Oryza sativa
  Clone ID: PAT_MRT4530_78487C.1.pep
MSSLMDKAKGFVAEKIAHIPKPEASLDSLSFKGMSRECITVHSNVNVSNPYDHRLPICELTYTLKCAGNVVASGTMPDPGWIAASDTTKLEIPAKIPYDFLISLVKDVGRDWDIDYQLDVGLTIDLPIVGNFTIPLSTSGEMKLPTLKDMF

SEQ ID NO: 181190 - protein, 66 aa, Oryza sativa
  Clone ID: PAT_MRT4530_78488C.1.pep
LEVPGKRSGEPVIHELFRDMPRIDRASFYHISNSNDICSSGNHISVASLNTRRPNGLPFTLLISVK

SEQ ID NO: 181191 - protein, 359 aa, Oryza sativa
  unsure (1)..(359): unsure at all Xaa locations
  Clone ID: PAT_MRT4530_78489C.1.pep
MASIRDFAKRYEADCRHLNQFFSGNVSPNNARPVLEIFTARSSQEMKQICRAYSSMYRQDLIQLLSQQKTTFAVIPASDPLVSKHISILSGSIAIRVACLRASEPCVRDADIARDALFGRRIDGDVLVEVVCTRPSGEVALIRQAYQARYSASLERDVSSRTSGSLNEVLLAFLGSSGSGYHGGRVDATMAMCDAKTLYEAVEISAARVDQRSVLQLLRHRSGDQLRAVLASYRRLYGQELARALKRKDGDTSGGGGGRRGESSSFPGILRAALRCAQLPERHFARAVRAALERGEGXALVRTVVTRAGVDVRRVNQAFAAKTGWTLESVVRNEFGSGGTGKSDDGLTGDLLVELLKLA

SEQ ID NO: 181192 - protein, 32 aa, Oryza sativa
  Clone ID: PAT_MRT4530_7848C.1.pep
LIEIYKYHIDLVSIRDGNENALYSVHGHRGLR

SEQ ID NO: 181193 - protein, 100 aa, Oryza sativa
  unsure (1)..(100): unsure at all Xaa locations
  Clone ID: PAT_MRT4530_78490C.1.pep
MAASKGNAAAAACALVLVLLAVGAEAQGGGGGECVPQLNRLLACRAYXCPAPVTPAPSAAARSAPSPRXLRLQRHQHHEQPAFQMPPQPDQLLCLRRDES

SEQ ID NO: 181194 - protein, 67 aa, Oryza sativa
  Clone ID: PAT_MRT4530_78491C.1.pep
FFFFFFRKRWYLWSQCSMYGVHTYCSFLLLQYLPPVIMITKHRTLQYHTKGESMGLASTHGPKGCHT

SEQ ID NO: 181195 - protein, 67 aa, Oryza sativa
  Clone ID: PAT_MRT4530_78492C.1.pep
ALLGDVLLVKTSQLGAIANQTTPYCCNLRSEGLMFSELPRHQRKTPLQKLHHGSWMSSSTYVLALQC

SEQ ID NO: 181196 - protein, 49 aa, Oryza sativa
  Clone ID: PAT_MRT4530_78493C.1.pep
QEYLLQLVLSLEVYELQGVFWALCTAMCVPQVFALFDYHVGQKVLVVVV

SEQ ID NO: 181197 - protein, 174 aa, Oryza sativa
  Clone ID: PAT_MRT4530_78494C.1.pep
MAQESCDLNKDEAEILKPSSSSSPSPSPTTASPSPPTAQMTEPPPPQSTPPTPPAAAAAASAAAAPQFSAKNCEGILIEVSKKRKLAEATATDANAVVVAAVAEPLSPVLFVNRCNVCRKRVGLTGFRCRCGELFCPRHRHSETHECSFDYKTAGREEIARANPVIRAAKIIKI

SEQ ID NO: 181198 - protein, 116 aa, Oryza sativa
  Clone ID: PAT_MRT4530_78495C.1.pep
MAKPSSFGRYSSPCTLRLGHLWLDKIWSKGLMLSANKPLTGKGEIGASAETVQTMWYGMRRPLSTDAPAETYIVPANKKQYWAFPSWAFFFYCAARLVGIYHFAYPCDTWRCITGG

SEQ ID NO: 181199 - protein, 235 aa, Oryza sativa
  unsure (1)..(235): unsure at all Xaa locations
  Clone ID: PAT_MRT4530_78496C.1.pep
TQQFRLHYDATPTPKGANINDIDEGHQPKLPRNQFLHAASINNPIKRLECVTVAKFCRTPTTKQLRLYPAXTNKNDEHPPGSEALQESTXCYRCTRKVLAATRGQXRTTPPRRETTPNGVVVVMLAHGLARLLPMSPNQNPTQPSCTTTIVGPQRERERETGSGQRDTGRTPPARPLPRRLCHPSPLQPTLRHRPPIAYVIADAVAPSSTSSMPGPDLEPDLARLCRIRVLHHHR

SEQ ID NO: 181200 - protein, 132 aa, Oryza sativa
  unsure (1)..(132): unsure at all Xaa locations
  Clone ID: PAT_MRT4530_78497C.1.pep
SSNXDXXYSGEXXCTGPPXRXXDPRGPAEASSSSRPXDAVYDELGQARXTPXKDCRLLPXLPRRTXDLXRLWGQFLLAFHLXIGYFWQGXXXFKGGRQLTGFKSGPQRKKGFKXKXVKGXRPPPLLQTFGWQ

SEQ ID NO: 181201 - protein, 51 aa, Oryza sativa
  Clone ID: PAT_MRT4530_78498C.1.pep
SHPSDILLTFRRNSSLFSMECHLKKISAGVQICYLLTLLVLWMELFELKQL

SEQ ID NO: 181202 - protein, 362 aa, Oryza sativa
  Clone ID: PAT_MRT4530_78499C.1.pep
MECWEKKPRNLGGSLPVPNVQDLAARPDHLTPTLLRRYLRPHHLSLPADDHHAMAMIPVVDFARLIDHHEEAAKLRHACEEWGFFQVINHGIADETVEEMKRDVMAFFNLPLADKAAFAQQPEWIEGYGQAFVTSEDQTLDWSDLYFLTTQPPSYRDLRFWPPETSSTFRRSMDRYSLETQRVATELLRAMARNLGLRDADKMTRLAAAQSMRMNYYPPCPAKERDRVLGVSPHSDAVGLTLLLQVSPVKGLQIRRGDDWIPVDPIPGALVANVGDVVEMVTNGRYKSIEHRVVVDAAQERVSVAAFHNATFGSTYGPLEEMVGGGEARYRSISVEDYVRLVVSSKLQGKNILDAVKIITTT

SEQ ID NO: 181203 - protein, 198 aa, Oryza sativa
  unsure (1)..(198): unsure at all Xaa locations
  Clone ID: PAT_MRT4530_7849C.1.pep
SIRFTSQKQQSLTFFKIQISLLKYNSETVKNWHKQKTILADFEKALNEAYSQLRELLSTFRLTIEEPNFNLXALERVLDSLRSRTSAKISLNCKLPSQTFSAQQQVHALQIVREAVINAIKHSNATQIEVIAETNQDGEQCLIVRDNGNGIVNGIEPDDHYGLTIMKERAAQLKGEFTIINRGXGGVQVMVTLPNTLL

SEQ ID NO: 181204 - protein, 274 aa, Oryza sativa
  Clone ID: PAT_MRT4530_784C.1.pep
MKACARAAGERLPLVGAPARQPLARSFVKVNRLSSQHETKSVVSCSVRVSDDKTHRIEATAEHILPATNDHVMKAIDSINRGQVIAVPTDTIYGFACDACSAEAVNRIYEIKGRVQTRPLAICVADVPDISRFAVVDHLPHGLLDSLLPGPVTVVLKRGNNSILERSLNPGLESIGVRVPDFDFIRAISRGAGSALALTSANLSGHPSSVNVKDFEDLWPHCSYVFDGGILPSGRAGSTIVDLITPGVYKILRDGSSRQETTAVLGKFGFVEAW

SEQ ID NO: 181205 - protein, 201 aa, Oryza sativa
  Clone ID: PAT_MRT4530_78500C.1.pep
AATMFSNRVQKTRSCRSYQKRSAESALSVYIAVFGSNSPMPCSNCFRNHRSCVVVSGSKRCKECIDRKVSCDGNDFASALFRSLEDYKTLEREEDELQERLLSVMRRKRLAKSRADELFKRGSATTEASLASSSTPVLESQASTGGQPQSSSAVVGSPDWLAGVDWSTIDPDLLVQKGQGSVGGTARASPGNSGSREVPTS

SEQ ID NO: 181206 - protein, 66 aa, Oryza sativa
  Clone ID: PAT_MRT4530_78501C.1.pep
PLPFFLFASFSNILLAFHTFKNFFLGGLPVYVFLTKGVCSSFLFLWVWVRVFSQQLFLFFLKTTPH

SEQ ID NO: 181207 - protein, 158 aa, Oryza sativa
  Clone ID: PAT_MRT4530_78502C.1.pep
EKTSRINNRIKTNTERRGGTLASPSLLLRFCFAKWRLCERTDQATYLYISRVAAFTQDTRNQFRVCLLLCAAPSLVDYSIPLVGVHRRSGEQVSRTSVFDVLHREKATVIRFLGSASHDCSLFVRDSSPSSPLACCAPSSTPATASSSCRTTGLSATS

SEQ ID NO: 181208 - protein, 964 aa, Oryza sativa
  unsure (1)..(964): unsure at all Xaa locations
  Clone ID: PAT_MRT4530_78503C.1.pep
MARGSAPLEGSVLPPSRIVSERQAGLPRRFMPESATGREVVALGEGRPAPHYPGRSVFFLSFAMAGLVPPFSSFFMDVLELYDLQMAHLTPNAVMTLAIFAHLCEMFIRGLTGAMVFGDYLRRRIAPLQRRARGAWEYTRSEDYMRTHQGGRWDWAPEDFKMVVQRVLNLSSVEASLIPQGVLPLCSDPERANILTIMQAVGASGERAPRGHDGAGGSRRGEQSTPGGGRASGPRDGGPGGSRPADARGKRKQEDTPSPSPPRGGGAVRASSRRPEGAVPTSQPEGERKKKRLRKMGGPNHAGETSSPPQGGRLADLLAGSSPRPLWPYSFXPRRVFTYPFLFVFWFFFXFSEIPSRLPHHSKSGRSEAEETATVEARRREAVRREAADRLREAEEAAQEAVRVRQAEEAAREEARLRRAGKSAREAEATRARQAACQAPDPTPPEATTTSEATHDEAAGAPLGPDPSGDVRDEPASGDAPESGTSIGGPSRTAPTPRRLSPLPSAAPLNTEPLLQALAAANTTVLDGLGAQMEVLQAERAELDAAWACVDEGRRSVEAMVEAGRKAYHRHASELEVRRRELAEIAREVEEERETALIATAVLNEARDDLRLQYGSRVAELEKKLDTARGVLDAATARERRATENEAASRRREVALKARATALEERARARERDLADRETAVTIREATVAAHEAACAEEESALRLREDALTERERALEEAEAAAQRLADSLSLREAAREEQARRNLEGASAERAALDQRAAELEARAKELDGRARSGGAAAGDGDLAARLAAAEHTIADLQGALDSSAGEVEALRLAGEVGPGMLRDAVSHLDRAGRQAALWGERTAKYAANQGGLAQRLSEMAGTLQRLPEELEXDLARGAVELVLASYQARDPDFSPWAALDEFPPGTEDDARAQVRDAADHIVHSFEGTAPRLAFALDSDEEGGDGGVDDSDHEAGDPGASK

SEQ ID NO: 181209 - protein, 1004 aa, Oryza sativa
  unsure (1)..(1004): unsure at all Xaa locations
  Clone ID: PAT_MRT4530_78504C.1.pep
MARGSALLDGSVLPPSRIVSERQAGLPRRFMPESATGREIVTLGEGRPAPCYPGRSVFFLPFAMAGLVPPFSSFFMDVLEFYDLQMAHLTPNAVMTLAIFAHLCEMFIGSVSPPSVVGGCYFQPRGPVLNRYIPCVLRKKWDDWKSDWFYTPLADEARLRLPSQPPAQASSWRAPVDLGDGYDAVLDRLAGLRSLGLTGAMVYGDYLRRRIAPLQRRTRGAWEYTGSEDCMRTHQGVRWDWAPEDFKIVVQRVLNLSSVEASLIPQGVLPLCSDPDRAFILTIMQAVGASEERAPRGHDGAGGSRRGEQSTPGGGRASGPRDRGPGSGRPADARGKRKQEGTPPPSPPRGGGAARASSRRPEGPRRRRSPRGSGRRNGPARWGGQNHLGETLFPLQGGRLTDLLAXEIPSRPSRHPKSGQSATTEARRRESDRREAADRLREAEEAAQVAVRARQAEEATREEARLRQAEETTSSEATRETDRQEAADRLREAEEAAQVVVRAGQAEEAAREEARLRQAEATTTSEAARDEAAGASLGPTPSCDAQDKPGLXAVANTTVLDGLSAQMEALQAERVELDAAWARVEEGRRSVEAMVEVGRKAHRRHVSELEVRQKVLGEIAKEVEEERGAALIATTMMNEAQDTLRLQYGSWEAELGKKLDAARGVLDAAAARERRAAETEVASRRREEALEARAMALEERACAVERDLADREAVVAIREVTLAVHEAACAEEESALRLREDALTERERALEEAEAASQRLVDSLSLREAAQEEQARRNLEGARAERAALNQRAAELEAREELDARARSCGAAAGESDLTARLAAAEHTIADLQGALDSSAGEVEALRLAGEVGPGMLRDAVSRLDRAGRQAGLWGGRTAKYAANQGGLAQRLSEIAGTLQRLPEELERTIKSSSRDLARGAVELVLASYQARDPDFSPWTALDEFPPGTEDGARTQVRDAADHIVHSFEGSAPRLAFALNFDEEDDDGGVGDSGDEAGDPGASE

SEQ ID NO: 181210 - protein, 388 aa, Oryza sativa
  Clone ID: PAT_MRT4530_78505C.1.pep
MVGSDGDGDGGGGEAHAPAAPAHHHRRPPRPRGGSGAIVEGFAAALRRRIRSGAAAAARASFGGDSGDEAASGEPSSSSSSSPSRRRGGDSNGAEASSAAGGGGGRGGGGDFSAFTFRAAAPVHRKAKESPLSSDAIFKQYGLLIRAGFWFNDKSLRDWPLLMCCLSLPAFPLGAFAVEKLAFNNVITDAVATCLHIFLSTTEIVYPVLVILKCDSAVLSGFLLIFIACIVWLKLVSFAHTNHDIRQLTMGGKKVDNELSTVDMDNLQPPTLGNLIYFMMAPTLCYQPSYPRTSCVRKGWLIRQIILYLIFTGLQGFIIEQYINPIVVNSQHPLKGGLLNAVETVLKLSLPNVYLWLCMFYAFFHLWLSILAEILRFGDPNVPSPVLS

SEQ ID NO: 181211 - protein, 1170 aa, Oryza sativa
  Clone ID: PAT_MRT4530_78506C.1.pep
MASSGGGGLRHSNSSRLSRMSYSGEDGRAQAPGGGGDRPMVTFARRTHSGRYVSYSRDDLDSELGNSGDMSPESGQEFLNYHVTIPATPDNQPMDPAISARVEEQYVSNSLFTGGFNSVTRAHLMDKVIESEASHPQMAGAKGSSCAINGCDAKVMSDERGDDILPCECDFKICADCFADAVKNGGACPGCKDPYKATELDDVVGARPTLSLPPPPGGLPASRMERRLSIMRSQKAMTRSQTGDWDHNRWLFETKGTYGYGNAIWPKENEVDNGGGGGGGGGLGGGDGQPAEFTSKPWRPLTRKLKIPAGVLSPYRLLILIRMAVLGLFLAWRIKHKNEDAMWLWGMSVVCELWFGLSWLLDQLPKLCPVNRATDLAVLKDKFETPTPSNPNGRSDLPGLDIFVSTADPEKEPPLVTANTILSILAADYPVEKLSCYVSDDGGALLTFEAMAEAASFANMWVPFCRKHDIEPRNPESYFNLKRDPYKNKVRSDFVKDRRRVKREYDEFKVRINSLPDSIRRRSDAYHAREEIKAMKRQREAALDDVVEAVKIPKATWMADGTHWPGTWIQPSAEHARGDHAGIIQVMLKPPSDDPLYGTSGEEGRPLDFTEVDIRLPMLVYVSREKRPGYDHNKKAGAMNALVRSSAVMSNGPFILNLDCDHYVYNSQAFREGMCFMMDRGGDRIGYVQFPQRFEGIDPSDRYANHNTVFFDVNMRALDGIMGPVYVGTGCLFRRIALYGFDPPRSKEHSGCCSCCFPQRRKVKTSTVASEERQALRMADFDDEEMNMSQFPKKFGNSNFLINSIPIAEFQGRPLADHPGVKNGRPPGALTVPRDLLDASTVAEAISVISCWYEDKTEWGQRVGWIYGSVTEDVVTGYRMHNRGWKSVYCVTKRDAFRGTAPINLTDRLHQVLRWATGSVEIFFSRNNALLASRKMKFLQRIAYLNVGIYPFTSIFLIVYCFLPALSLFSGQFIVRTLNVTFLTYLLVITLTMCMLAVLEIKWSGISLEEWWRNEQFWLIGGTSAHLAAVLQGLLKVIAGIEISFTLTSKSGGDEADDEFADLYIVKWTSLMIPPIVIMMVNLIAIAVGFSRTIYSEIPQWSKLLGGVFFSFWVLAHLYPFAKGLMGRRGRTPTIVFVWSGLLAITISLLWVAINPPSQNSQIGGSFTFP

SEQ ID NO: 181212 - protein, 1024 aa, Oryza sativa
  Clone ID: PAT_MRT4530_78507C.1.pep
MARGSALLDGSVLPPSRIVSERQAGLPRRFMPESATGREIVTLGEGRPAPDYPGRSVFFLPFAMAGLVPPFSSFFMDVLEFYDLQMAHLTPNAVMTLAIFAHLCEMFIGVRPSLRLFRWFFTVQSVSPPSVVGGCYFQPRGPVLNRYIPCALRKKWDDWKSDWFYTPLADEARLRLPSQPPAQASSWRAPVDLGDCYDAVLDRLAGLRSQGLTGAMVYGDYLRRRIAPLQRHARGAWEYTGSEDFTRTHQGVRWDWAPEDFKILVQRVLNLNSVEASLIPQGILPLCSDPDRASILTIMMAVGASEERAPKGHNGAGGSRRGEQSTPGGGRASGSRDRGPGSSRPADARGKRKQGGTPPPSPPRGGGAVRASSRRPEGAAPTSQPEGERKKKGLRKMGETEPSRGNLISPPKWSFNRPPRSEIPSHPSRHSKSGQSEAEDPAAAEACRRESDRREAADRLREAEEAAQEAARARQAEETAREEAARARQAEEAAREEAARARQAEEAAREKAGFRQDEAMATSEAARDEAAGASLGPTPSGDAQATTSGAAGDEAAGASLGPTPSGDAQDQPGPGDIPESGTSIGGPSRVASSPRRLFPTPSIAPLNAEPLLQALAAANTTVLDGLSAQVEALQAERAELDAAWARVEEGRRSVEAMVEVGRKAHRRHVSELETRKKVLAEIAKEVEEEREAALIATTMMNEAQDTLRLQYGSWEAELGKKLDAAQGVLDAAAAREQRAAETEAASRRREEALEARAMALEERACVVERDLADREAAVTIREATLAAHEAACAEEEFALRLREDALTERERALEGAEAAAQQLADSLSLREAAQEEQARRNLEAAERTIADLQGALDSSAGEVEALRLAGEVGPGMLWDAVSRLDCAGRQVGLWRGRTVKYAANQGGLAQRLSKMAGALQRLPEELEKTIKSSTRDLAQGAVELVLVSYQARDPNFSPWMALDEFPPGTEDNARAQVRDAADHIVDSFEGSAPRLAFAPNSDEEGNAGGADDSDHGAGDPGASD

SEQ ID NO: 181213 - protein, 56 aa, Oryza sativa
  Clone ID: PAT_MRT4530_78508C.1.pep
RQVYFYLYHPKFHMSHMLLSELIFNFRTTILLKLITKTPPRCNGTRVHIVLGRYHI

SEQ ID NO: 181214 - protein, 163 aa, Oryza sativa
  unsure (1)..(163): unsure at all Xaa locations
  Clone ID: PAT_MRT4530_78509C.1.pep
SRQVFTHPFFVFWFFFCISEIPSRPSRHSKSGRSEAEETVTAEARRREADRREAANRLREAEEAAQEAIRARQAEEAAWEEARLHRAEESIRETEAXARARGRDCQAPDPTPPDADDDXSEATHDEAAGAPLGPDPSGDAXDEPASGDVPEFGTSIGGPSRAC

SEQ ID NO: 181215 - protein, 154 aa, Oryza sativa
  Clone ID: PAT_MRT4530_7850C.1.pep
IKPAENSEMHPNIRDKISHRRIDDGGGAQDHRRPAAGGGARHDAVRLGGGAAGGAGDGLRREGVASKWTASDSVSDLQSRPISMPIAYYCAMIISCKALVITLLLINQHHIKRNRRNSVFLLVIVPTEFLLLPPFHNVNHFSISHIHIDVNESI

SEQ ID NO: 181216 - protein, 202 aa, Oryza sativa
  Clone ID: PAT_MRT4530_78510C.1.pep
TRPGLHCFIIEQYINPIVVNSQHPLKGGLLNAVETVLKLSLPNVYLWLCMFYAFFHLWLSILAEILRFGDRYFYKDWWNAKTIDEYWRKWNMPVHKWVVRHIYFPCMRNGISKEVAVLISFLVSAVLHEICVAVPCRILKFWAFLGIMLQIPLIVLTAYLKSKFRDTMVGNMIFWFFFCIYGQPMCLLLYYHDVMNRIEKAR

SEQ ID NO: 181217 - protein, 1715 aa, Oryza sativa
  unsure (1)..(1715): unsure at all Xaa locations
  Clone ID: PAT_MRT4530_78511C.1.pep
MGSVSGIDDLVFPPGQAFRFGSLDFITNDFGKISLLDSDSIQSGKDQVSALFGIPNSAKIYSKLISIESASNYSDEIPSIPTPPDQDDGAYPPILMKLPDDLAAVFTTRVSSPRRPRRKSASTPIMPSSREVGVILQPLGTISTDQLEGYFSSPGVDSRPTEIVEYDEFGYRYDNRDLDDFDESFEDNYTPLYFGVFMADNETEEQRQARETKARRRRARDLIGQQDVEGTAVFRTPQQNAVAAITLLDTLLKEDALNQADHVVNILNQTKTMIAASVPVNSGSVXGHDERYVHSPPERHRERRVERPRXPPRQRPVDLRDMINQRRAARGHRHSPDRYDNDVDGVAAFTNDLRRVDWPAGFKPTGIEKYDGTTNPESWLTVYGLAIRAAGGDSKAMENYLPVALADSARSWLHGLPRGTIGSWAELRDHFIANFQGTFERPGTQFDLYNVIQKSRESLRDYIRRFSEQRNKISDITDNVIIAAFTKGIRHEDLVDKFGRKPPKTVKQMFEKANEYAKAEDAIIASKQSGPTWKPKKDVPTTGGGGSNNHKDRKRKPEEFVATTTHSSRQRSRVNTFDKIMNSQCPHHPNSNHAAKDCFVYKQFAEQYAKNARKTPDGEQSTSKKKDDDDDPPTGFQDHRKELNHIFGGPLAYESKRKQKLTEREINAVQPDTPQYLRWSEITIKFDRSDHPDRVVHPGRYPLVLDPVVHNVKLRRSLIDGGSALNILFAKTLDDMQIPRTELKPSNAPFHGVIPGLSAKPLGQITLPVTFGTRENFRTENVYFEVADFETAYHAILGRSALAKFMAVPHYTYMMMKMPGPRGVISLRSDIKQAVTCDKESCEMAQTREVAIAREDIRLAATTASEGEVPMAKISKSGESVDKTKKIPLDPSDPTKTVVIGAEEVIEHSLHVKEDAKPIKQRLRRFAQDRKDAIKEELTKLLAAGFIKEVLHPDWLANPVLVRKKTGQWRMCVDYTDLNKSCPKDPFGLPRIDQIRLKESDCLKTSFITPFGAYCYITMPFGLKNTGATYQRMIQRCFSTQIGHNVEAYVDDVVVKTKQKDDLITDLEETFASIRAFRMKLNPEKCTFGVPSGKLLGFMVSHRGIQANPEKVNAILNMKPPSSQKDVQKLTGCMAALSRFVSRLGERGMPFFKLLKKIDNFQWGPEAQKAFEDFKKLLTTPPVLASPHPQEPLLLYVSATSQVMSAVLVVEREEEGHVQKVQRPIYFVSDVLANSKTRYPQVQKLLYGVLITVRKLSHYFQGHSVTVVTSFPLGDILHNCEANGRIAKWALELMSLDISFKPQTSIKSQALADFVAKWTECQKDTSEEKMEYWTMHFDGSKRLSGTGAGGFLISPTGERLSYVLWIHFFASHNVAEYEALLHGLRIAISLGIRHLIVRGDSQLVVNQVMKEWSCLDDNMIAYRQEVRKLEDKFDGLELTHVLWHNNEAADRLANFGSKREAAPFDVFVEHLHEPTVPKREIAEAADTQDIAMVETDWREPLIRFVTSQELPQDKDEAERISRSSRLYIIHETELYRKSPSGILQRCVSLEEGRQLLKDIHSGICGNHAAARTIVGKAYRQGFFWPTAVSDADKIVRTCEGCQFFARQTHLPAQELQTIPLSWLFAVWGXDMVGPFKKAVGGYTHLFVAIDKFSKXIEAKPVITITADKARDFFINIVHQFGVPNQIITDNGTQFTGGVFKDFCEDFGIKIFYASV

SEQ ID NO: 181218 - protein, 1681 aa, Oryza sativa
  unsure (1)..(1681): unsure at all Xaa locations
  Clone ID: PAT_MRT4530_78512C.1.pep
VYTTGIEAAGGDDRVMANFFPMALKGQARGWLMNLPPVSVHSWEDLCQQFTMNFQGTYPRPDEEADLHAVQRRDDESLRSYIQRFCQVRNTIPCIPAHAVIYTFRGGXVRHNRMLEKIASKEPQTTAELFQLADRVARKEEAWTWNSTGSGVAASAAPGSAARSGRRDRRRKKRSAHSDDERHVLAVEGASRATRKGRPASDKXKEAGAPCCTVHNTSLHDLTDCRAVKSLAERTRKWEEERRQERREGKAPAAPSGNRRSEAKQKAPAEDVDDDDDDLGFQEPGATIATVDGGACAHASRRSLKAMKRELLAAAPTHEATRRARWSEVALTFDQTDHPPCVARGGQIAMVVSPTVCNMKLGRVLIDGGAALNILSPAAFDAIKVPGMVLRPSQPIIGVTPGHTWPLGHIDLPVTFGGSANFRTERVNFDVADLSLPYNAVXGRPALVKFMAAVHYAYLQMKMPGPGGPISVHGDLKVALACMEQRADHLAAASKPEGGNERLSTSVPAAPRQRMITCDEVPEDALVSFLRANADVFAWRPADMPGVPRKVIEHRLAVQTGARPVRQKVRRQAPERQAFIREEVARLLEAGFIREVIHPEWLANPIVVPKANGKLRMCIDYTDLNKACPKDPYPLPRIDQIVDSTAGCDLLCFLDAYSGYHQIRMAREDEEKIAFITPIGTYCYTTMPFGLKNAGPTFQRTTRISLGSQIGRNVEAYVDDLVVKTRNQETLLLDLAETFESLRSARIKLNPDKCVFGVPAGXLLGFLVSARGIEANPEKIRAIERMRPPXSKLRDVQCVTGCMAVLSRFISRLGEKTLPLFKLLKRSGPFIWTEEAERAFTQLKAYLSSPPVLVAPEPDEPLLLYLAETPQVVSAALVVERDEDNPHPAHPHPVSTRPGREQGGEAPEPNGGPRPPTAGAGPSHVCPTVPGAPDPQDGPGATAGRPRLSPXTPRSSAQKPSAPRAASRTKSALEMREALRDAKTRYPQAQKMLYAILMASRKLRHYFQAHRVTVVTSYPLGQILHNREGTGRVVKWAIELSEFDLHFEPRHAIKSQALADFVAEWTPAPEHVSAPEASLGPSQLPHTAYWVMQFDGSLSLQGTGAGGTLTSPSLDVLRYMVRLDFRATNNMAEYEGLLAGLRVVAGLGIRRLLVLGDSQLVVNQVSKEYQCSDPQMDAYVRQVRRMERHFDGIELRHVPRRDNAVADELSRLASSXAQTPPGAFEERLAQPSVRPDPLGETDAPERPPRPVEVQASGPEGSAPSSLRLIAWITEIQAYLTDKTLPEDREGSERVQRISKRYVLVEETLYRRAANGVLLKCIPREQGVELLADIHEGECRAHSASRTLVGKAFRQGFYWPTALNDAVDLVRRCRACQFHAKQTHQPAQALQTIPLSWPFAVWGLDILGPFRRAPGGFEYLYVAVDKFTKWPEAYPVIKIDKHSALKFIRGITARFRVPNHIITDNGTQFTSELFGDYCKDMGIKLCFASPTHPRSNGQVERANAEILKGLKTKTFNILKKHGDSWIEELPAVLWANRTTPSRATGETPFFLVYGAEAVLPSELTLRSPRATMYCEADQDQLRRDDLDYLEERRRRAALRAARYQQSLRCYHQRHVRARSLCVDDLVLRRVQTRAGLSKLSPMWEGPYRVIGVPRPGSVRLATGDGTELPNPWNIEHLRRFYP

SEQ ID NO: 181219 - protein, 62 aa, Oryza sativa
  Clone ID: PAT_MRT4530_78513C.1.pep
LIWLLNYLGTVQFSGSLKIWCQVVYLISFIFFLTLCDCPLSYICKYICISLISSFKWTINYF

SEQ ID NO: 181220 - protein, 1132 aa, Oryza sativa
  unsure (1)..(1132): unsure at all Xaa locations
  Clone ID: PAT_MRT4530_78514C.1.pep
MGFVSGIDDFVFPPGQAFRFGSLDFITNDFGKISLLDSDPNQSGGGQVSAPFGIPNSAEIYSKIISTESASNQSDEIQSTSTRPDQDNGAYPSILMSLPDDLATVFTTRASSSRRPRPDPASASIQPSSREVGVILQRLGTVSTEELYGFLSSPGVDSRPTEIVEYDYFDYHYDYRNLDNFDEGHEDNYAPLFFGVFMADNDTEEQRQAREAEEQHVRQEAERRRLEEERQAQERERLQREQQEHERATKEAEDRRQRALEAGRRARELIGQQDVEGTAVFRTPQQNAVAAITLLDTLLKEDALNQANHVVNILNQIKTMIVASVPVNSASVRTPTGSRVPPLRSQDYHQPSLSVVGAGSSRRSRDHGERYVHSPPDRHRERRAEQPRSPRRSRPVDLCETINQRRTARGYIPHHSLDHYDDDVDGDAAFTSDLRRVDWPTGFKPTGIEKLAIRTTGGDSKAMANYLPVALADSARSWLHGLSRGTIGSWAELRDHFIANFQGTFERPDYIRRFSEQHNKISDITDDVIIAAFTKGIRHELLVGKPPRTVKQMFEKANEYAKAEDVVTASKQSGTTWKPKKDTPTTRGSGSTNYKDRKQQYAKNSSKPTDGVQSTSKKKDDEDDAPTGFQDSRKELNHIFGGPLAYEYLVVRNVKLRRSLIDGGSALNILFAKTLDDMQIPRTELKPSNAPFHGVIPGLSSTPLDQITLPVTFGTWENFRTKNICFEVVDFETAYHAILERPVLAKFLAVPHYTYMMMKMPGXCHKESCEMAQTREITLAREEIRLAASTATEGEXVIEHSLHVKEDAKPIKQRLRCFAQDRKDAIKEELTKLLATGFIKEVLHPDWLANLVLVLKKTGQWRMCVDYTDLNKSCPKDPFGLPRIDQVVDSTAGCELLSFLDCYSGYHQIHLKESNYLKTSFITPFGAYCYITMPFGLKNAGATYQRMIQRCFSTQIGRNVEAYVDDVVVKTKQRDDLIADLEETFASICFFKMKLNPKKCIFGVTSGKLLGFMASHRGIQANSEKINAILNMKPPSSQNDVQKLTGCMVALSWFVSRLGEWGMLFFKLPKKADNFQWGPESQKAFEDFKKLLTTPPVLSSPHPQEPLLLYVSTTSQVVSMVLVVEREDDGHV

SEQ ID NO: 181221 - protein, 1681 aa, Oryza sativa
  Clone ID: PAT_MRT4530_78515C.1.pep
MANFFPMALKGQARGWLMNLPPASVHSWEDLCQQFTMNFQGIYPRPGEEADLHAVQRRDDESLRSYIQRFCQVRNTIPCIPAHAVIYAFRGGARHNRMLEKIASKEPQTTAQLFELADRVARKEEAWTWNSSGSGVAAPAAPGTAARSGRRDRRRKKGSARFDDEGHVLAVEGASRAPRKGRPASDKKKEAGAPSRERPTGKWCTVHNTSLHDLADCRAVKSLAERTRKWEEEKRQERREGKTPAAPASNRRGEAKQKATAEDIDDGDDDLGFQEPEATVATVDGGACAHASRRSLKAMKRELLAAAPTHEATRRARWSEVALTFDQTDHPPCVTRGGQIAMVVSPTVCNVKLGRVLIDGGAALNILSPTAFEAIKAPGMVLRPSQPIIGVTPGHAWPLGHIDLPVTFGGSANFRTERVDFDVADLSLPYNAVLGRPALVKFMAAVHYAYLQMKMPGPGGPITVHGDLKVELACMEQRADHLAAASKPAGGDERLSTSVPAAPRQRMVTCDEVPEDALVSFLRANADVFAWRPADMPGVPREVIEHRLAVRPGARPVRQKVRRQAPEHQAFIREEVARLLEAGFIREVIHPEWLANPVVVPKANGKLRMCIDYTDLNKACPKDPYPLPRIDQIVDSTAGCDLLCFLDAYSGYHQIRMAREDEEKTAFITPIGTYCYTTMPFGLKNAGPTFQRTTRISLGSQIGRNVEAYVDDLVVKTRNQETLLSDLAKTFESLRSARIKLNPDKCVFGVPAGKLLGFLVSARGIEANPEKIRAIERMRPPSKLTDVQCVTGCMAALSRFISRLGEKALPLFKLLKRSGPFTWTEEAERAFTQLKAYLSSPPVLVAPEPDEPLLLYLAATPQVVSAALVVERDEDNPHSAHPYPVSTRPGREQGGEAPEPNGGPRPPTVGAGPPPACPTVPGAPDPQDGPGATAGRPRLSPSDPEVIGTEAECAPRGLSVEERPGDAAPGEEDWPRRKVQRPVYFVSEALRDAKTRYPQAQKMLYAILMASRKLRHYFQAHRVTVVTSYPLGQILHNREGTGRVVRWAIELSEFDLRFEPRHAIKSQALADFVAEWTPAPEPVSAPEASSGPSQLPHTAYWGAGAGVTLTSPSGDVLRYLVRLDFRATNNMAEYEGLLAGLRVAAGLGIRRLLVLGDSQLVVNQVCKEYRCSDPQMDAYVPQVRRMERHFDGIELRHVPRRDNAVADELSRLASSRAQTPPGAFEERLAQPSARPDPLGETDAPERPPRPVGVQASGPEGSAPSSPRLIAWITEIQVYLADKTLPEDREGSECVRRISKRYALVEGTLYRRAANGVLLKCIPREQGVELLADVHEGECGAHSASRTLVGKAFRQGFYWPTALNDAVDLVRRCRACQFHARQTHRPAQALQTIPLSWPFAVWGLDILGPFRRAPGGFEYLYVAVDKFTKWPEAYPVIKIDKHSALKFIRGITARFGVPNRIITDNGTQFTTELFGDYCEDMGIKLCFASPAHPRSNGQVERANAEILKGLKTKTFNILKKHSDSWIEELPAVLWANQTTPSRATGETPFFLVYGAEAVLPSELTLRSPRVTMYCEADQDQFRRDDLDYLEERRRRAALRAARYQQSLRRYHQRHVRARSLCVDDLVLRRVQTRAGLSKLSPMWKGPYRVIGVPRPGSVRLATGEGTELPNPWNIEHLHRFYP

SEQ ID NO: 181222 - protein, 107 aa, Oryza sativa
  Clone ID: PAT_MRT4530_78516C.1.pep
MPQPTKPVAPQRHTLGIKKALVLVFYACDGSRPIGLCEYQLANIGRAIAGTKKRSLRTAVEAARRLPGEQHSAAHAMATSLHERARSLLMAWVAQLTAGPSPRGPGH

SEQ ID NO: 181223 - protein, 1065 aa, Oryza sativa
  Clone ID: PAT_MRT4530_78517C.1.pep
MARGSALLDGSVLPPSRIVSERQAGLPRRFMPESATGREIVTLGEGRPAPCYPGRSVFFLTFAMAGLVPPFSSFFMDVLEFYDLQMAHLTPNAVMTLAIFAHLCEMFIGVRPSLRLFRWFFTVQSVSPPSVVGGCYFQPRGPVLNRYIPCVLRKKWDDWKSDWFYTPLADEARLRLPSQPPAQASSWRAPVDLGDGYDAVLDRLAGLRSQGLTGAMVFGDYLRRRIAPLQRRARGAWEYTGSEDYMRTHQGVRWDWAPEDFKIVVQRVLNLSSVEASLIPQGVLPLCSDPDRASILTIMQAVGASEERAPRGHDGAGGSRRGEQSTPGGGRASGPRNGGPGSGRPADARGKRKQEGTPPPSPPRGGGVARASSRRPEGATPTSQPEGERKKKRPHKMGGTEPSRGNLISPPRWSFNRPPRSEIPSRPSRHSKSGQSEAEDPATTEARRRESDRREAADRLREAEEAAQVAVRARQAEEAAREEARLRQAEATASSEATRETDQQEAADRLREAEEAAQVAVRARQTEEAAREEARLRQAEATTTSETARDEAAGASLGPTPSCDARDKPGPGDIPESGTSIGGPSRAASSSRRLFPTPSVAPLSAEPLLQALAVANTMVLDGLSAQMEALQAERVELDAAWARVEEGRRSVEAMVEVGRKAHRRHVSELEARRKVLGEIAKEVEEERGAALIATTVMNEAQDTLRLQYGSWETELGKKLDAARGVLDAAAARERRAAETEVASRRREEALEARAMALEERACAVERDLADREAAVAIREATLTAHEAACAEEESALRLREDALTERERALEEAEAAAQRLADSLSLREAVREEQARRNLEDARAERAALNQRAAELEAREKELDARARSGGAAAGESDLTARLAAAEHTIADLQGALDSSAGEVEALRLAGEVGPGMLRDAVSRLDRAGRQAGLWGGRTAKYAANQRGLAQRLSEIAGTLQRLPEELERTIKSSSRDLARGAVELVLASYQARDPDFSPWTALDEFPPGTEDGARAQVRDAADHIVHSFEGSAPRLAFALNSDEEDDDGGVDDSGDEAGDPGASE

SEQ ID NO: 181224 - protein, 1869 aa, Oryza sativa
  unsure (1)..(1869): unsure at all Xaa locations
  Clone ID: PAT_MRT4530_78518C.1.pep
MAERAVAHNLSPSASGDDSEQNPRRRARTPPPPSRRSLRREEALEGVERSATSPPTSDGEGRRDGERRLLVYGDGSTPQGALQAAGALLRHPPVVPDPETPARCWLDDVADLVMTAQQRLGAGGRSSATKASGAATAGSVSSRRRARRAAAVTRRSSAIPSSTPPTQEDVRRGLDARLSIERWRNGRHASHATEGASSSGAPLRFGRGGQPPVPPIGGVGCRAFVASLRNVRWPPRFRPTITEKYDGSVNPAEFLQVYMTGIEAAGGDDRVMANFFPMALKGQARGWLMNLPPASVHSWEDLCXQFTMNFQGTYPRPGEEADLHAVQRRDDESLRSYIQRFCQVRNTIPCIPAHAVIYAFRGGVRHNRMLEKIASKEPQTTAELFQLADRVARKEEAWTWNSTGSGVAASAAPGSAARSGRRDRRRKKRSAHSDDEGHVLAVEGASRATXKGRPASDKKKEAGAPSRERPTGKWCTVHNTSLHDLADCRAVKSLAEWTRKWEEERRQERREGKAPAAPSGNRQSEAKQKAPAEDIDDGDDDLGFQEPGATIATVDGGACAHASRRSLKAMKRELLAAAPTHEATRRARWSEVALTFDQTNHPPCVARGGQIAMVVSPTVSNVKLGRVLIDGGAALNILSPAAFDAIKAPGMVLRPSQPIVGVTQGHTWPLGHIDLPVTFGGSANFRTERVNFDVADLSLPYNAVLGRPALVKFMVAVHYAYLQMKMPGPGGPISVHGDLKVTLACMEQRADHLAAASKPEGGNERLSTSVPAAPRQRMITCDEVPEDALVSFLRANADVFAWRPADMPGVPREVIEHRLAVRPGARPVRQKVRRQAPKRQAFIREEVARLLEAGFIREVIHPEWLANPVVVPKANGKLRMCIDYTDLNKACPKDPYPLPRIDQIVDSTAGCDLLCFLDAYSGYHQIRMAREDEEKTAFITPIGTYCYTTMPFGLKNTGPTFQRTTRISLGSQIGRNVEAYVDDLVVKTRNQETLLSDLAETFESLRSARIKLNPDKCVFGVPAGKLLGFLVSARGIEANPKKIRAIERMRPPSKLRDVQCFTGCMAALSRFISRLGEKALPLFKLLKHSGPFIWTEEAERAFTQLKAYLSSPPVLVAPEPDEPLLLYLAATPQVVSAALVVERDEDNPHPAHPHPVSTRPGREQGGEAPEPNGGPRPPTAGAGPPPACPTVPGAPDPQDGPGATAGRPRLSPSDPEVVGTEAECAPRGLSDEERPGDAAPSEEDRPRRKVQRPVYFVSEALQDAKTXYPQAQKMLYAILMASRKLRHYFQAHRVTVVTSYPLGQILHNREGTGRVVKWAIELSEFDLHFEPRHAIKSQALADFVAEWTPAPEPISVPEASSGPSQLPHTAYWVMQFDGSLSLQGAGAGVTLTSPNGDVLRYLVRLDFRATNNMAEYEGLLAGLRVAAGLGIRRLLVLGDSQLVVNQVCKEYQCSDPQMDAYVRQVRRMERHFDGIELRHVPRRDNAVADELSRLASSRAQTPPGAFXERLAQLSARPDPLGETDAPERPPRPVGVQASGPEGSAPSSLRLIAWITEIQAYLTDKTLPEDCEGSERIQRISKRYVLVEGTLYRRAANGVLLKCIPREQGVELLADIHEGECGAHSASRTLVGKAFRQGFYWPTALNDAVDLVRRCRACQFHAKQTHQPAQALQTIPLSWPFAVWGLDILGPFRRAPGGFEYLYVAVDKFTKWPEAYPVIKIDKHSALKFIRGITARFGMPNRIITDNGTQFTSELFGDYCEDMGIKLCFASPAHPRSNGQVERANAEILKGLKTKTFNILKKHGDSWIEELPAVLWANRTTPSRATGETPFFVVYGAEAVLPSELTLRSPRATTYLPGDLRQVPTTGLEL

SEQ ID NO: 181225 - protein, 119 aa, Oryza sativa
  unsure (1)..(119): unsure at all Xaa locations
  Clone ID: PAT_MRT4530_78519C.1.pep
QDFLFLNTEEISCFLTANKGFIGVSADELSGRLHRLXELYPIGFYWIILLLYFXYHQPIVFXIIIYIGHIADSSKPYRYQLDQTDWHARISXRLGPALELSRSPRPVCVFRINMMYQSL

SEQ ID NO: 181226 - protein, 63 aa, Oryza sativa
  unsure (1)..(63): unsure at all Xaa locations
  Clone ID: PAT_MRT4530_7851C.1.pep
FVKNTLHNLLMVKVLDNYTFXKDYIFRCFFTFTRVILEGEFQYKFFLQSVKLVKLNLHFKCML

SEQ ID NO: 181227 - protein, 139 aa, Oryza sativa
  Clone ID: PAT_MRT4530_78520C.1.pep
MRAHMSLTGVRAASDRRLDALSIDLEVGFPGRRLAMLSIAPTQDALISPLPSRRRRFTSARSPPIPSSRQSTLALAVAQIGTAADPMLALAHSSPPHLAPLPIAPTRPSTVSPPRAISAGRRSSGEDQDTIHVLDRSQI

SEQ ID NO: 181228 - protein, 573 aa, Oryza sativa
  unsure (1)..(573): unsure at all Xaa locations
  Clone ID: PAT_MRT4530_78521C.1.pep
VVEELDGYLNSPGVSSRPTEILDYDDFGYHYDHGDPDNFDDGYEDNYTPLFFGVFMADNETEEXRRAREANQDRERQEAERRRLEEERQQXERERLQREQQDRERIAKEAEDRRQRALESGRRARELIGQQDVDGTTVFRTXPQQNAVAAITLLDTLPKEDALNQADHVVNILNQTKTMIAASVPANSASTRTPTGSRVPNLRSQDYHQPSLSIAGAGSSHRSKGHDERSVCSPPERYRERRVERPHSPHRRRPIDLRDTINQRRAARGHHSPDRYDDDVDGVAAFTSDLRRVDWPAGFKPTGIEKYDGTTNPESWLTVYGLAIRAAGGDNKAMANYLPMALTDSARSWLHGLPRGTIGSWAELRDHFIANFQGTFERPGTHFDLYNIIQKSRESHQDYIRRFSEQCNKISDITDDVIIAAFTKGIRHEDLVGKFGCKPPKTVKQMFEKANEYAKAEDAITASKQSGTTWKPKKDTPTTGGSGSNNHKDRKRKPEELVATTSPSSRQRSRVNTFDKIMNSQCPHHPNSNHVAKDCFVYKQFAEQYVKNARKPSDGDQGTSKKKDDEDDAPTGF

SEQ ID NO: 181229 - protein, 1969 aa, Oryza sativa
  unsure (1)..(1969): unsure at all Xaa locations
  Clone ID: PAT_MRT4530_78522C.1.pep
MAERAVAHSLSPSASGDDGEQNPRRRARTPPSPSRRNLGRGEALGEVEGSATSPPAGDGGGRRDGARRRLVYGDGGTPQGALQAAGALLRHPPVVPDPETPARRWLDDVADLVMTAQQRLGAGGRRRXRSSATEASGAAAAGSMSSRRRARRAAAVTRRSSAIPSSTPPTQEDVRGGPDARLDIERRRDARRAAHATEGASSSGAPLRSGHGGRPPVSPVGGAGCRAFVASLRNVRWPPRFRPTITEKYDGSVNPAEFLQIYTTGIEAAGGDDRVMANFFPMALKGQARGWLMNLPPASVHSWEDLCQQFTTNFQGIYPRPGEEADLHAVQRRDDESLRSYIQRFCQVRNTIPCIPAHAVIYAFRGGVRHNRMLEKIASKEPQTTAQLFELADRVARKEEAWTWNSSGSGVAALAAPGSAARSGRRDRRRKKRSAHSDDEGHVLAVEGASRAPRKGRPASDKKKEAGAPSRERPTGKWCTVHNTSLHDLADCRAVKSLAERTRKWEEEKRQERREGKTPAAPAGNRRGEAKQKATAEDIDDGDDDLGFQEPEATVATVDGGACAHASRRSLKAMKRELLAAAPTHEATRRARWSEVALTFDQTDHPPCVARGGQIAMVVSPTVCNVKLGRVLIDGGAALNILSPAAFDAIKAPGMVLRPSQPIIGVTPGHTWPLGHIDLPVTFGGSANFRTERVDFDVADLSLPYNAVLGRPALVKFMAAVHYAYLQMKMPGPGGPITVHGDLKVALACMEQRADHLAAASKPAGGDERLSTSVPAAPRQRMVTCDEVPEDALVSFLRANADVFAWRPADMPGVPREVIEHRLAVRPGARPVRQKVRRQAPERQAFIREEVARLLEAGFIREVIHPEWLANPVVVPKANGKLRMCIDYTDLNKACPKDPYPLPRIDQIVDSTAGCDLLCFLDAYSGYHQIRMAREDEEKTAFITPIGTYCYTTMPFGLKNAGPTFQRTTRISLGSQIGRNVEAYVDDLVVKTRNQETLLSDLAETFESLRSARIKLNPDKCVFGVPAGKLLGFLVSARGIEANPEKIRAIERMRPPXSKLRDVQCVTGCMAALSRFISRLGEKALPLFKLLKRSGPFTWTEEAERAFTQLKAYLSSPPVLVAPEPDEPLLLYLAATPQVVSAALVVERDEDNPHSAHPHPVSTRPGREQGGEAPEPNGGPRPPTAGAGPPPACPTVPGAPDPQDGPGATAGRPRLSXPLTPRSSAQKPSAPRVASRTKSALEMRPLAKRIGPAERCSGPVYFVSEALRDAKTRYPQAQKMLYAILMASRKLRHYFQAHRVTVVTSYPLGQILHNREGTGRVVRWAIELSEFDLRFEPRHAIKSQALADFVAEWTPAPEPVSAPEASSGPSQLPHTAYWVMQFDGSLSLQGAGAGVTLTSPSGDVLRYLVRLDFRATNNMAEYEGLLAGLRVAAGLGIRRLLVLGDSQLVVNQVCKEYQCSDPQMDAYVRQVRRMERHFDGIELRHVPRRDNAVADELSRLASSRAQTPPGAFEERLAQPSARPDPLGETDAPERPPRPVGVQASGPEGSAPSSPRLIAWITEIQAYLADKTLPEDREGSERVRRISKRYVLVEGTLYRRAANGVLLKCIPREQGVELLADVHEGECGAHSASRTLVGKAFRQGFYWPTALNDAVDLVRRCRACQFHARQTHQPAQALQTIPLSWPFAVWGLDILGPFRRAPGGFEYLYVAVDKFTKWPEAYPVIKIDKHSALKFIRGITARFGVPNRIITDNGTQFTSELFGDYCEDMGIKLCFASPAHPRSNGQVERANAEILKGLKTKTFNILKKHGDSWIEKLPAVLWANRTTPSRATGETPFFLVYGAEAVLPSELTLRSPRVTMYCEADQDQLRRDDLDYLEERRRRAALRAARYQQSLRRYHQRHVRARSLCVDDLVLRRVQTRAGLSKLSPMWEGPYRVIGVPRPGSVRLATGDGTELPNPWNIEHLRRFYP

SEQ ID NO: 181230 - protein, 1278 aa, Oryza sativa
  Clone ID: PAT_MRT4530_78523C.1.pep
MASSSSSSGTAAANLLQGHSVSEKLGKANHALWKAQVSAAVHGARLLGYLNGDIKAPNAEISVTIDGKTTTKPNPAFEDWEANDQLVLGYLLSSLSRDVLIQVATCKTAAEAWRNIEALYSTGTRARAVNTRLALTNTKKGTMKIAEYVAKMRALCDEMAAGGRPLDEEGLVQYIIAGLNEDFSPIVSNLCNKSDPITVGELYSQLVNFETLLDLYRSTGQGGAAFVANRGRGGGGGGGRGNNNNSDGGGGGGGRGAPRGRGGGGQGRGGHGRGTGGQDRRPTCQVCFKRGHTAADCWYRFDEDYVADEKLVAAATNSYGIDTNWYIDTGATDHITGELEKLTTKEKYNGGEQIHTASGAESVGRNKYYVSFIDDFSKFTWIYLLKYKSEVFEKFKEFQALVERMFDRKIIAMQTDWGGEYQKLNSFFAQIGIDHHVSCPHTHQQNGSAERKHKHIIEVGLSLLSYASMPLKFWDEAFVAATYLINRIPSKTIQNSTPLEKLFNQKPDYSSLRVFSCTCWPHLHPYNTHKLQFRSKQCVFLGFSTHHKGFKFLDVSSGRVYISRDVVFDENVFPFSTLHSNAGARLRSEILLLPSPLTNYNTVSAGGTHIVAPVANTPLPSDNLISNAADVTSGENSAAHEQEMENEQEIENVMHGNDVHGDAASGPVLDQPTADSSTAPDQGANTSDAVSGAASDAGGDTATLGAGAANGAAAGGEESQPVPPDVTGTVAATVAPASRPHTRLRSGIRKEKVYTNGTVKYGCFSSTGEPQNDKEALGDKNWRDAMETEYNALIKNDTWHLVPYEKGQNIIGCKWVYKVKRKADGTLDRYKTRLIAKGFKQRYGIDYEDTFSPVVKAATIRIILSIAVSRGWSLRQLDVQNDFLHGFLEEEVYMQQPPGFESSSKPDYVCKLNKALYGLKQAPRAWYSRLSKKLTELGFEASKADTSLFFLNKGGIIMFVLVYVDDIIVASSTEKATTALLKDLNKEFTLKDLGDLHYFLGIEVTKVSNGVILTQEKYANDMLKRVNMSNCKPVSTPLSVSEKLTLYEGSPLGPNDATQYRSIVGALQYLTLTRPDIAYSVNKVCQFLHAPTTSHWIAVKRILRYLNQCTSLGLHVHKSASTLVHGYSDADGAGSIDDRKSTGGFAVFLGSNLVSWSARKQPTVSRSSTEAEYKAVANTTAELIWVQTVLKELGIESPKAAKIWCDNLGAKYLSANPVFHAKTKHIHVDYHFVRERVSQKLLEIDFVPSGDQVADGFTKALSARLLENFKHNLNLTRL

SEQ ID NO: 181231 - protein, 1033 aa, Oryza sativa
  Clone ID: PAT_MRT4530_78524C.1.pep
MARGSALLDGSVLPPSRIVSERQAGLPRRFMPESATGREIVMLGEARPAPDYPGRSIFFLPFAMAGLVPPFSSFFMDVLEFYDLQMAHLTPNAVMTLAIFAHLCEMFIGVRPSLQLFRWFFTVQSVSPPSVVGGCYFQPRGPVLNRYIPCVLRKKWDDWKSDWFYTPLANEAHLRLPSQPPAQVSSWRAPVDLGEDYDAVLDRLAGLRSQGLTGAMVYGDYLRRRIAPLQRRARSAWEYTGPEDYMRTHQGARWDWAPEDFKIVVQRVLNLSSAEASRIPQEILPLCSDPDRASILTIMMGVGASEERAPKGHDGAGERRRGEQSAPGGGRASGPRVGGSGSSRPADAQGKRKLGGTPPTSPPRGGGAARASSRRPEGAAPTSQPEGERKKKRLRKMGETEPSRGNLISPPKWSFNRPPRSDAPSHSSRHPKSGQSEAEDPAAAEERRRESDRREAADRLREAEEAAREAARVRQAEEAAREEAARARQAEATAAAGASLGPTPSGGPQATSSEAARDEAAGASPGPTSPGDAQDQTGPGDIPEPSASSGGPSRVAFSPRRLFSSSSVAPLSAEPLLQALAAANTAVLDGFNAQVEALRAERAELEAAWARVEEGRRSVDAMVEVGRKAHRRHISELEARKAALAEIAREVEEEREAALIATTAMIEAQDTLRLQHASWEAELKKKLDAAQGVLDSAAARERRVTETEAASRRREEALESRAMALEEHAGTVERGLTDREAAAALREATLAAHEAACAEEECALRLREDALAERERALEEAEATTKRLADSLSLREAAQEEQARRNLECVRAERAALEQRAADLEAREKELDARAPIGGAAAGESDLAARLAAAEHTVAEMQRALDSSTGEAEALRLAGEIGPDMLWDAVSRMKRAGRQAGLWRGQTSVPPTNLEGLAPHLNRMAWVLEQLPEELEKTIKSSSRDLARGAVELVLASYQARDPNFSPWMALEEFPPGTEDDARARVRDAADHIVNGFEGSAPRLAFAPSSDEEGDASSEDDGGDEAGDPGASE

SEQ ID NO: 181232 - protein, 884 aa, Oryza sativa
  Clone ID: PAT_MRT4530_78525C.1.pep
MAGLVPPFSIFFMDILEFYDLQMAHLTPNAIMTLAIFAHLCEMFIGVRPSLQLFRWFFTVQPVSPLTVVGGCYFQPRGQVLNRYIPCVLRKKWDDWKSDWFYTPLADEARLRLPSQPPAQASSWRATVDLGDGYDAVLDRLAGLRSQGLTEAMVFGDYLRRRIAPLQRRARGAWEYTGPEDYMRTHQGCKWDWDPEVFRMVVQRVLNLSSVEASLIPQGVLPLCCDPERAKILTIMQVVGASGERAPRGHDGAGGSRRGEQSTPGGGRASGPRDGGPGGSRPAEARGKRKQEGTPPPSPPRGGGASGRSEAEETATAEARRREADRREAADRLREAEEAAQEAVRVRQAEEAAREEARLRRAGESVRVAEAARARQVACQTPDSIPPEATTTSEATHDEAAGAPLGPDPSGDAWDEPGSGGAPESGTSIGGPSRAAPTPRGLSPRPSAAPLSTEPFLQALAAANSTVLDGLSAQMEALQAERAELDAAWARVEEGRRSVEAMVEAGRKAHRRHASELEARRRDLAEIAREVEEERETALIATAVLDEARNDLRLQYGSRAAELEEKLDAARGVLDAAAARERRAAENEAASRRETWRTARPPSHEAACAEEESALRFREDALTERGRALEEAEAAAQRLADILFLREAAREEQARRNLEGARAERAALDQRAAELEARAKELDGRARSGGAAAGHGDLVARLAAAEHTIAELQGALDSSAGEVEALRLASEVGPGMLWDAVSHLDRAGRRAGLWGGRHAKYAANQGGLAQRLSEMTGALERLPEELEGTIKSSSRDLARGTVELVLASYQARDPDFSPWAVLEEFPPGTEDSARAQVRDAADHIVHSFEGTAPRLAFALDSDEEGGDDGADDSDDEADDPGASE

SEQ ID NO: 181233 - protein, 69 aa, Oryza sativa
  Clone ID: PAT_MRT4530_78526C.1.pep
LPNNNKQQRIVLVLGPAQPYMTNRKIWIEPSCHGHGRLACFVFRKYSVRMHRNICISKHPVQSSTEVCN

SEQ ID NO: 181234 - protein, 430 aa, Oryza sativa
  Clone ID: PAT_MRT4530_78527C.1.pep
RQFPPSVAPSQGYKSPGPSRGYLLVLTNGGLNQMRAGISDMVAVARMLKATLIIPELDKKSFWHDKSNFSDVFDEEYFIHSLANDVKVEKKLPKDLVKAPKFVRYFKSWSGIDYYHDEIYPLWEHRQVIRAAKSDSRLANNYLPPDIQKLRCRAFFQALRFAPPIEALGNLLVERMRSFGPYIALHLRYEKDMLAFSGCTHGLSQTESEELAMIRENTSYWKVKDIDPLDQRSHGYCPLTPKEVGMFLSALGYPSSTPVYIAAGEIYGGESHVVDLLSRFPIMMNKEKLASAEELRPFRQYASQMAALDYIVSVESDVFIPSYSGNMARAVGGHRRFLSHRKTIIPDRKALVRLFDKVDGGLLNEGERLSRRIIDIHRKRQGSPRKRKGPVSGTKGNDRFRSEEAFYENPLPDCLCQPESPASDASVVSI

SEQ ID NO: 181235 - protein, 897 aa, Oryza sativa
  Clone ID: PAT_MRT4530_78528C.1.pep
MPSTDWMAMVAGDGGGDTWPKGVARRRAAVAKRWATAARMVGGGSYTTAGGGSGNAAAAARAQLRPAGRAPFRPRRPRQAPPPVAAAWEGGRGRPCRAAAASSPVAGLPPPPPVCCPAPLPTAEPNCGGKGERKMVLTRGFYADSAATSDKTRVKTTKGSNLHWFWGPFLHAGGERPLIGTRHASSPRQCAYQLLVTTTTLSAAAPTPIALPGCPESCGGIQVPYPFGIGDGCSYHGFNLTCDDEAHHHQTPPKLFMATDNGTVVQVLNISLPDGTVRVRSKLSQSSIAGSSSSSSNASSSRSDLPADGPFTVSSAYNWLVAFGCNIVADLTPYGNIADGSSCAATCIDGWQNFAGPSCSGIARCRTSVGRGVHSYTIQVTSLIDRNSMGASTSTTWAAAFVAEQGWFSANENAMLYNFTNWLPFTVESVPVVLEWWLDLIRDGAILPLSVGPNTTDFRCLSLHSSSYYNDLNYDRRRCNCSQGYEGNPYIRDGCRGLITIIAVSAGFGLLFSLLGVAKITNKIKQRRAKKLRRKFFKKNHGLLLQQLISSNKDIAERMKIFSLEELDQATNKFDQNRILGGGGHGTVYKGILSDQRVVAIKKSKIVVQREIDDFINEVVILSQTNHRNVVKLYGCCLETEVPLLVYEFISNGTLSFHLHGQNENPLKWKDRLRIALETARAIAYLHSAASISVLHRDIKSTNILLTDTMTAKVSDFGASRSISIDETGILTIIQGTYGYLDPEYYYSSRLTEKSDIYSFGVILAELLTRVTPVFSSETSERTSLASYFVSFIRDNRLSDILDSQIVNEVGAEDAKVVAKLAEACLRLKGEERPTMRQVETTLEDVQRSKVQLNHQIARVSNSNTLKNQTYEGSKCYEGTRQYSLEKEFIQSSEFPR

SEQ ID NO: 181236 - protein, 119 aa, Oryza sativa
  unsure (1)..(119): unsure at all Xaa locations
  Clone ID: PAT_MRT4530_7852C.1.pep
MSDLDVQLPSAFDPFAEANAEDSSVGAGSKDYVHVRIQQRNGRKSLTTVQGLKKEYSYNKILKDLKKEFCCNGTVVQDPELGQVIQLQGDQRKNVATFLVXGWNCKEREHQNTRVLGYT

SEQ ID NO: 181237 - protein, 52 aa, Oryza sativa
  Clone ID: PAT_MRT4530_78530C.1.pep
RRSCSRAPSCPWSILLFLYTAMHARNMFLPGLGIGSEWLAAQMGEEVEDPGR

SEQ ID NO: 181238 - protein, 112 aa, Oryza sativa
  unsure (1)..(112): unsure at all Xaa locations
  Clone ID: PAT_MRT4530_78531C.1.pep
RGHPKENDPEWGILNAVTLLTIKPSSKETAEIPDTENYTIGWELPVLGWEVSYXAEFTLDVQGGHTAIEPKTRKVPANGEPIMIGSXKVDEPGKIGLTIKQLLYQTRKKLLC

SEQ ID NO: 181239 - protein, 81 aa, Oryza sativa
  Clone ID: PAT_MRT4530_78532C.1.pep
MQNHKGVCGKVVGSADHTALWVAPHHCFRDIYVMPALVTFASFSLVLVPWIDFETAAVVPLDAFAASGASLATFGDVSDVD

SEQ ID NO: 181240 - protein, 31 aa, Oryza sativa
  Clone ID: PAT_MRT4530_78533C.1.pep
TNTTFLKNFDHTLRWHAPKHPITPIYSNTHT

SEQ ID NO: 181241 - protein, 114 aa, Oryza sativa
  Clone ID: PAT_MRT4530_78534C.1.pep
MSAFLATPNHNQESSLERSEGKANPTKPNQGQGVSSLNSKSQWNLGGRDMEERWPPLHSPLSHSNSSAPLFFFLGGGECTAFICCLIAAFPTPLFIPFHKTKNPKKKRNLPYPS

SEQ ID NO: 181242 - protein, 374 aa, Oryza sativa
  Clone ID: PAT_MRT4530_78535C.1.pep
MGAGWEEYKPCAAMVAAQCIYAALALWAKAVFTGGMSTMVFVVYRQAIATVFLVPIAIIANRRKKKETRLGMTGFSLIFVASLFGATVNQYVYYQGLHLGSSSMATAMSNLIPAITFVMAASVGLEKVDLRRVRSLAKIFGTTVCVGGAMAMAFFKGPRLLNSSSLIVDLNFLLHSSASSKWVMGALFLICSSCCWSLWLILQVPICKSYMDPLTLSAWMCFLSTLQSAVLVSFLVPDINAWKIHSLFELGCCLFAGVFGSGVTFYLQSWCISVRGPLYSAMFNPLCTVIATVVAAAFLHEELHIGSLMGAAAIVAGLYIVLWGKAADGGGKSGGSVPEHSHDVEKAAMRSESQLDVGEGITEPLLEAGNTAEK

SEQ ID NO: 181243 - protein, 103 aa, Oryza sativa
  unsure (1)..(103): unsure at all Xaa locations
  Clone ID: PAT_MRT4530_78536C.1.pep
ICILVGHKVLCSRLDMXSCVATERSSYYVLTPATGVVYNLPVNPAEEHVYHVQLXPAQTLPSFAFGHVASMGEYKVIXFTDLELHQLCEFITVKCGTHHADLC

SEQ ID NO: 181244 - protein, 1009 aa, Oryza sativa
  Clone ID: PAT_MRT4530_78537C.1.pep
MARGSAPLDGSVLPPSRIVSERQAGLPRRFMPESATGREIVSLGEGCPAPRYPGRSVFFLPFAMAGLVPPFSSFFMDVLEFYDLQMAHLTPNAVMTLAIFAHLCEMFIGVRPSLRLFRWFFTVQPVSPPSVVGGCYFQPRGPVLNRYILCVLRKKWDDWKSDWFYTPLADEARLQLPSQPPAQASNWRAPVDLGDGYDAVLDRLAGLRSQGLTGAMVFGDYLRRRIAPLQRRARGAWSTLGPRTAVGASEERAPRGHDGAGGSRRGEQSTPGGGRASGPRDGGPGSGRPADARGKRKQEGTPPPSPPQGGGAARASSRRPEGATPTSQPEGERKKKRPRKMGGTEPSRGNLISPPRWSFNRPPRSEIPSRPSRHSKSGQSEAEDPATTEARRRESVRREAADRLREAEEAAREAARARQTEEAAREEAGLRQAEVMTSSEATRETDRQEAADRLREAEEAAQVAVRARQAEEAAREEDRLRQAEATTTSEAARDEAAGASLGPTLSCDAQDKPGPGDIPESGTSIGGPSRAASSSRRLFPTPSVAPLSAEPLLQALAVANTTVLDGLSAQMEALQAERVELDAAWARVKEGRRSVEAMVEVGRKAHRRHVSELEARRKVLGEVAKEVEEERGAALIATTVMNEAQDTLRLQYGSWEAELGKKLDAARGVLDAAAARERRAAETEVASRRREEAIEARAMALEEHACAVERDLADREAAVAIREVTLAVHEAACAEEESALRLREDALTERERALDEAEAAAQRLADSLSLREAAQEEQARRNLEGARAERAALNQRAAELEAREKELDARARSGGAAAGESDLTARLAAAEHTIADLQGALDSSAGEVEALRLAGEVGPGMLRDAVSRLDRAGRQAGLWGGRTAKYAANQGGLAQRLSEIAGTLQRLPEELERTIKSSSRDLARGAVELVLESYQARDPDFSPWTALDEFPPGTEDGARAQVRDAADHIVHSFEGSAPRLAFALNSDEEDDDSGVGDSGDEAGDPGASE

SEQ ID NO: 181245 - protein, 59 aa, Oryza sativa
  unsure (1)..(59): unsure at all Xaa locations
  Clone ID: PAT_MRT4530_78538C.1.pep
QPYDCAIVFADATSPMVFINKGNTPPPLVHKDGHPASXRHHYCDDRYTAQENQPKWWPH

SEQ ID NO: 181246 - protein, 1046 aa, Oryza sativa
  unsure (1)..(1046): unsure at all Xaa locations
  Clone ID: PAT_MRT4530_78539C.1.pep
MARGSAPLDGSVLPLSRIVSERQAGLPRRFLPESATGQEIVTLGEGRPAPRYPGRTVFFLPFAMAGLVPLFSSFFMDVLEFYDLQMAHLTPNAVMTLAIFAHLCEMFIGVRPSLRLFRWFFTVQPVSPPSVVGGCYFQPRGPVLNRYIPCVLHKKWDDWKSDWFYTPLADEARLRLPNQPPAQASSWRAPVDLGDGYDAVLDRLAGLRSQGLTGAMVYGDYLRRRIAPLQRRARGAWEYTGSEDCMRTHRGVKWDWVPEDFKVMIQRVLNLSSAEASLIPQGVLPLCSDPDRATILTIMKAVGASEEQAPRGHDGAGGSCRGEQSTPGGGRASGLRDGGSGGXRPADARGKRKQEGSSSPSPPRGGGAARVSSRRPEGAAPTPQPEGERKKKRLRKMGGQNHPGETLFPLQGSRLTDPLAGSSHAHCGCIHSPNASFHSPILFVFWSFFCFSEISSRPSRHSKSGQSEAEDTATAEARRRESDRREATDRLREAEEAAREAVRARQAEEAAREEARLRQAEAATTSEAARDEAAGTSLGPTPSGNTQDKPGPGDVPEPGTSIGGPGRAASSPRRLSPTPSVAPLSAEPLLQALAVANTTVLDGLSAQMEALQAERAELDAAWARVEEGRHSVEAMVEVSRKAHRRHASELEARRKVLEEIAREVEEERGAALIATTVMNEAQDDLRLQYGSWEAELGKKLDAARGVLDAAAARERRAAETEVASRRREEALEARAMALEERACVVERDLADREAAVAIREVTLAAHEAACAEEESALRLREDALTERERALEEAEAAAQRLAESASLREAAQEEQARRNLEGARAERAALNQRAAELEAQARELDARARSGGAATGDSDLAARLAAAEHTIADLQGALNSSTGEVEALRLAGEIGPSMLRDAVSRLDRAGRQAGLWGGRTAKYAANQGGLAQRLSEMAGTLQRLPEELERTIKSSSRDLARGAVELVLASYQARDPDFSPWMALDEFPPGTEDGARARFQDAANHIVHSFEGSAPRLAFALSSDEEGDDGGVGDSGDEAGDPGASE

SEQ ID NO: 181247 - protein, 732 aa, Oryza sativa
  Clone ID: PAT_MRT4530_7853C.1.pep
MLFAKLDDSPMLRTQIQSLEESAEILRERCLKFHKGCRKYTEGLGEAYDGDIAFASSLETFGGGHNDPISVAFGGPVMTKFTIALRELGTYKEVLRSQVEHMLNDRLLNFVDIDLHDVKDARKRFDKASLLYDQVRDKYLSLKKGTRADITTAIEDGYDLLHQMEPYINQVLAYAQQSRERANKEQASLVERMHEYKKQIDREIRLSNGLTDAHNGDGIQTIARSSHKMIEAVMQSASKGKVQTIRQGYLSKRSSNLRADWKRRFFVLDSRGMLYYYRKQINRTPGGCSSHPRSIGNPTEHGSGLLSRLFSSHYHGIIHDEKSVARHTVNLLTSTIKVDAEQSDLRFCFRIISPTKVYTLQAESAIDQMDWIEKITGVIASLLSSQSPEQCFLLSPKSCGHDGSASESSSFTSQDLEPSMYDDLTLEKNTGNGQHDVRGTHYHKTNMKPEKPIDLLRKVDGNIICVDCGSMEPDWASLNLGALLCIECSGVHRNLGVHISKLISTTLFRSAHGLDTAWHFTVSKPKHSDPFSAKEKFIHAKYADKEFVRKYSMDEIQLAQQMWDNVTANDKRAVYSLIVQSRANVNLVYGEMSYSSRSTTGRSSQQEHSSSPSDGSPVFFDCHSHEKVSPREPLSPASTSSRVDDGEERCEDVGMVELLLQYGANVNAIDSRGRTPLHQCILKGRHIHAKLLLSRGANPQVADQDGRTALQCAIDGGTSDDEILVLLEDYTR

SEQ ID NO: 181248 - protein, 870 aa, Oryza sativa
  Clone ID: PAT_MRT4530_78540C.1.pep
MARGSAPLDGSVLPPSRIVSERQAGLPRRFMPESATGREVVALAEGRPAPHYPGRSIFFLSFAMAGLVLPFSIFFMDILEFYDLQMAHLTPNAIMTLAIFAHLCEMFIGVRPSLQLFRWFFTVQPVSPPTVVGGCYFQPRGQVLNRYIPCVLRKKWDDWKSDWFYTPLADEARLRLPSQPPAQASSWRATVDLGDGYDAVLDRLAGLRSQGLTGAMVFGDYLRRRIAPLQRRARGAWEYTGPDDYMRTHQGRKWDWDPEDFRMVVQRVLNLSYVEASLIPQGVLPLCCDPERAKILTIMQVVGASGERAPRGHDGAGGSRRGEQSTPGGGRASGPRDGGLGGSRPADARGKRKQEGTPPPSPPRGGGADEPASGDAPESGTLIGGPSRTAPTPRRLSPLSSAAPLSAEPFLQALAAANSTVLDGLSAQMEALQAERAELDTAWARVEEGRRSVEAMVEAGRKAHRRHTSQLEARRRDLAEIAREVEEERETALITTAVLDEARNDLRLQYGSRAAELEEKLDAARGVLDAAAARERRAAENEAASRQREEALEARATALEEHARALDAKERDLADREAAVATREATLAAHEAACAEEESALRFREDALTERGRALEEAEAAAQRLADSLFLREAAQEEQARRNLEGARAERAALDQRAAELEARAKELDARAHSGGAAAGQGDLAARLAAAEHTIAELQGALDSSAGEVEALRLASEVGPGMLRDAVSRLDRAGRQAGLWGGRHAKYAANQAGLAQRLSEMTGALERLPEELEETIKSSSRDLARGAVELVLASYQARDPDFSPWAALEEFPPGTEDGARAKVRDATDHIVHSFEGTAPRLAFALDSDEEGGDDGADDSDDEADVPGASE

SEQ ID NO: 181249 - protein, 85 aa, Oryza sativa
  Clone ID: PAT_MRT4530_78541C.1.pep
MLPPRASRSFWKEERGANPRLRGRDGGGGRRTRGVFVSRYAALEAKRKAVGLCLEIRARIDAAVSGWAVLMASNGHRRALMGRDR

SEQ ID NO: 181250 - protein, 990 aa, Oryza sativa
  Clone ID: PAT_MRT4530_78542C.1.pep
MARGSVPLDGSVLPPSRIVSERQAGLPRRFMPESATGQEVVALGEGRPAPHYPGRSVFFLPFAMAGLVPPFSSFFMDVLEFYDLQMAHLTPNAVMTLAIFAHLCEMFIGVRPSLRLFRWFFTVQPVSPPSIVGGCYFQPRGPVLNRYIPCVLRKKWDDWKSDCWRVPVDLGDGYDAVLDRLAGLRSQGLTGAMVYGDYLRRRIAPLQRRARGAWEYTGSEDCMRTHRGVKWDWVPEDFKVMIQRVLNLSSVEASLIPQGVLPLCSDPDRVNILTIMMTVGASEERASRGHDGAGGSRRGEQSTPGGGRASGPRDEGSGDSRPADARGKRKQEGTSSPSPPRGGGAARVSSRRPEGAAPTPQPEGERKKKRLRKMGWTEPSRGNLISPPRWSFNRPPHSEISSRPSRHSKSGQSEAEDTATAEARRRESDRREAADRLREAEEAARARQADEAAREEARLRQAEATTTSEATRETDRQEAANRLREAEEAAQDKPGPGDVPESGTSIGGPSRAASSPRRFSPMPSVAPLSAEPLLQALAVANTTVLDGLSAQMEALQAERVELDAAWARVEEGRRSVEAMVEVGRKAHRRHASELEARKKVLEEIAREVEEEREAALIATTVMNEVQDNLRLQHGNWEAELGKKLDAARGVLDAAAARERRVAESEAASRQREETLEARAMALEERSCVMVKDLADREAAVAIWEVTLAAHEAACAEEESALRLREDALTERERALEEAEAAAQRLAESASLREAALEDQARRNLEGTRAKRAALNQRAAELEAQAKELDARARSGGAVTGDSDLAARLAAAEHTIADLQGALNSSMGEVEALRLTGEIGPSMLRDVVSRLDRARRQAGLWGGRTVKYAANQGGLAQRLSEMAGTLQRLPEELERTIKSSSRDLARGAVELVLASYQARDPDFSPWTALDEFPPGIEDGARAQVRDAADHIVHSFEGSAPRLAFTPNSDEEGDNGGVGDSGDEAGDPGASE

SEQ ID NO: 181251 - protein, 1085 aa, Oryza sativa
  unsure (1)..(1085): unsure at all Xaa locations
  Clone ID: PAT_MRT4530_78543C.1.pep
MARGSALLDGSVLPPSRIVSERQAGLPRRFMPESATGREIVTLGEGRPAPCYPGRSVFFLPFAMAGLVPPFSSFFMDVLEFYDLQMAHLTPNAVMTLAIFAHLCEMFIGVRPSLRLFRWFFTVQSVSPPSVVGGCYFQPRGLVLNRYIPCVLRKKWDDWKSDWFYTPLADEARLRLPSQPPAQASSWRAPVDLGDGYDAVLDRLAGLRSLGLTGAMVYGDYLRRRIAPLQRRARGAWEYTGSEDCMRTHRGVKWDWVPEDFKVMIQRVLNLSSAEASLIPQGVLPLCSDPDRANILTIMQAVGASEERAPRDHDGSGGSRRGEQSTPRGGRASGPRDGGSGGSRPADAQGKRKQEGTSSPSPPRGGGAARVSSRRPEXGPRRRRSPRGRGRRNGSARWGXQNHPGETSFPLQGGRLTDPLAGSSHAHCGCIHSSNTSFHSPILFVFWLFFCFSEIPSRPSRHSKSGQSEAEDPATTEARRRESDRREAADRLREAEEAAREAARARQTEEAAREEAGLRRAEATTSSEATRETDRQEAVDRLREAEEAAQVAVRARQAEEAAREEARLRQAEATTTSEATRGEAAGASLGPTPLCDAQDKPGPGDIPESGTSIGGPSRAASSSRRLFPTPSVAPLSAEPLLRALAVANTTVLDGLSAQVEALQAERAELDAAWARVEEGRRSVEAMVEVGRKAHRRHVSELEARRKVLGEIAKEVEEEWGAALIATTVMNEAQDTLRLQYGSWEAELGKKLNAAQGVLDAAAARERRAAETEVASRWREEALEAXRDLADREAAVAIREATLTAHEAXCAEEESALRLREDALTERERALEEAEAAAQRLADSLSLREAVREEQARRNLEGARAERAVLNQRAAELEARERELDARAHSGEAAAGESDLTARLAAAEHTIADLQGALDSSAGEVEALRLAGEVGPGMLRDAVSRLDRAGRQAGLWGGRTAKYAANQGGLAQRLSEIAGTLQRLPEELERTIKSSSRDLARGAVELVLASYQARDPDFSPWTALDEFPPGTEDGARAQVRDAADHIVHSFEGSAPWLAFALNSDEEDDDGGVGDNGDEAGDPGASE

SEQ ID NO: 181252 - protein, 90 aa, Oryza sativa
  Clone ID: PAT_MRT4530_78544C.1.pep
RKKDAIFYLAKVPNINMMMGTYMAINYWEGQLDGLVSEPHRSEIHSCPVAPGAEAGGRVSRRRGGGGRAAGATPAGPGILCAEVADIKRY

SEQ ID NO: 181253 - protein, 815 aa, Oryza sativa
  Clone ID: PAT_MRT4530_78545C.1.pep
MARGSAPLDGSVLPPSRIVSERQAGLPRRFMPESATGREVVELGEGCLAPHYPGRSVFFLSFAMAGLVPPFSNFFMDVLEFYDLQMAHLTPNAIMTLAIFAHLCEMFIGVRPSLRLFRWFFTVQPVSPPTVVGGCYFQPRGQVLHRYIPCVLRKKWDDWKSNWFYTPLADEARLRLPSQPPAQASSWRATVDLGDSYDAVLDRLAARSRRPPPRHSKSGGLEAEETATAEARRREADRREAADRLREAEEAAQEAVRVRQAEEAARKEARLRRAGESVREEEAARVRQAACQAPDPTPPEATTTSEATHDEAADAPLGPDPSGDAWDEPASGDAPGSGTSIGGPSRAAPTPRRLSPLSSAAPLSAEPLLQALVAVNSTVLDGLSARMEALQAERAELDAAWARVEEGRRSVEAMVEAGRKAHRRHASELEARRRDLAEIAREVEEERETALIATAVLEEVRDDLCLQYGSRAAELEKKLDATRGVLDAAAARERRAAEIEAASRQREEALEARATALEERARALDTKEKDLADREAAVATREATLAAHEAACAEEESALRLREDVLTERGRALEEAEAAAQRLADSLFLREAAREEAALDQRAAELEARAKELDARAHSGGAAAGHGDLVARLAAAEHTIAEMQGALDSSAGEVEALRLANEVGPGMLRDAVSRLDRAGRQVGLWGERTVKFTANQGGVAQRLSEMAGTLQRLPEELEETIKSSSRDLARGAVELVLASYQARDPDFSPWAALDKFPPGTEDGARAQVRDAADHIVHSFEGTAPRLAFALDSDEEGGDDGANDNDDEAGDPGASE

SEQ ID NO: 181254 - protein, 1041 aa, Oryza sativa
  Clone ID: PAT_MRT4530_78546C.1.pep
MARGSALLDGSVLPPSRIVSERQAGLPRRFMPESATGREIVTLGEGRPAPHYPGRSVFFLPFAMAGLVPPFSSFFMDVLEFYDLQMAHLTPNAVMTLAIFAHLCEMFIGVRPSLRLFRWFFTVQSVSPPSVVGGCYFQPRGPVLNRYIPCVLRKKWDDWKSDWFYTPLADEVRLRLPSQPPAQASSWRAPVDLGDGYDAVLDRLAGLRSQGLTGAMVYGDYLRRRIAPLQRRARGAWEYTGSEDYMRTHQGVRWDWAPEDFKIVVQRVLNLSSVEASLIPQGVLPLCSDPDRASILTIMQAVGASEERAPRGHDGAGGSRRGEQSTPGGGRASGPRDGGPGGSRPADARGKRKQGGTPPPSPPRGGGAARVSSRRPEGATPTSQPEGERKKKRLRKMGGTEPSRGNLISPPRWSFNRPPRSEIPSRPSRHSQSGQSEAEDPATAEARRRESDRREAADRLREAEEAAREAARARQTEEAAREEAGLRQAEATTSSEATPRQAEEAAREEARLHQAEATTTSEAARDEAAGASLGPTPSGDAQDKPGPGDVPESGTSIGGPSRAASSPRRLFPTPSVAPLSAEPLLQDLAVANTTVLDGLSAQVEALQAERAELDAAWARVEEGRRSVEAMVEVGRKAHRRHVSELEARRKVLGEIAKEVEEERGAALIATTVMNEAQDTLRLQYGSWEAELGKKLDAAQGVLDAAAAREQRAAETEVASRRREEALEARAMALEERACVVERDLADREAAVAIREATLATHEAACAEEESALRLREDALTERERALEEAEAAAQRLADSLSLREAAREEQARRNLEGVRAERAALNQRAAELEAQAKELDTRARSDGAATGESDLAARLAAAEHTIADLQGALDSSAGEVEALRLASEVGPGMLRDAVSRLDHAGRQAGLWGGRTVKYAANQGGLAQRLSEMAGTLQRLPEELERTIKSSSRDLARGAVELVLASYQARDPDFSPWTTLDEFPPGTEDGARAQVRDAADHIVHSFEGSAPRLAFALNSDEEDDDGGAGDSGDEAGDPGASE

SEQ ID NO: 181255 - protein, 138 aa, Oryza sativa
  Clone ID: PAT_MRT4530_78547C.1.pep
KSLPPPFGLSPLNGSGDVWPAGLKFPPGLGAPHRPPRGVSGPRTEARFGTYAISRPVDFLVCPRNPSPDILFRVLAFFRGFGGQGLMVPLLNKGRHVRPPVLMFFGGPRAVFFLWFKGPLGPRVFLPCRVQAWGFWKI

SEQ ID NO: 181256 - protein, 1054 aa, Oryza sativa
  Clone ID: PAT_MRT4530_78548C.1.pep
MARGSALLDGSVLPPSRIVSERQAGLPRRFMPESATGREIVTLGEGRPAPDYPGRSVFFLPFAMAGLVPLFSSFFMDVLEFYDLQMAHLTPNAVMTLAIFAHLCEMFIGVRPSLRLFRWFFTVQSVSPPSVVGGCYFQPRGPALNRYIPCALRKKWDDWKSDWFYTPLADEARLRLPSQPPAQASSWRAPVDLGDGYDAVLDRLAGLRSQGLTGAMVYGDYLRRRIAPLQRRARGAWEYTGSEDYMRTHQGVRWDWAPEDFKILVQRVLNLNSVEAALIPQGILPLCSDPDRASILTIMTAVGASEEGAPKGHDGAGGSRKGDQSTPGGGRASGPRVRGSGSNRPIDDRGKRKLGRTPPPSPPRGGGAVRASSRRPEGAAPTSQPEGERKKKRLRKMGETEPSRGNLISPPKWSFNRPPRSEIPSRPSRHSKSGQSEAEDPAAAEARRRESDRREAADRLREAEEAAREAARARQAEDTAREEAARAHQAEEAAREKAGFRQDEAMVSSEAARDEVAGASLGPTPSGDAQATTSGAAGDEAAGASPGPTPSGDAQDQTGPGNIPESGTSIGGPSRATSSPRQLFPTPSVAPLSAEPLLQALAAANTAVLDGLSAQVEALQAERAELDAAWARVEEGRRSVEAMVEAGRKAHRRHVSDLEARKTALAEIAQEVEEERGAALIATTVMNEAQDTLRLQYGSWEAELKKKLDAAQGVLDAAAAREQRATETETALRRREEALEARAMALEERACVVEKDLADREAAVAIREATLAAHESACAEEESALRLREDALTERERALEEAEAAAQRLTDSLSLREAALAEQARRNLECVRAERAALDQRAADLEAREKELDSRARSGGAAAGESDLATRLAATELTIADMQRALDSSAGEAEALRLAGEIGPGMLWDAVSHLDRAGRQAGLWKGQTMKYSTNQGGLAQHLSKMAGALQQLPEELEKTVKSSSRDLAQGAVELVLASYQARDPNFSPWMALDEFPPGTEDSARAQVRDAADHIVHSFEGSAPRLAFAPNSDEEGDASGADDSDDEAGDPGASD

SEQ ID NO: 181257 - protein, 85 aa, Oryza sativa
  Clone ID: PAT_MRT4530_78549C.1.pep
HASADAWADAWEKKKKKKKKKEGGKKKKKKRAGHFKNPSLQPHTSKGGALFIGSLFFTRGPTFYIFFRGTPIEFPWPVFFYRPIR

SEQ ID NO: 181258 - protein, 358 aa, Oryza sativa
  Clone ID: PAT_MRT4530_7854C.1.pep
MARPSLLLPIGPRLTLGLKVHIPPSVQLVWVQGPIVVGAGPSGLAAAACLKEKGIDSLVLERSSCLAPLWQLKMYDRLSLHLPRQFCELPLFPFPASYPDYPTKQQFVAYLESYAAKFGINPMYNHTVVCAEFDERLMLWRVRTTQATGMMEDDVEYVSQWLVVATGENSEAVLPVIDGLEEFRGSVIHTSAYKSGSKFAGKTVLVVGCGNSGMEVCLDLCNHNGYPRIVVRDAVHILPREMLGQPTFRLAMWLLKWLPIHIVDRILLLVARAILGDTSQFGLKRPSLGPLELKSLSGKTPILDIGTLAKIKSGDIKVRPAIRRIAGQQVKFVDGRSEQFDAIVLATGYKSNVPCWLK

SEQ ID NO: 181259 - protein, 961 aa, Oryza sativa
  Clone ID: PAT_MRT4530_78550C.1.pep
MARGSALLDGSVLPPSRIVSERQAGLPRRFMPESATGREIVTLGEGRPAPDYPGRSVFFLPFAMAGLVPPFSSFFMDVLEFYDLQMAHLTPNAVMTLAIFAHLCEMFIGVRPSLRLFRWFFTVQSVSPPSVVGGCYFQPRGPVLNRYIPCALRKKWDDWKSDWFYTPLADEARLRLPSQPPAQASSWQAPVDLGDGYDAVLDRLAGLRSQGLTGAMVYGDYLRRRIAPLQRCARGAWEYTGSEDFTRTHQEVRWDWAPKDFKILVQRVLNLNSIEAALVPQGILPLCSDPDRASILTIMMVVGASEERAPKGHDGAGGSRRGEQSTPRGGRASGSRDRGPGSSRPADARGKRNEIPSRPSRHSKSGQSEAEDPAAAEARRRESDRREAVDRLREAEEAAQEAARARQAEEAAREEVARARQAEEAVREEAGFRQDEAMETSKAARDEAAGASLGPTPSGDAQDQPGPGDIPESGTSIGGPSRVASSPRRLFPTPSIAPLNAEPLLQALAAANTTVLDGLSAQVEALQAERAELDAAWARVEEGRRSVEAMVEVGRKAHRRHVSELETRKKVLAEIAKEVEEERGAALIATTVMNEAQDTLRPQYGSWEAELGKKLDAAQGVLDAATAREQRAAETEAASRRREEALEARAMALEERACVVERDLADREAAVTIREATLAAHEAACAEEEFTLRLREDALTERERALEGAEAAAQQLADSLSLREAAQEEQARRNLEGARAERAVLNQRAAELEARAKELDARARSGGAAAGESDLAARLAAAERTIADLQGALDSSAGEVEALRLAGEVGPGMLWDAVSRLDCAGRQVGLWRGRTVKYAANQGGLAQRLSKMAGALQRLPEELEKTIKSSSSNLAQGAVELVLASYQARDPNFSPWMALDEFPPGTEDRARAQVRDAADHIVDSFEGSAPRLAFAPNSDEEGNAGGADDSDDEAGDPGASD

SEQ ID NO: 181260 - protein, 1059 aa, Oryza sativa
  unsure (1)..(1059): unsure at all Xaa locations
  Clone ID: PAT_MRT4530_78551C.1.pep
MARGSALLDGSVLPPSRIVSERHAGLPRRFMPESATGREIVMLGEGRPAPDYPGRSIFFLPFAMAGLVPPFSSFFMDVLEFYDLQMAHLTPNAVMTLAIFAHLCEMFIGMRPSLQLFRWFFTVQSVSPPSVVGGCYFQPRGPVLNRYIPYVLRKKWDDWKSDWFYTPLANEARLRLPSQPPAQVSSWRAPVDLGEDYDAVLDRLAGLRSQGLTGAMVYGDYLRRRIAPLQRRARCAWEYTGPEDYMRTHQGARWDWAPEDFKIVVQRVLNLSSVEASRIPQEILPLCSDPDRASILTIMMGVGASEERAPKGHDGAGERRRGEQSAPGGGRASGPRVGGSGSSRPADAQGKRKLGGTPPPSPPRGGGAARASSRRPEGAAPTSQPERERKKKRLRKTGETEPCRGNLISPPRWSFNRPPRRFVSLSLQPSFSQKEVFFFFYSFCSSSGFFFCFSDVPSHSSRHPKSGQSEAEDPAAAEERRRESDRREAADRLREAEEAAREAARIRQAEEAAREEAARARQAEATAAAGASTGPTPSGNPQATASGEARDEAAGTSPGPTSPGDAQDQTGPGDIPEPSTSSGGPSRIAFSPRRLFSSSSVAPLSAEPILQALAAANTAVLDGFSAQVEALRAERAELEAAWARVEEGRRSVDAMVEVGRKAHRRHVSELEARKAALTEIAREVEEERAAALIATTTMIEAQDALRLQNASREAELKEKLDAAQGVLDSAAARERRVTEAEAASRRREESLEARAMALEEHAGAMEKGLTDREAAAALREATLAAHEAACAEEECALRLREDALAERERALEEAEATTKRLADSLSLREAAQEEQARRNLECVRAERAALEQRAADLEAQEKELDARAHIGGAAAGESDLAARLAAAEHTVADMQRALDSSIGEAEALRLAGEMGPXRMDRAGRQAGLWKGQTRMRPINLEGLAPHLNRMAWVLERLPEELEKTIKSSSRDLARGAVELVLASYQARDPNFSPWMALEEFPPGTEDDARARVRDAADHIVNGFEGSAPRLAFAPNSDEEGNTSSADDGGDEAVDSGASE

SEQ ID NO: 181261 - protein, 61 aa, Oryza sativa
  Clone ID: PAT_MRT4530_78552C.1.pep
VRMLKAGNYDELDDTRRADLSVPSFDSTFILSMSGRVQHDPVRYGCWKSPETIHELAGFLI

SEQ ID NO: 181262 - protein, 551 aa, Oryza sativa
  Clone ID: PAT_MRT4530_78553C.1.pep
MEASDEDRPLIHHLPPQEQCSKYTCDGTVNIDSVEFTECICFYGVSKNLVTYLTSVLHESNVNAAQSVSIWIGSCFFTPLIGAFLADTYWGRYWTVVMSILVIILGMIVLTVSASPLFLNASFYNGGISRLTVYLGLYLFALGTGGIKPNIPAFGADQFDGADPVERVTKGSFFNWYYFSINVGSLLSSTVVVWVQDNIGWSVGFAGPMLLLGFGLAMFIAGRRAYRYKKLGGSPLTRVFQVLVAAVRNHRLNLPDDSSLLHELPGVTEGDYRTQHTYQFRFLDKAAILSDKNCAPAAPSSPWRLCTVSQVEELKMLLRTFPVWASLVGFFMVTAQMTSTLIEQGVAMDGRVGRFTVPPASLATFDVVAVLALIPVYDAALVPLARRVTGRDRGVSHMQRIGVGLALSAVAMAYSALVEARRLAMAAAAAGTRMSIAWQVPSFFVLGAGEVFAVIGMLEFCYEQSPASMKSLGTALVQLAVAVANYLNSGMLRVVAAATARGGGAGWIPDKLDEGHLDYFFWMMAALSVLNLLQFLHCSIRFRGNNTLSSS

SEQ ID NO: 181263 - protein, 183 aa, Oryza sativa
  unsure (1)..(183): unsure at all Xaa locations
  Clone ID: PAT_MRT4530_78554C.1.pep
IPFQCDQISWKFTTHRQYSASSAYKAHCHATPDIPFDTLIWRAWAPGKCKLYAWLIIKNRVWTSDRLAIRGWQNNGXCPLYRREDEIAMHLIAECRYTKRIWSLVASWXSTNNXEPQHWGDTHTVQEWCKMIATIVGIPMKGLHTLILFIVWEVWQEHNRWIFEHKKAATSFLIAKIKEEACV

SEQ ID NO: 181264 - protein, 105 aa, Oryza sativa
  Clone ID: PAT_MRT4530_78555C.1.pep
MTAAEFLPSVVNTDKLGMLAGRVGIELVETATELEILLAGAGFDRGGVWSDLAAGLTSAACCIAAIIIVHLHLHHPSLPGAIEATMFIVLVFPEPSEAVAAISIC

SEQ ID NO: 181265 - protein, 146 aa, Oryza sativa
  Clone ID: PAT_MRT4530_78556C.1.pep
MTTRFKKNRKKRGHVSAGHGRIGKHRKHPGGRGNAGGMHHHRILFDKYHPGYFGKVGMRYFHKLSNRFHCPAVNVERLWSMVPTDKAAEAGAGKAPVIDVTQFGYTKVLGKGMLPPQRPIVVKAKLISKVAEKKIKAAGGAVLLTA

SEQ ID NO: 181266 - protein, 144 aa, Oryza sativa
  Clone ID: PAT_MRT4530_78557C.1.pep
MTTRFKKNRKKRGHVSAGHGRIGKHRKHPGGRGNAGGMHHHRILFDKYHPGYFGKVGMRYFHRLSNRFHCPAVNVERLWSMVPAEAGAGAGKAPVIDVTQFGYTKVLGKGMLPPERPIVVKAKLISKVAEKKIKAAGGAVLLTA

SEQ ID NO: 181267 - protein, 463 aa, Oryza sativa
  Clone ID: PAT_MRT4530_78558C.1.pep
MDETLAAVLSYLPPPTFSTANSHPSSPSAADAAAVFSLDEEDRISRLPDALLRRVVSRLPTKDAARTAAISSRWRRVWASIPLHLDDGGLAPGDVTAALAAHPGPVASARLASAHLATVDPDVVASWFASLAAKEVGELAVVNGSWPIEWRPPPDLLGCASLRRLWLGLCQFPDTAGLPPAFANLQEIVVVHSSMQDRELHAVLPRCPELESLALVLTQDYPRYVHIWSGSLRCVVLWMSMVREVHLDDAPNMERLLLEPIAGASTHVKIINAPRLKVLGYFDVGLHQLKIGSTVIKDGIKVKPSAMVRTLRTLALKVQFGVEEQVKLVPLLLRCFPCLETLYIMSVPSETPVNVGVEFWDLVGYTECVHSHLRKFVFQAARGKDSELAFVKFVMGRAQMLEQMLIFVDDGSSRVVVLSHLSSEGLNQPMLGVGQMDRCILHCRALFNDVYALLLCTMSSDFP

SEQ ID NO: 181268 - protein, 991 aa, Oryza sativa
  Clone ID: PAT_MRT4530_78559C.1.pep
MSVFGSPTVLLTGPAANRFAFCNPDLIFTQTKALNALVGVQGYLRPEMVTKYIWKMDKEVRRHIDLHWVGQKTLTVAPLAKRLTFNITCSVFFGEEAGPIREALATDFEALVKATLSIPVNIPFTKFNKGYETTSVLIIFLLRYLANEPDILGNITEEQEEIARNKGPNEPLTWDDVSRMKYTWKVAMETLRTVPAIFGSFRTAIKDIEYQGYHIPKGWQDLCGPQGSLGFPVIGQSISLLRALRSNTDYQWYQDRIKKYGPVSKMSVFGSPTVLLTGPAANRFVFSNQDLIITETKAANALIGRSILTLSGEELKQVRSALQGYLRTEMVTKCIRKMDEEVRRHIDLNWVGQKTVTVAPLAKRLTFDIICSVIFGQGAGPIREALAADFKKMVQAMLSIPVNIPFTKFNKGLSASRRVRKVLRQIARDREAALQQGHSSSADDFFTYMLVLRSEGTHSLTVEDIVDNAILLLLAGYETSSVLITFLLRYLANEPDILGKITEEQEEIARYKGPDEPLTWDDVSRMKYTWKVAMETLQTVPPIFGSLRTAIKDIEYQGYHIPKGWQARQVAHILRLERRLVSCAGLPVGGAHRRPVAVRQRASFPSCILPAGRPPTSRQRSKRIYVILKGHAIFRRIEATTISLLRALHSNTDYQWCQDRIEKYGAVSKMSLFGSPTVLLAGPGANHFVFSNQDLIFTETKAINALVGRSILTLSGEELKQVRGALHGYLRPEMVTKYMRKMDEEVRRHIDLNWVGHKTVTVAPLARRLAFDIICSVIFGQGVGPIREALAADFETMVKAMLSIPVNIPFTKFNKGLNASRRIRKVLRQIARDMEGALQQGYSSSADDFFTYMLVLRSKGTHSLTVEDIVDNAIVLLAAGYETSSVLITFLIRCLANEPDIFGKITDEQEEIARSKGPNEPLTWDDVSRMKYTWKVALEILRTISPIFGSFRTAIKDIEYPGLSHSKRLASLPCSKYHTFGREVFQRSDQV

SEQ ID NO: 181269 - protein, 214 aa, Oryza sativa
  unsure (1)..(214): unsure at all Xaa locations
  Clone ID: PAT_MRT4530_7855C.1.pep
TRPLRTQIQSLEESAEILRERCLKFHKGCRKYTEGLGEAYDGDIAFASSLETFGGGHNDPISVAFGGPVMTXFTIALRELGTYKEVLRSQVEHMLNDRLLNFVDIDLHDVKDARKRFDKASLLYDQVRDKYLSLKKGTRADITTAIEDELHNARSSFEQARFNLVTSISHIEAKKRFEFLEAXSSTMDSHLRYXKQGYDLLHQMEPYINQVLAY

SEQ ID NO: 181270 - protein, 413 aa, Oryza sativa
  Clone ID: PAT_MRT4530_78560C.1.pep
MEMEPSPAPTMADLPADLLREIFRHLRCVADRDAAADVCRTWRGALAEPTPPPSPPRPLPWLLLPSAGDDFIHVYCFYCGIDRCSLHHRLSPAHGARCFGSHEGGWLFVAFEHNRLHAMINLRSREDSKSSLIPFPDLLRSYQDEDDYQRAQNMVILAAALSSSPGGTSCIGAGIVMRWDLIAGSCRLAFWRMGDRVAVEGTMAPDSTVRLRDEIQDVIYQDGAFRFVTRRGFLVTCIPMFYADGGLQGTTESVQRIRHRERLREHVHARYLVESRAKLLMIVRFAARPRSPTSLFKVFEMVQEMVQDYTGVEKIEDTWTELESLDGRLFFVGRGCSRSYESSAYPELGLGLKEGVYFLDDYVYADEGMPFRDEGHRRYPCSDNGRWCDGHVHRCFSEQRASSAHSSPTWLLP

SEQ ID NO: 181271 - protein, 203 aa, Oryza sativa
  Clone ID: PAT_MRT4530_78561C.1.pep
MGVQEVLSRKSGVIVGDDVLRLFEYAREHKFAIPAINVTSSSTVVAALEAARDAKAPVILQFSQGGAAYFAGKGVSNGDQAASIAGSVAAAHYVRSLAPTYGIPVVLHTDHCAKKLLPWLDGMLDADEAYFKEKGEPLFSSHMIDLSEEPVEWNIETTAKYLKRAAPMEQWLEMEIGITGGEEDGVNNEDVDNNSLYTQPEDI

SEQ ID NO: 181272 - protein, 145 aa, Oryza sativa
  Clone ID: PAT_MRT4530_78562C.1.pep
LHCCYLLLLPNPAAPEPDLALSGAERGRGAMEVRRRRAAEGGSDGLLPHFQGSKWPDPPAGDRTPEQVRRPYWGEKRRRYGGGGRRAKRRCAPSVPLIQRSDDGGRAVRPGNVDGQINPSMRSDSHVNMDLHAISEKSKGFFEKN

SEQ ID NO: 181273 - protein, 71 aa, Oryza sativa
  Clone ID: PAT_MRT4530_78563C.1.pep
AWQSRNLLGHRAGTLGWLTSYIQHFGLQQEHSAWPVNNRMKFLEFNSVNICGWCRLNQKKTKKTRGGARYP

SEQ ID NO: 181274 - protein, 736 aa, Oryza sativa
  Clone ID: PAT_MRT4530_78564C.1.pep
MATANLLYAALLVPTVLYLAVTRRRSRRLPPGPVGLPLVGSLPFIDPNLHTYFASLAAKHGPILSIRLGSKVDIVVNSAQLAREVLRDQDSVFANRVMLDAGDAVSFGGAQNIVGNPLGPMWRLLRRVCVQEMMSPAGLASVHGLRRREFRSTLRYLHSKPGEPVDVGAQMFLNTMNVITGTMWGGTIGSESERSAVGSEFRGLVAEVTELLGTPNVSDLFPVLKPFDLQGIRRKMERLRSRFDLLFTKIIQQRMRSQQDGGEMTTDFLECLLKMEKEGSDGKTTFTMDNVKGFLLEMVVGGTDTTSNSVEWIMAELLQNPQVLNKVQQELDSIVGRDAVVEESHLPQLHYLRMVIKETLRLHPPVPLLVPHSPSAAATVGGYHVPEGCRVLINVWAIQRNPLVWNKPLDFNPDRFARDGGHKGDFTGSQLDYLPFGSGRRMCAGMAMGEKVMVYSVAMLLQAFDWKLPQGVQLDLSEKFGIVMKKATPLVAIPTPRGGEVGGGVGTGGGLMEGRRWHLRAVLSAVEGAAGQRLHAAEAELGRNAEHDETPSLSGMGTGRAVASNSTGNGGGRSVGAGRATTAARAAGRSWVEMESSPACERNGASATIGGNRMVAEVQAGSVSVTVATTRRGGDSSGGGARPEMGGGRQSSGARREGGRDSRCGKRRWERRTLGESWSFLALSSRDEEAAARDEEGVRGGWVLTGTAVEALNWGISQDSTQDIISKASLTEGGKD

SEQ ID NO: 181275 - protein, 45 aa, Oryza sativa
  Clone ID: PAT_MRT4530_78565C.1.pep
CMYVVSVNNNEHLYSCSLVVSIYINNLLINAAWLLTDAGLYKTPL

SEQ ID NO: 181276 - protein, 136 aa, Oryza sativa
  Clone ID: PAT_MRT4530_78566C.1.pep
MANFGASLLTLTPISNGNSTVLKTMRIEPKQTVVAGFCPLTSVDALASADGYKVAKKCIFARKITVVLSRLQEFAASIPATVRERDRGSEAQTGGVQPSQTQTSGAQQEQQSDTNPGPRVSGVTTPFPNHEGTMKA

SEQ ID NO: 181277 - protein, 336 aa, Oryza sativa
  Clone ID: PAT_MRT4530_78567C.1.pep
MPLGEYCAGGLWPSYGNVGMGTGEYGCAPHLHLGSTPFSFEVLSEATNNFSEERLLREEGQFSAFYKGDLTHLGISVAAAVKWLKIKSGQAFAVENYVKEFATISLAIRHRNIVPFLGWSSEQDNLCLVYKYVKNWSLHDHLYSPGRLLTWPTRYKIVFAIGSGLKHLHQDVRPTFPHGNIKPSNVLLDEEMNAKLGDFGLPRHFFQYDGETASSSYRQMPVSSRGYVEPGLLHTDQATTSSDVYSFGVVLLEIACGQPPIILQQDQAEANSLVKFVWECHKKGSIIEAADKRLNGEFNREQMERVLRVGLLCARRGSSQRLSMGDAMMLLEGVGF

SEQ ID NO: 181278 - protein, 184 aa, Oryza sativa
  Clone ID: PAT_MRT4530_78568C.1.pep
TRAAHSLAHGNLKSSNLLLRRAAGARAEADYCLHQLFAPLSARPNAGGCRAPELVDARRPTFKSDVYSLGVLFLELLTGKSPGNASVDGDGAVDLPRWVQSVVREEWTAEVFDVELVRLGGSAEEEMVALLQVAMACVATAPDARPDTADVVKMIEEIGSGHGRTTTEESEDRSRGTPPAGTTP

SEQ ID NO: 181279 - protein, 307 aa, Oryza sativa
  unsure (1)..(307): unsure at all Xaa locations
  Clone ID: PAT_MRT4530_78569C.1.pep
MGRRVVAKSAAASPPAHSHPSTPHMPTSRPSSHPGTTGSAAPPPRHSSHPPTTTAAPPRHXPSPEPPRCHSSSPNXPSPSPPPPSPSGRPPPPRPPGAGADAVAGVHTSSLTAGTTSPPQTTLRANSPLPSLPRASTPPPSPPRLTTPTPTPTPPSSTPRLSLSSLRRLLTPPPRCLLTSHARRPPLQTHDRRRPLQSMTVTXPDTRLDRPSPPRCSSLLSPHLILHRSRPFRSTPDSPPPPFSSTLSAAATAREVTPPSNHVPRTPTPASLIPSHLSPLPSPSSMPSAPPTISASMTDSRPRSPPR

SEQ ID NO: 181280 - protein, 68 aa, Oryza sativa
  unsure (1)..(68): unsure at all Xaa locations
  Clone ID: PAT_MRT4530_7856C.1.pep
CIIRQKXCPSFFVLLRLALQHRVPGVLQAKGAFFDSCSNFGGVTLLLLSFGMESMNNVNGCENMSVCC

SEQ ID NO: 181281 - protein, 61 aa, Oryza sativa
  Clone ID: PAT_MRT4530_78570C.1.pep
ARAGKVYHIEGLTGFYRGCATNLLRTTPAAVITFTSFEMIHRFLLDVFPPLPEQQPQPLKH

SEQ ID NO: 181282 - protein, 959 aa, Oryza sativa
  Clone ID: PAT_MRT4530_78571C.1.pep
MVDKNDGSEGLKFNTSHLMQTTEEVARAFIAAASAATVQSTRPSVVYSSREESGSPMQKLQQQFSKILKGFSTSPEVSGSYNPEVLTTQKRQWSRFQLKSLGNRCIREPSHLFESIVIVGLPPQADIHELENIALGSNEEDVKKPRNIFGNNHHQVHALSNLEPQVLFAYPPERPLPLKYKDILSFCLPGGVQVHAVERTPSFSELNEILLGQEQLKESNQSFVFRLQSFALPPFRSALSRSGSLILVYHFLNTKCFKISGWGYLYAILIFSLMPLLLHMTFTNSILMEERLEWLTDGVSLLTSLSPEETCEDDVVCEGTELATEKQYFDGHAVDLEKSSESSVGVCSKELSDTDSSSECRDNQLDLNCKEVQQECVVQDDLVTGTAPQCDTLERPDNCLSEDTTADQSGIELHELDSVPVILKESDTTENCGYSLQDDVNDEQLDIFVNDTILPLMRSRLCEGSELSPGSQDSPSEGINFRSDSHESDLEEPSSIGHGDLVGHNNISQWAKAKKYGSLQVVSQYYQLQCPARGSSLTFHPLDHLHPLRFHRPGETVLHIAGSTIDLRSCDTSLEVAEMRNALFAEEESTALSTWAVASICGCLRLEHVMTLFAAALLEKQIIIVCSNLGMLSASVLSIIPLIRPYQWQSLLIPVLPNDMMDFLDAPVPYINKTSDVHSRLVNAVVIDANKNQIKSTSVPQLPQQKELLSALRPYHSRLVGESFLARKRPVYECTDAQVEAAKGFLAVLRSYLDSLCSNLRSHTITNVQSNNDKVSLLLRESFIGSFPTRERPFMKRPCRYPKCHVLFMACILVHGLISTLGYQTVWVFICGSKETILNQTKSPVHGYVKGVKGLRFARGAVAAAAAERSECACHNVPRKKPSTSGRHTAALLAATTSSLHVPPPAATYNVAPWYDASLRHPHPRVYQCSLGYIVKLAGVSTGLNPHGDRDYSRCRIKA

SEQ ID NO: 181283 - protein, 1038 aa, Oryza sativa
  Clone ID: PAT_MRT4530_78572C.1.pep
MARGSALLDGSVLPPSRIVSERQAGLPRRFMPESATGREIVTLGEGRPAPDYPGRSVFFLPFAMAGLVPPFSSFFMDVLEFYDLQMAHLTPNAVMTLAIFAHLCEMFIGVRPSLRLFRWFFTVQSVSPPSVVGGCYFQPRGPVLNRYIPCALRKKWDDWKSDWFYTPLADEARLLLPSQPPVQASSWRAPVDLGDGYDAVLDRLAGLRSQGLTGAMVYGDYLRRRIAPLQRRARGAWEYTGSEDFMRTHQGAALIPQGILPLCSDPDRASILTIMMAVGASEERAPKGHDGAGGSRRGEQSTPRGGRASGSRDRGPGSSRPANTRGKRKQGGTPPPSPPRGGGAARASSRRPEGAAPTSQPEGERMKKRPRKMGETEPSRGNLISPPKWSFNRPPRSEIPSRPSRHSKSGQSEAEDPAAAEARRRESDRREAADRLREAEEAAQEAARARQAEETAWEGAARARQAEEAAREEAARAHQAEEAAREEAVRAHKAKEAAREEAGFRQDEAMATSEAARDEAAGASLGPTPSGDAQATTSGAAGDEAAGVSLGPTPSGDAQATTSGAAGDEAAGASLGPTPSGDAQDQTGPGDIPESGTSIGGPSRAERAELDAAWARVEEGRRSVEAMVEVGRKAHRRHVSELETRKKVLAEIAKEVEEERGAALIATTVMNEAQDTLRLQYGSWEVELGKKLDAAQGVLDAAAAREQRAAETEAASWRREEALEARAMALEEHACVVERDLADREAAVTIREATLAAHEAACAEEEIALRLREDALTERERALEGAEAAAQQLADSLSLREAAQEEQARRNLEGARAERAALNQRAAELEARAKELDARARSGGAAAGESDLAARLADAEHTIADLQGALDSSAGEVEALRLAGEVGPGMLWDAVSRLDRAGRQVGLWRGRTVKYADNQGGLAQHLSKMAGALQRLPEELEKTIKSSSRDLAQGAVELVLASYQARDPNFSPWMALDEFPPGTEDRARAQVRDAADYIVDSFEGSAPRLAFAPNSDEEGNAGGADDNDVEAGYPGASD

SEQ ID NO: 181284 - protein, 1018 aa, Oryza sativa
  unsure (1)..(1018): unsure at all Xaa locations
  Clone ID: PAT_MRT4530_78573C.1.pep
MARGSALLDGSVLPPSRIVNERHAGLPRRFMPESATGREIVMLGEGRPAPDYPGWSIFFLPFAMAGLVPPFSHFFMDVLEFYDLQMAHLTPNAVMTLAIFAHLCEMFIGVRPSLQLFQWFFTVQSVSPPSVVGGCYFQPRGPVLNRYIPCVLRKKWDDWKSDWFYTPLADEARLRLPSQPPAQVSSWRAPVDLGEEYDAVLDRLAGLRSQGLTGAMVYGDYLRRRIAPLQRRARSAWEYTGPEDYMRTHQGARWDWAPEDFKIVVQRVLNLSSAEASRLPQEILPLCSDPDRVSILTIMMGVGASEERAPKGHDGAGERRRGEQPAPGGGRASGPRVGGSGSSRPADARGKRKLGGTPPPSPPRGGGAARASSRRPEGAAPTSQPEGVRKKKRLRKTGETEPCRGNLISPPRWSFNRPPRSDVPSHSSRHPKSGQSEAEDPVAAEERRRESDRREAAARLREAEEAAREAARVRQAEEAAREEAARARQAEEAAREEATRARQAEATAAAGASLGPTPSGGPQATSSEAARDEAAGASPGPTSPGDAQDQTGPGDIPEPSASSGGPSRVAFSPRRLFSSSSVAPLSAEPLLQALAAANTAVLDGFNTQVEALRAERAELEAAWARVEEGRRSVDAMVEVGRKAHRRHISELEARKAALAEIAREVEEEREAALVATTAMIEAQDSLRLQHGSWEAELKNKLDAAQGVLDSAAARARRVTETEAASRRREEALESRAMALEEHAGTVERGLTDREAAAALREATLAAHEAACAEEECALRLREDALAERERALEEAEATAKRLADSLSLREAAQEEQARRNLECVRAERAALEQRAADLEAREKELDARAPIGGAAAGESDLAARLAXAEHTVADIXRADSSIGEAEALRLAGEMGPTVXIGLPHGSRRMAWVLERLPEELEKTIKSSSRDLARGAVELVLASYQARDPDFSPWMALEEFPPGTEDDARARVRDAADHIVDGFEGSAPLLAFAPSSDEEGDASDEDDGGDEAGDPGALE

SEQ ID NO: 181285 - protein, 952 aa, Oryza sativa
  unsure (1)..(952): unsure at all Xaa locations
  Clone ID: PAT_MRT4530_78574C.1.pep
MARGSALLDGSVLPPSRIVSERQAGLPRRFMPESATGREIVTLGEGRPAPDYPGRSVFFLPFAMAGLVPPFSSFFMDVLEFYDLQMAHLTPNAVMTLAIFAHLCEMFIGVRPSLRLFRWFFTVQSVSPPSVVGGCYFQPRGPVLNRYIPCALRKKWDDWKSDWFYTPLADEARLRLPSQPPAQASSWQAPVDLGDGYDAVLDRLAGLRSQGLTGAMVYGDYLRRRIAPLQRCARGAWEYTGSEDFTRTHQEVRWDWAPKDFKILVQRVLNLNSIEAALVPQGILPLCSDPDRASILTIMMVVGASEERAPKGHDGAGGSRRGEQSTPRGGRASGSRDRGPGSSRPADARGKRNEIPSRPSRHSKSGQSEAEDPAAAEARRRESDRREAVDRLREAEEAAQEAARARQAEEAAREEVARARQAEEAVREEAGFRQDEAMETSKAARDEAAGASLGPTPSGDAQDQPGPGDIPESGTSIXGGPSRVASSSRRLFPTPSIAPLNAEPLLQALAXAANTTVLDGXAELDAAWARVEEGRRSVEAMVEVGRKAHRRHVSELETRKKVLAEIAKEVEEERGAALIATTVMNEAQDTLRPQYGSWEAELGKKLDAAQGVLDAATAREQRAAETEAASRRREEALEARAMALEERACVVERDLADREAAVTIREATLAAHEAACAEEEFTLRLREDALTERERALEGAEAAAQQLADSLSLREAAQEEQARRNLEGARAERAVLNQRAAELEARAKDLDARARIGGAAAGESDLSARLAAAERTIADLQGALDSSAGEVEALRLAGEVGPGMLWDAVSRLDCAGRQVGLWRGRTVKYAANQGGLAQRLSKMAGALQRLPEELEKTIKSSSSNLAQGAVELVLASYQARDPNFSPWMALDEFPPGTEDRARAQVRDAADHIVDSFEGSAPRLAFAPNSDEEGNAGGADDSDDEAGDPGASD

SEQ ID NO: 181286 - protein, 92 aa, Oryza sativa
  Clone ID: PAT_MRT4530_78575C.1.pep
TSNDEIVILCVNTSFDFTSILSKSGGLLFVHFCSFHNTLLRSRSFAVAIPTIMMMSPIILYTMSISVISALPLPHGHSIAPLEGLLILLYYW

SEQ ID NO: 181287 - protein, 876 aa, Oryza sativa
  Clone ID: PAT_MRT4530_78576C.1.pep
MAHLTPNAVMTLAIFAHLCEMFIGVRPSLRLFRWFFTVQPVSPPSVVGGCYFQPRGPVLNRYIPCVLRKKWDDWKSDWFYTPLADEARLRLPSQPPAQASNWRTPVDLGDGYDAVLDRLAGLRSQGLTGAMVFGDYLRRRIAPLQRRAQGAWEYTGSEDCMRTHQGVRWDWAPEDFKKVVQRVLNLSSVEASLIPQGVLPLCCDADRASILTIMQAVGASEERAPRGHDGAGGSRRGEQSTLGGGRASGPCVGGPGIGRPADARGKRNEIPSRPSRYSKSSQSEAEDPATTEARRRESDRREAADRLREAEEAAREAARARQTEEAVREEAGLRQAEATTSSEATRETDRQEAADRLREAEEAAQVAVRARQAEEAAREEARLRQAEAATTSEAARDEAAGASLGPNPSGDTQDKPGPGDIPESGTSIGGPSRAASSPRRLFPTPSVAPLSAEPLLQALAVANTTVLDGLSAQVEALQAERAELDAAWARVEEGRRSVEAMVEVGRKAHRRHVSELEARRKVLGEIAKEVEEERRAALIATTVMNEAQDTLRLQYGSWEAELGKKLDAARGVLDAAAARERRAAETEVASRRREEALEARAMALEERACAVERDLADREAAVAIRESALTERERALEEADAAAQWLADSLSLREAAQEEQARRNLESACAERAALNQRAAELEAQARELDARARSGGAATSDSDLTARLAAAEHTIADLQGALDSSAGEVEALRLAGEVGPGMLRDAVSRLDRAGRQGGLAQRLSEIAGTLQRLAEELERTIKSSSRDLARGAVELILASYQARDPDFSPWTALDEFPPGTEDGARAQVRDAADHIVHSFEGSTPRLAFAFNSDEEDDDGGVGDSGDEAGDPGASE

SEQ ID NO: 181288 - protein, 415 aa, Oryza sativa
  unsure (1)..(415): unsure at all Xaa locations
  Clone ID: PAT_MRT4530_78577C.1.pep
DAAHGIVIVGGGICGLATALALHRKGISSLVLERSEALRADGVAIGIHANGWRALEXSWRWLRSLRFCLHSVRSNARKELRCLTRKDLVETLAKNLPAGTIRFGCRVAAVDEDSGSRCPVLTTEDGHTIKAKVLIGCDGANSVVAKYLGLGNPSELPRLAILGLASYPDGHPFGTEFLTIAGDDLAVGRLPINDHLVHFFLSRRRHSTAADVVDMVRRCDHASSLWTTTKVWYRPPWQVALAAFFQLRRRAAVTVAGDAMHVMGPFIGQGGSSALEDAVVLARSLXRRVPPDRGRRHDQPQVDGEMGAAIGRYVRERRARVIRLSLESFTVGTLLRTKSAVVRLVCAVSFSVRSMYLALINNGYIDRNKFIWKHKMPLKIKIFMWYLLKGVVLTKDNLARRNWNGCLICCFLLKK

SEQ ID NO: 181289 - protein, 2131 aa, Oryza sativa
  Clone ID: PAT_MRT4530_78578C.1.pep
MGILECESEEDVYQQKDQVDVMNNTVNIDVDCGNDYLTRNDINGTTIDLAAVSQREEDVQDQLYEENDLRELSEADDMDQSFEANMDSYDGSHSDADIEETTEPKRGRGITTMETFWPIVENVKLKVDYNEHFQPVGPYASKLANVIGNLAKGKVLSLAYEDWTDVPNKDDVWDNVKARSNRGKANRAKMVAVHTIGTRSLANVRHDMIQPRIVEALQLNQKRPAMKIQPRIARELQLNLNKHARKVQPRIVEESQLNHNRHNGMVQPGVARELQVNQNMHVTKGVQKHMARYNNNKPTEIEGANVGTTKHANVKRAALACENVLARQAGEASSSSPISAMGSLSGIDDLVFPPRQTFRFGSLDFITNDFGKISLLDSDPNQSGENQVLAPFGIPNSAKICSKLISTESASNHSDEIQSTSTSPDQDDGAYPPILMKLPNDLAAVFTTRASSPRRPRRKSASTLIPPSSREVGVILQPLGTISTDQLEGYLSSLGVDSRPTEIVEYNEFGYRYDSRDLDDFDESFEDNYTPLYFGIFMTDNETEEQRQAREAEAEAERCRLEEERQAQEQERLRREQQEREQAAKEAEDRRQRALDAGRRARDLIRQQDVEGTAVFRTPQQNAIAAITLLDTLLKEDALNQADHVVNILNQTKTMIATLVPVNSGSVRTPTGSRRPVDLRDTINQRHAARGHRHSPDRYDDDVDGIAVFTNDLRRVDWPAGFKPTGIEKYDGTTNPESWLTVYGLAIRTAGGDSKAMANYLPVALGTFECPGTQFDLYNVIQKPGESLRDYIRRFSEQRNKISDITDDVIIAAFTKGIRHDDLVGKIGRKPPRTVKQMFEKANVYAKAEDAITASKQSGTTWKPKKDTPAAGERGSNNHKDRKRKPEELVATTTPSSRQRSRVNTFDKIMSSQCPHHPNSNHVAKDCFVYKQFAEQYAKNTRKPSDGDQGTSKKKDDEDDAPTEIAIKFDRSDHPDRVVHPGRYPLVLDPVVRNVKLRRTLIDGGSALNILFAKTLDDMQIPRTELKPSNAPFHGVIPGLSAMPLGQITLPLTFGTRENFRTENICFEVADFETEYHAILGRPALAKFMAVPHYTYMMMKMPGPREVISLRSDIKQAVTCDKESCEMAQTREITLAREEIRLAATMASEGEVPATKMPKSGESDAKTKKEDAKPIKQRLHRFAQDRKDAIKEELTKLLAAGFIKEVLHPDWLANPVLVRKKTGQWRMCVDYTDLNKSCPKDPFGLPRIDQIGRNVEAYVDDVVVKTKQKDDLITDLEETFASIRAFRMKLNPEKCVFGVPSGKLLGFMVSHRGIQANPEKVNAILNMKPPSSQKDVQKLTGCMAALSRFVSRLGERGMPFFKLLMKTDNFQWGPEAQKAFEDFKKLLSTPPVLASPHPQEPLLLYVSATSQVVSTVLVVEREEECHIQKVQRPIYFVSEVLADSKTRYPQPQTSIKFQALADFVAEWTECQEDTPEEKMEYWTMHFDGSKRLSGTGAGVVLISPTGERLSYVLWIHFSASHNVAEYEALLHGLRIAISLGIRRLIVRGDSQLVVNQVMKEWSCLDDNMTAYRQEVRKLEDKFDGLELTHVLRHNNETANRLANFGSKREAAPSDVFVEHLYEPTVPRKETIEAMDTQGVSMIEADWREPLIRFLTKQELPQDKNEAERISRRSRLYVIHETELYKKSPLGILQRCVSLEEGRQLLKDIHSGICAVSDADKIVRTCEGCQFFARQIHLPAQELQTIPLSSPFAVWGLDMVGPFKRAVGGYTHLFVAIDKFSKWIEAKPVITITADKARDFFINIVHRFEVPNRIITDNGTQFTEGVFKDFCEDFGIKICYASVAHPMSNGQVERANGMLLQGIKARVFDRLNPYAGKWVEQLPSVLWSLRTTPSRATGQSPFFLVYGAEAMLPSEVEFESLRFCNFREERYGEDRVDDLHRLEEAREAALIQSARYLQGLRRYHNRNAQQGLTKTFKKSGAKTSRSKIGVLKSLNYINCYLIGRFLRIANEVKSSFFARPVYKAINGINVNPWIKGFGHRQRQTRSHTPSFFDVLEICIRSNSQLVEDFRSIKCTRTGVIEEHGLDEWGSGISDFIPGFFKFFDLANQDVELSLRLDLALIPGGFEGSQMRD

SEQ ID NO: 181290 - protein, 1006 aa, Oryza sativa
  unsure (1)..(1006): unsure at all Xaa locations
  Clone ID: PAT_MRT4530_78579C.1.pep
MARGSAPLDGSVLPPSRIVSERQAGLPRRFMPESATGREVVALGEGRPAPHYPERSVFFLSFAMAGLVPPFSSFFMDVLEFYDLQMAHLTPNAVMTLAIFAHLCEMFIGVRPSLRLFRWFFTVQPVSPPSVVGGCYFQPRGPVLNRYIPCVLRKKWDDWKSDWFYTPLADEVRLRLPSQPPAQASSWRAPVDLGDGYDAVLDRLAGLRSQGLTGAMVYGDYLRRRIAPLQRRARGAWEYTGSEDYMRTHQGHKWDWVPEDLRMVVQRVLNLSSVEASLIPQGVLPLCSDPDRASILSIMQAVGASEERAPRGHEGAGGSRRGEQSTPGGGRASGPRDGGPGGSRPADARGKRKQEGTPSPSPPRGGGAVRASSRRPEGAAPMSQPEGGRKKKRLRKMGETEPCRGNLISPPRWSFSRPPXQIPSRPLRPSKSGRSEAEETATAETRRREADRREAADRLRESEEGAQEAVRARQAEEATREEARPRWAEESVREAETAHARQAAHRAPDPTPPEATTTSEATHDEAAGAPLGPDPSGGAQDEPASGXAAPESGTSIGGPSRAAPTPRRLSPLPSTAPLSAEPLLQALATANSTVLDGLSAQMEILQAERAELDAAWTRVEEGRRSVEAMVEAGRKAHRRHTSELEARRRDLAEIAREVEEERETALIATAVLDEVRDDLRLQYRSRAAELEKKLDTARGILDAAATRERRAAENEAASRRREEALEARATALEEHARARERDLADREAAVAIREATLAAHEAACAEEESALRLREDALTERERALEEAEAAAQRLADSLSLCEAAREEQARRNLEGARAERAALDQRAAELEARAKELDARAHNGGATAGDGDLAARLAAAEHTIADLQGALDSSAGEVEALRLAGEGGLAQRLSEMAGTLQRLPEELEETIKSSSRDLARGAVELVLASYQARDPDFSPWAALDEFPPGTEDDARAQVRDAADHIVHSFEGTAPRLAFALDSDEEGGDGGAGDSGDEAGDPGASE

SEQ ID NO: 181291 - protein, 84 aa, Oryza sativa
  Clone ID: PAT_MRT4530_7857C.1.pep
CQHYQFKLFFFKKTHGFHFQKQFLDACLELRNFYVHRLVLPFFFLAEYFEFFNKNLYGWERTHTLDRPWAAPTLAQILLHGEIR

SEQ ID NO: 181292 - protein, 239 aa, Oryza sativa
  unsure (1)..(239): unsure at all Xaa locations
  Clone ID: PAT_MRT4530_78580C.1.pep
VITGGGSATHARRRTMARRRKRRAPTRRGQRGELTEGLDDGGGGVRVDDDGGAPAILGGNGGXDEDGDDLANPTVXSRATTTTRAAAAHGWTRGGDSGARVVVEAALQAAASXGEGGDEGLGAAMXAHGGQQRXGRSRVRRKKXNPNRARIQRFPNEISRRFQKRKGRGDPEDHFPSIDLIGDGKMRTAPPVSGREESERRLDSVGWLGRVQAGRGERGRELGRLSAQSEKRIFKTFFF

SEQ ID NO: 181293 - protein, 119 aa, Oryza sativa
  unsure (1)..(119): unsure at all Xaa locations
  Clone ID: PAT_MRT4530_78581C.1.pep
XXKKTXNKKGGKRSFGPTKFFLKKRNWWKTTLPGGEKKVGQPQTPSWSGGKKNPLENNPALKKTGGGFWMLKELEAPHNTRGKNPKKGGNWGRPAAQNCGGFRTILATNTPWAGRWWGG

SEQ ID NO: 181294 - protein, 1930 aa, Oryza sativa
  unsure (1)..(1930): unsure at all Xaa locations
  Clone ID: PAT_MRT4530_78582C.1.pep
MASLSSLLLGCFLLAAAIFLHRNGASTTTTHLHFYMHDAYTGPAPTAMRVVSGRSLLDDGGDAVPRQFGDIVALNNALTEGPSAGSTRVGTAQGFAVRVSEGGMCGDYGYPYLHDSCNLVGYTAFRFGSLNFITNDFGKISLLDSDSNQSGRDQVPVPFGIPNSAEAYSKIISPESASNHSDEIQSTLPRPDQDDGSYPSILMKLPDDLXAVFTVKTSPTRRSRRAPASAPIRSRSREEQRXAREADQDRARQEAERRRLEEERQRQERERLQREQQDRERIAKEAEDRXQRALESGRRARELIGQQDVDGTAVFRTXPQQNAVAAITLLDTLLKEDALNQADHVVNILNQTKTMIAASVPANSASTRTPTGSRVPHQPSLSIAGAESSRRSRGHDERDLRRVDWPAGFKPTGIEKYDGTTNPESWLTVYGLAIRAAGGDSKAMANYLPVALADSARSWLHGLPCGTIASWAELLDHFIANFQGTFERPGTHFDLYNIVQKSGESLRDYIRRFFEQRNKISDITDDVIIAAFTKGIRHEDLVGKFGRKPPKTVKQMFEKANEYAKAEDAITASKQSGTTWKPKKDMPTAGGSGSNNHKDRKRKPEELVATTSPSSRQRSRINTFDKIMNFQCPHHPNSNHVAKDCFVYKQFAEQYVKNACKPSDGDQGTSKKKDDEDDAMTGFQDHRKELNHIFGGPLAYESKRKQKLTEREINAVQPNTPQYLRWSEIAIKFNRSDHPDRVVHSGRYPLVLDPVVRNVKLRRTLIDGGSALNILFAKTLDDMQIPCTELKPSNAPFHGVIPGLSATPLGQITVPVTLGTRENFRTENVCFEIADFETAYYAILGRPALAKFMAVPHYTYMMMKMPGPRGVISLRSVIKQAVTCDKESCEMAQTHETTLAREEIRLAATTASEGEAPATKLTKTEESDAKTKKIPLDPSDPDKTAVIGAELXQRLRRFAQDRKDXIKEELTKLLAAGFIKEVLHLDWLANPVLVRKKTGQWRMCVDYTNLNKSCPKDPFRLPRIDQVVDSTAGCELLSFLDCYSGYHQIRLKESDCLKTSFITPFGAYCYITMPFRLKNAGATNQRMIQRCFSTQIGRNIEAYVDDVVVKTKQKDDLIADLEETFTSIRAFKMKLNPEKCIFGVPSGKLLGFMVSQRGIQANPEKINAILNMKPPSSQKDVQKLTGCMAALSQFVSRLGERGMPFFKLLKKIDNFQWGPEAQKAFEDFKKLLTTLPVLASPHPQEPLLLYVSATSQVVSTVLVVEREEEGHIQKVQRPIYFVSEVLADSKTRYSQVQKLLYGVLITVRKLSHYFQSHSVTVVTSFPLGDILHNREVNGRIAKWALELMSLDISFKPRTSIKSQALADFLTEWTECQKDMPEEKMEYWTMHSDGSKRLTGTRAGVVLISPTRERLSYVLWIHFSASHNVAEYEALLHGLRIAISLGIRRLIVRGDSQLVVNQVMKEWSCLDDNMTTYRQEVRKLENKFDGLELTHVLRHNNEASDKLANFGSKREAAPSDVFVEHLYEPTVPRKETVEAMDTQGVSMIKADWREHFIKFLSKQELPQDKNEAERISRRSRLYIIHETELYKKSPSGILQHYVSLEEGRQLLKDIHSGICGNHAAARTIVGKAYRQAQELQTIPLSWPFVVWGLDMVSPFKRAVGGYTHLFMAIDKFSKWIEAKQVIMITADKARDFFINIVHRFGVPNRIITDNGTQFTGGAFKDFCEDFGIKICYASVAQPMSTGQVERANDMILQGIKARVFDRLCPYAGKWVDQLPSILWSLRTTPNRATGQSPFFLVYGAEAMLPSEVEFESLRFRKFNEEGYEEGQVDDINRLEEARETALIQSTRYLQGLRRYHNRNIRSRAFLVDDLVLRKIQTTQDRHKISPLWEGPFIIAEVTRPGSYRLKHEDGTLINNSWNIEHLRRFYA

SEQ ID NO: 181295 - protein, 163 aa, Oryza sativa
  Clone ID: PAT_MRT4530_78583C.1.pep
SNPKRTAGIESIHHGSTDDAALTSSPAAARQLTLAGERRRGGANRGHLRVEGNAANSPRAQTTADGNGQRRRRGRSGRGVRVDDDGGAPAVFGGNGGRDEDCDDLAILTVALPSDDDDRSGGGARLDSRRRRRRTGCHGGGATSGGELRRGWWRIEEVPGVLI

SEQ ID NO: 181296 - protein, 37 aa, Oryza sativa
  Clone ID: PAT_MRT4530_78584C.1.pep
PETKGLKTEDHDVRRYLAEVNGEERCGADDVLTDHDT

SEQ ID NO: 181297 - protein, 1271 aa, Oryza sativa
  unsure (1)..(1271): unsure at all Xaa locations
  Clone ID: PAT_MRT4530_78585C.1.pep
MGFVSSIDDFVFPPGQAFRFGSLDFITNDFGKISLLDSDSNQSGRGQISAPFGIPNSAEIYPKIISIELASNHSDEIQSTPTRPDQDDGAYPPILMKLPDDLAAVFTTRASSPRRSRLDPASAPIQPSSREVSVILQPLSTVSTEQLDGYLSSPGVDSRPTEIIEYDNFGYRYDYRHLDDFDKDFEYNYMPLYFGIFMADNETEEQHKAREAEEQRVQQEAERRRLEEEHQAQERERLQREQQERERATKEAEDWRQHDLDVGRRARELIGQQDVEGTVVFRTPQQNAVAAITLLDTLLKEDALNQANHVVNILNQTKTMIAVNILNQTKTMIAASVPVNSSSVRTPTGSRVPPLRSQDYHQPSLSVVGAGSSRRSKGHDERSIHSPPKRHRERRVEQSRSPHRRRPVDLRDTINQRRAARGYAPHHSPDRYDDDVDGVAAFTSDLRRVDWPAGFKPTGIEKYDGTTNPESWLTIYGLAICAAGGDSKAMANYLPVGTFERPGTQFDLYNVVQKCGESLRDYIRRFSEQRNKISDITDDVIIAAFTKGIRHDDLVGKFGRKPPRTVKQMFEKANEYAKAEDAITASKQSGTTWKPKKDMTTGGSGSTNHKDRKRLSATPLGQITLPVTFGTRENFRTENVCFEVADFETTYHAILGRPALAKFMAVPHYTYMMMKMPSPRGVISLRSDIKQAVTCDKESCKMAQTREITLAREEIRLAASTASEGEVPVTKMPKSGESDAKTKKIPLDPSDPTKTADRKDAIKEELTKLLAVGFIKEVLHPDWLANPVLFRKKTGQWRMCVDFTDLNKSCPKDPFGLPRIDQIKQKDDLITDLEETFASIRAFRMKLNPEKCIFGVPSGMLLGFMVSHRGIQANLEKINAILNMKSLSSQKDVKKLTGCMAVLSRFVSRLGEQGMLFFKLLKKTDNFQWGPEAQKAFEDFKKXLTTPSVLASPHPQEPLLLYVSATSQVALEWGLXLISLTGERLSYVLWIHFSGSHSVAEYEALLHGLKISISLGIRHLIVRGDSQLVVNQVMKVWSCLDDNMTAYRQGVCKLEDKFDGLELTHVLRRNNEAADRLANFGSKREAAPSDVFVEHLYEPTVPRKETIEATDTQDVSMIEADWREPLIRFLTKQELPQDKDEAEQISRRSRLYVIHETELYKKSPSGILQRCVSLEEGRQLLKDIHSGICGNHAAARTIVGKAYRQGFFWSTAVSDADKIVRICEGCQXSPDKLIYRLRSCKPSRCLGRSRFGGSTWSAHLKRXSVVILISL

SEQ ID NO: 181298 - protein, 267 aa, Oryza sativa
  unsure (1)..(267): unsure at all Xaa locations
  Clone ID: PAT_MRT4530_78586C.1.pep
SPPYKQGIDSPETPVCLSPPLHSLVLQNEPYYIKSKAGNERPRSNXTKRTAEIDLIHHGSTDXHGADVSDDVITGGGSATHARRRTMARRRKRRAPTRRGRRGELTEGLDDGGXATDSDGDEVEAAEAFGSTTTAVLRRSSVXRRVGRGRRRLGEPNSGLPERRRRPERRRRTAGLAAATAAHGLSWRRRYKRRRAEARVATKRGGPECPYIGARXRRCRPTAANNGDGRSRVRRKKRIRIELESNDFQTKLAEDSKREKEEGIPRI

SEQ ID NO: 181299 - protein, 81 aa, Oryza sativa
  unsure (1)..(81): unsure at all Xaa locations
  Clone ID: PAT_MRT4530_78587C.1.pep
SPSIAACSASAXFDALTQVYRQYQLQPQLMLQQQMLSPCXEFVRHAXCSTVATPFFQSPVFQLRTGQVIDSSCAQQLRMIE

SEQ ID NO: 181300 - protein, 1041 aa, Oryza sativa
  unsure (1)..(1041): unsure at all Xaa locations
  Clone ID: PAT_MRT4530_78588C.1.pep
MARGSAPLEGSVLPPSRIVSERQAGLPRRFMPESATGREVVALGEGRPAPHYPGRSVFFLSFAMAGLVPPFSSFFMDVLELYDLQMAHLTPNAVMTLAIFAHLCEMFIGVRPSLRLFRWFFTVQPVSPPSVVGGCYFQPRGPVLNCYIPCVLRKKWDDWKSDWFYTPLADEARLRLPSQPPAQASSWRAPVDLGDGYDAVLDCLAGLRSQGLTGAMVFGDYLHRRIAPLQRRARGAWEYTGSKDYMRTHQGGRWDWAPEDFKMVVQRVLNLSSVEASLIPQGVLPLCSDPERANILTIMQAVGASGEWAPRGHDGTGGSRRGEQSTPGGGHASGPRDGGPGGSRPADARGKRKQEDTPSPSPPRGGGAVRASSRRPEGAVPTSQPERERKKKRLRKMGGTEPCRGNLISPPRWSFSRPPRSEIPSRPPRHSKSGRSEAKETATAEARRREAIRREAADRLREAEEAAQEAVRVCQAEEAAREEARLHRAGKSAREAEATCARQAACQAPDPTPPEATTTSEATHDEAAGAPLGPDPSGDVRDEPASGDAPESGTSIGGPSRTAPTPRRLSPLPSAAPLNTEPLLQALAAANTTVLDGLGAQMEVLQAERAELDAAWARVEEGRRSVEAMVEAGRKAYRRHASELEARRRELAEIAREVEEERETALIATAVLNEARDDLRLQYGSRVAELEKKLDAARGVLDAATAREWRATENEAASRRREVALEARATALEERARARERDLADRETAVAIREATLAAHEAACAEEESALRLHEDALTERERALEEAEAAAQRLADSLSLREAAREEQARRNLEGARAERAALDQRAAELEARAKELDARARSGGAAAGDSDLAARLVAAEHTIADLQGALDSSAGEVEALRLAGEVGPGMLRDAVSRLDRAGRQAGLWGERTAKYAANQGGLAQRLSEMAGTLQRLPEELEETIKSSSRDLARGVVELVLASYQARDPDFSPWAALDEFPPGTEDXRARAQVRDAADHIVHSFEGTAPQLAFALDSDEEGGDGGVDDSDHEAGDPGASK

SEQ ID NO: 181301 - protein, 405 aa, Oryza sativa
  Clone ID: PAT_MRT4530_78589C.1.pep
MAALLLSSHLTAASSSSTTSPTARPAPSFVSFRAANAAPKGARRGWPFLASSVEPPPAASAAQPFRSLAPSETTVLVTGATGYIGRYVVRELLRRGHPVVAVARPRSGLRGRNGPDEVVADLAPARVVFSDVTDAGALRADLSPHGPIHAAVCCLASRGGGVRDSWRVDYRATLHTLQAARGLGAAHFVLLSAVCVQKPLLEFQRAKLRFEGELAAEASRDPSFTYSIVRPTAFFKSLGGQVETVKNGQPYVMFGDGKLCACKPISEEDLAAFIADCISDEGKANKILPIGGPGKALTPLEQGEMLFRLLGREPRFIKVPIQVMDAAIWVLDALAKVFPGVEDAAEFGKIGRYYASESMLVLDPDTGEYSDEMTPSYGSDTLEQFFERVIREGMAGQELGEQTIF

SEQ ID NO: 181302 - protein, 205 aa, Oryza sativa
  Clone ID: PAT_MRT4530_7858C.1.pep
PTTQTLMSIIFIIIGCYTAIDWINDIVIFINILPSLFNIAYSSAIDWQLHLHSLSSLLLLIALFGFIQQLIGYNIIAFCHPSTVFRFGKSTQETMAKMIEALGFGVIWFERRLSFDCEGLRGYCRDYGANAAPSRCLLLVGRRRRSRPRCHRQPRMLLPPSSSSAAASATPTTRSVLPPASMPATARSALPSGRTAANAPPLRRI

SEQ ID NO: 181303 - protein, 921 aa, Oryza sativa
  Clone ID: PAT_MRT4530_78590C.1.pep
MVRGSAPLDGSVLTPSRIVSERQAGLPCRFMPESATGREVVALGEGRPAPHYPGRSVFFLSFAMAGLVPPFSSFFMDVLELYDLQMAHLTPNAVMTLAIFAHLCEMFIGVRPSLRLFRWFFTVQPVSPPSVVGGCYFQPRGPVLNRYIPCALRKKWDDWKSDWFYTPLADETRLRLPSQPPAQASSWRAPVDLGDGYDAVLDRLAGLRSQGLTGAMVYGDYLRRQIAPLQRRARGAWEYTGSEDYMRTHQGGRWDWAPEDFKILVQRVLNLNSVEAALIPQGILPLCSVPDRASILTIMMAVGASEERAPKGHDGAGGSRRGEQFTPRGGRASGSRDRGPGSSRPADARGKRKQGGTPPPSPPRGGGAARVSSRRPEGAAPTSQPEGERKKKRPRKMGETEPSRGNLISPPKWSFNRPPRSEIPSRPSRHSKSGQSEAEDPAAVEALRRESDRREAADRLREAEEAAQEAARARQAEETAREEAARARQAGEAAREEVGFRQDEAMATSEAARDEAAGASLGPTPSGDAQATTSGAAGDEAAGASLGPTPSGDAQDQPGPGDIPESGTSIGGPNRVASSPRRLCPTPSIAPLNAEPLLQALAAANTTVLDGLSAQVEVLQAERAELDAAWARVEEGRRSVEAMVEVGRKAHRRHVSELETRKKVLAEIAKEVEEERGAALIATTVMNEAQDTLRLQYGSWEAELRKKLDAAQGREEALEARAMALEERACVVERDLADREAAVTIREATLAAHEAACAEEEFTLRLREDALTERERALEGAEAAAQQLAVSLSLREAAQEEEARHNLEGARAERAVLNQRAAELEARAKELDARARSGRAATGESDLAARLAAAERTIADLQGALDLSAGEVEALRLAGEVGPGMLWDAVSRLDCASRQVGLWRGRTVKYADNQGGLAQRL

SEQ ID NO: 181304 - protein, 632 aa, Oryza sativa
  Clone ID: PAT_MRT4530_78591C.1.pep
MASRAPCLLAARGIASSPHLARRLKQTENEIVQMFRTPSPRNEDAVAALSPRYTNSVRVLDERFIRILKIFKWGPDAERALEVLMLRVDHWLVREVMKTDVGVNVKMQFFRWAAKKRNYQHDTSTYMALIHCLELVEQYGEMWKMIQEMVRSPICVVTPMELSQVIRMLGNAKMIGKAITIFYQIKARKCQPTAQAYNSMIIMLIHEGQYEKVHELYNEMSNEGHCHPDTVTYSALISAFCKLGRQDSAIRLLNEMKENGMQPTAKIYTMIISLFFKLDNVHGALSLFEEMRYMYCRPDVFTYTELIRGLGKAGRIDEAYHFYHEMQREDCKPDTVVMNNMINFLGKAGRLDDGLKLFEEMGVSHCIPNVVTYNTIIKALFESKSRVSEVFSWFERMKGSGISPSPFTYSILIDGFCKTNRIEKAMMLLEEMDEKGFPPCPAAYCSLIDALGKAKRYDLACELFQELKENCGSSSARVYAVMIKHLGKAGRLDDAINLFDEMSKLGCTPNVYAYNALMSGLARACMLDEALTTMRKMQEHGCLPDINSYNIILNGLAKTGGPHRAMEMLTNMKNSTIKPDAVSYNTVLSALSHAGMFEEAAELMKEMNALGFEYDLITYSSILEAIGKVDQE

SEQ ID NO: 181305 - protein, 237 aa, Oryza sativa
  Clone ID: PAT_MRT4530_78592C.1.pep
MADELDELLGFLSSPQPNVRGAAAGIVRGLTGDADGLRALSARADRALPALLRLLGGGGGELGTGGAAADSLVNLSQDGALSARLVSLGVGVAAMDVVAKRGGEQPGLARSLVMLLANLTQVDSGVAALLQVGDEKMQGLYVAKLVRSFCRSSSESEEEDIFEHVASILVNISKVEAGRRILMEPKRGLLKQIIRQSDSTNQLRKKGVVSTIRNCCFEADTHIQNLLSLAEYIWPAL

SEQ ID NO: 181306 - protein, 436 aa, Oryza sativa
  Clone ID: PAT_MRT4530_78593C.1.pep
MADELDELLGFLSSPQPNVRGAAAGIVRGLTGDADGLRALSARADRALPALLRLLASAGGELGTGGAAADSLVNLSQDGALSARLVSLGAVVAAMDVVAKRGGEQPGLARSLVMLLANLTQVDSGVAALLQVAHCSFSQIKFHRVNTDILNPDYTLKFCCFQKVGDEKMQGLYVAKLVRSFCRSSSESEEEDIFEHVASILVNISKVEAGRRILMEPKRGLLKQIIRQSDSTNQLRKKGVVSTIRNCCFEADTQIQNLLSLAEYIWPALLLPVAGKKIYSEEDRSKMPPELANALSHEREAVENSEIRQQALEAIYMIVLQDEGRRAFWSVNGPRILQVGYEDEEDPKVMEAYELIGSLLVGKVFPWLKAIKSSPYNYVRTWRNMHKQSNLPTFHRKIRKLVNVHMSPLTGGFASGQRNIQPPVGKTTGFWINVPF

SEQ ID NO: 181307 - protein, 408 aa, Oryza sativa
  unsure (1)..(408): unsure at all Xaa locations
  Clone ID: PAT_MRT4530_78594C.1.pep
GFSTSVMNPGRNAWDEEIVKVAYNDDIATEVLLVPICRHGGEDFVSWPHDKXGLFIVRSAYNLVTSNLFVVAQSSNGRGXTAANVDSLFRKARWKINAPGKMLIHLWRSVHDCLPTGFQLRRRHVPAMEGCIFCGHDDRIEHVFLVCPYAATVWKAIKEKFQINLCIRELCNTRQWVFDFLTRSSLIQKTVLAVTPXHIWEAGNFSRNNPVTSHPCQVIHKIVSYVDMNVQYCSKERNASGXSLSLPVTKCKPPPASMVVLLNSDAALFXASNQTGLAFVIRDQSASCLLAANKRITGLLSPELTEALAIRFALEHAKAEGFQQVLMASDCLSVIKRIGXRDRSSVSVVVRDIKNLETEFLECSFIHVNHLTNVAAHTVARCSESATCNIFRSVIQDHIREVLNADAI

SEQ ID NO: 181308 - protein, 88 aa, Oryza sativa
  Clone ID: PAT_MRT4530_78595C.1.pep
SAIAVAAAGKDDIDAAASGKDDIDAAAVGKDDIDAAAAGKDDIDAAASGKDDIDAATAGNDEFADDIDAAAAENDEFATAAACFNAAA

SEQ ID NO: 181309 - protein, 80 aa, Oryza sativa
  Clone ID: PAT_MRT4530_78596C.1.pep
GSRTGSPGAGSRRRRRRPWRSSPAPTPRRRRRAPSPARRSPPSGRPPWWCRRPSPRSPPPRPPPSPRWRRPPPPPSPRGR

SEQ ID NO: 181310 - protein, 78 aa, Oryza sativa
  unsure (1)..(78): unsure at all Xaa locations
  Clone ID: PAT_MRT4530_78597C.1.pep
KPNPTFRVTPIEGKGPIFGALPNDVLANAYRLSKEEAKGLKHNRGDGLGAFPPTQXKSSQEVYNGEDPFWVGLGIKNT

SEQ ID NO: 181311 - protein, 114 aa, Oryza sativa
  unsure (1)..(114): unsure at all Xaa locations
  Clone ID: PAT_MRT4530_78598C.1.pep
AEKAATQGNSSLTLSXSXKCGNCXCAXKSQCVKKGTSYGVVXVXAXXXHFXEVAAGXENGGXXCGTSCSCTXXKCGKSHATHPPARPVPCGCVCRVSVAARSAFVCVPVSVRWA

SEQ ID NO: 181312 - protein, 43 aa, Oryza sativa
  Clone ID: PAT_MRT4530_78599C.1.pep
LRVVLVSPLFKFFWKTLRSEHAVVPTVIQVIGGNSWFQVYVVE

SEQ ID NO: 181313 - protein, 122 aa, Oryza sativa
  unsure (1)..(122): unsure at all Xaa locations
  Clone ID: PAT_MRT4530_7859C.1.pep
GRAPRLLLPLLAPPSPHPPPIVAAPASPSSPADPATRRKEMAACHRCPPIPSHLQAPSPPSSSPSPXELPDPLXPSPPPPPSIPPAMPAPSTPPPLVPSPLIPPLASCGSRRRRLLGARGIR

SEQ ID NO: 181314 - protein, 168 aa, Oryza sativa
  unsure (1)..(168): unsure at all Xaa locations
  Clone ID: PAT_MRT4530_785C.1.pep
MDRQRQQSSRGNASATATRGGGGGGGGKGGGNGKAAAAGKKPIKVVYISNPMRVRTSAAGFRALVQELTGRNADPSKYSPRASAGDDGGGATALPDTGAASDADALEAGAAPGRHPAETATFDEGGGGGGGGYDDDDDDVFRSXLLDTSYSVFSPPTLLYDDHPHSKV

SEQ ID NO: 181315 - protein, 475 aa, Oryza sativa
  Clone ID: PAT_MRT4530_78600C.1.pep
MGGSREEDRQHHNHLPSELPLGFRSSSPTTMIASSSMSKESSNYDMADFDQASLFLYLDSHDQQSIQEQRQTLNIFPSQPMHVADPAHEAKSAGVAMAMLPNGNQLQVLPSHPSKKPDQQGGQKINSSVPTNPPGPNLPLPNSAKDNKNSSLIKGPKKCGLQKEGSSSGKGATTSNDPEREGRRTLDPKTLRRLAQNREAARKSRLRKKAYIQQLESSRIRLSQLEQQVHVARVQGAMLGAGDQHQGLPSGPSAASLFDLEYGRWVEEHSKLIFQLRAALNEQMADSQLQVFVNGAMAQHDELLSLKGAIARADIFHLLCGVWATPAERCFLWLGGFRPSEAIKVMLKQVEPLSEGQLMSIYELQQAAKGTEDALSHAMDGLQQSLSDTVAAPDVAAAGGFMGHMSLAMNKISAMEDIVRQADGLRQQTLHKLQHMLTIRQAARCFVAISDYFHRLRALSTLWVARPRPEEGPAM

SEQ ID NO: 181316 - protein, 117 aa, Oryza sativa
  Clone ID: PAT_MRT4530_78601C.1.pep
MTVGLHMKSGATVRVTDEKRPTRTRLGSQRIVYGSTSPSPAWRLLDPRYKRDPLGEPGGTESLTANTTATVYEVRARGSQIAGRYHPSTPPSLGISLLGEVNRISARLITRGDVIGT

SEQ ID NO: 181317 - protein, 568 aa, Oryza sativa
  Clone ID: PAT_MRT4530_78602C.1.pep
MSSAAIAISPMVEEFALLPICFDGSRSPHCLSGSQLQDSIIIFLAVPGAPPMPMSVLGSESIASVKLRIQRFKGFVVNKQRLVLDGHELARNNCHVKDYGLADGNVLHLVIRLADLRLINIETTSGKKFQFQVDQSRNVKYLKSKLAVEGDEDLGEDHKLECDGKELEDHQLIADISKKDDAVIHLFIRKPAKLRTQQVDKDTVVTVVTPQEKENLQNEAHAVNPAKPAGARPALVEPIIVNHKVKLSLEVMRMISSAIAGLENGYLPVMSAEGSGGVYFMQDASGEKNIAVFKPRDEEPMAKNNPRGLPVSTDGEGMKRGTLVGEGAFREVAAYILDHPIGDHESEERIGFSGVPPTALVRSLHRGKSFKIGSLQMFIQNNGSCEDMGPRAFPVKEVHKIAVLDLRLANADRHAGNILVCKDEEGGNYKLVPIDHGYCLPEKFEDCTFEWLYWPQAREPFSDETIAYIKSLDAEEDIKLLKFHGWELSARCARVLCISTMLLKKGAARGLTPYDIGRILCRETVNRDSEIEDIVQEAEGHVLPGSSEVIFLETVSEIIDRHLDKKFA

SEQ ID NO: 181318 - protein, 252 aa, Oryza sativa
  Clone ID: PAT_MRT4530_78603C.1.pep
MYVVGVHALWLSLKLGNGMRRELNFNARTVDVVLAFTASMLPKRSALSIPLTRMRIVADSPSGQHGQLRGISYRLTGQHMLVKVGREKKRGEMGEERVRGGMWAFPIASSARAIHRALESPPAGCRLQIDRSNRRKRLQPTPVAAGLTAVCPPVGPPRCRRSDRRFGPRLPTWSMISRQNRKLQRQPLFVAARVNKKQKKKRKKKWIAKIMRPEMDVAVECVHVRMLSAIESSLVFCCRPKSHSYVRHQTTE

SEQ ID NO: 181319 - protein, 54 aa, Oryza sativa
  Clone ID: PAT_MRT4530_78604C.1.pep
DIGRILCRETVNRDSEIEDIVQEAEGHVLPGSSEVIFLETVSEIIDRHLDKKFA

SEQ ID NO: 181320 - protein, 159 aa, Oryza sativa
  unsure (1)..(159): unsure at all Xaa locations
  Clone ID: PAT_MRT4530_78605C.1.pep
ETEVLKGKTTXLEIEGTRVLTDVTDLNEPFEALQQEGFGLETTINGLKNQLFVXKVASLKGLDHGKACSXKLEFLLEKKPTFFIDLITLETKKEKKKGALEDLPVAWIKVPGKPQEALDRGQKKKNDFDLALAQMGDRKMALKSLEKPFKVLLDKSNQA

SEQ ID NO: 181321 - protein, 99 aa, Oryza sativa
  Clone ID: PAT_MRT4530_78606C.1.pep
IPHTESEEGLIRKGPNPLRSGRQPSHNLTDSPHSNQTKNSQDKSAGDSPQEPTRGEEGGYPGEGGGAKSGAAPCSSLLRSSREMGKLRFEFGIRRKKFR

SEQ ID NO: 181322 - protein, 1638 aa, Oryza sativa
  unsure (1)..(1638): unsure at all Xaa locations
  Clone ID: PAT_MRT4530_78607C.1.pep
MGSVSGIDDFVFPPGQAFRFGSLDFITNNFGKISLLDSDSNQSGRGWISAPFGIPNSAEVYPKVISTELVSNHSDEIQSTSTPPDQDNGAYPPILMKLPDDLAVVFTKRASSSRXVGVILQPHGTVSMDQLEGYFSSPGVDSRVXPTEIVEYDEFGYRYDNRDLDDFDESFEDNYTPLYFGVFMADNETEEQRQAREAEGRRVQQEAERRRLEEERQAQEQERLQREQQERERAAKEAEDRRQRALDAGRRARELIGQQDVEGTAVLHTPQQNAVAVITLLDTLLKEDALNQVDHVVIILNQTKTMIAASVPVNSASVRTPTGSRVPHLRSQDYHQPSLSITGAGSNRRSRGHDERSVHPPPERHRERRVERPRSPPRRRPVDLRDTINQRRATRGYARHHSPDRYDDDVDGVAAFTNDLRRVDWPAGFKPTGIEKYDGTTNPESWLTVYGLAIRAAGGDSKAMANYLPVPLADYAQSWLHGLPRGTIEAELRDHFIANFQGTFERPSTQFDLYNVIQMSGESLRDYIRRFSEQRNKISDITDDVIIAAFTKGIRREDLVGKFGSKPPRTVGTTWKPKKDTPTTGGSGSTNHKDRKRKPEELVATTTHSSRQRSRVNTFDKIMNSQCPHHPNSNHAAKDCFVYKQFAEQYAKNARMASDGDQSKSKKKDDDDGAPTGFQDHRKELNHIFGGPLAYESKRKQKLTKREINAVQPNTHQYLRWSETTIKFDRSDHPDQVVHPGRYPLVLDPVVRNVKLRRSLIDGGSALNILFAKTLDDMQISRTELKPSNAPFHGVILVLSATPLGQITLQVTFGTPENFRTENVCFEVADFETAYHAILGRLALAKFMAVPHYTYMMMKMPGPRGVISLRSDIKQAITCDKESCEMAQTREITMAREDIRLAATTASKGEVPATKIPKSGESETKTKKIPLDPSDPTKTAVIGAELDCYHQIRLKESDCLKTSFITPFGAYCYITMPFGLKNAVATYQRMIQRCFPTQIGRNVEAYADDVVVKTKQKDDLITDLEETFASIRAFRMKLNPEKCIFGVPSGKLLGFMVSHRGIQANPEKINAILNMKPPSSHKELQKLIGCMAALSRFVSRLGERGMPFFKLLKKTDNFQWGPEAQNAFEDFKKLLTTPPVLASPHPQEPLLLYVLATSQVVSTVLVIEREEEGHVQKVQQPIYFVSEVLADSKTRYPQVQKLLYGILITVRKLSHYFQGHSVTVVTSFPLGNILHNREANGRIAKWALELMPLDISFKPRTSIKSQALADFVTEWTECQEDMPEEKMEYWTMHFDGSKRLSGTGARVVLISPTGERLSYVLWIHFSASHNVAEYEALLHGLRIAISFGIRRLIVCGDSQLFVNQVMKEWSCLDDNMTAYRQEVHKLEDKFDGLELTHVLRHNNEAADKLANFGSKHEAAPSNVFVEHLYEPAVPRKKIIEATDAQDIAMIEADWREPLIRFLTKQELPQDKDEAEQXLQDIHSRICGNHAAARTIVGKAYRQXIPLSWPFEVWGPDMVGPFKKAVGDYTHLFVAVDKFSKWIEAKPVITITADKARDIFINIVHRFGVPNRIITDNGTQFTGGVFKDFCEDFGIKICYASVAHPMSNGQVERTNGMVLQGIKARVFDRLNPYAGKWVE

SEQ ID NO: 181323 - protein, 1450 aa, Oryza sativa
  Clone ID: PAT_MRT4530_78608C.1.pep
MASSSSSTLSSSAVLGHPVSEKLSRDNFLVWRAQVLPAVRGAQLTGYLDGTKEVPSPEITVEKKVGDDLVKESVNNPAYSQWIAHDQQVLGYLLSTLSREVLVQVAHLESARQVWTAINEMFSSQSKARIIQIRAQLARELKGDSSAAAYFTKMKGLADEMAAAGKKLDDDDIVSYILGGLDADYNPLVASVSSKDYISLSDLYAQLLSFEAHLNNQSEGGYHSSANSASRGARGRGQGRGRGRGGFGSNFGSGFGGRGRGGRGRGDGSRPSCQLCGKEGHTVHTCWKRFDRSFSGDDVIFQQHHQQAKSASAVSSYGVDTNWYLDTAATDHITGELEKLTTKERYHGNEQVHAANGAGMSISHIGRTIFHTPNRNLALNNVLYIPEAKKNLVSAHRLAYDNHAFVEIHPKFFCVKDQTTKSTLLQGRSRGGLYPIPLKSTTPQGRQALVSTSSAESRWHSRLGHPSFSVVTRVLRKHNIPVSESREERVCDACQQAKSHQLPYSRSVSRSSAPLELVFSDVWGPAPQSVGRFKYYVSFIDDYSKFTWIYLLKNKSEVFQVFTNFQHLVERQLGRKILTMQTDWGGEYHRLNSFFQKIGIAHHISCPHTHQQNGSAERKHRHIVEVGLALLAHASMPLKFWDEAFLTATYLINRIPSRVINFSTPLELLFHTKPDYSFLRVFGCACWPNLRPYNKRKLQFRSKKCAFLGYSFHHKGYKCLDISTGRVYISRDVIFDETVFPFVDLHSNAGNQLRAEISLLPESLLSSRGMINSFSFETNAPNNASSAGLYVQDSGDDNLDQNSGGLSGIGPASSAHMPEVSVSGSPQVSHVSESAPPSPTCSPGSHVSGAAGSGSESTPGLSVSGGEMSGSTETLSLESSADSGPSMAQQGEQQNIQPVVVSRPHTRLQSNIRKPLTRTDGTIRWGMYSGSDKEPTCFDDALADENWKKAMDEEYNALIKNNTWHLVPAPIGKNIIDCKWVFKIKRKSDGTIDRYKARLVAKGFKQRYGIDYEDTFSPVVKISTIRLVLSLAVSKGWSIRQLDVKNAFLHGILEEEVYMKQPPGYVDKSSSYYVCKLDKALYGLKQAPRAWYYRLYDKLCQLGFSASKADTSLFFYRKGDVVIYFLVYVDDIIVVSSSDQAIPALLKDLNAEFALKDLGNLHYFLGIEVTPSSEGSLVLSQRKYATELISRAGLRNCKPVSTPLAVSEKFSSVGGVLLSEEDGTKYRSIVGGLQYLTLTRPDIAFAVNKACQYLHSPTTLHWTAVKRVLRYVSGTLTFGLKIGRSDSTTISAFSDADWAGCSDDRRSTGGFAIFLGSNLISWSARKQATVSRSSTEAEYKALANATAEVIWIQTLLKELGVSQPKAAVLWCDNIGATYLSANPVFHARTKHIEVDYHFVRERVAQRLLDIRFISSGDQLADGFTKAQSLSKLQIFRNNLNLCKVMIEGEC

SEQ ID NO: 181324 - protein, 1807 aa, Oryza sativa
  Clone ID: PAT_MRT4530_78609C.1.pep
MGFVSGIDDFAFPPGQVFRFGSLNFITNDFGKISLLDSDSNQSGRDQVPVPFGIPNSAEAYSKIISPDSASNHSDEIQSTLPRPDQDDGSYPSILTKLPDDLAAVFTVKTSPTRRSKRAPASAPIRSRSRKVGVILQPLGTVSTEELDGYLSSSGVSSRPTEILDYDDFGYHYDHGDLDNFDDSYEDNYTPLFFGVFKANNEMEEQHQAREADQDRARQEAEPPRTRGHHSPDRYDDDVDGVAAFTSDLCRVDWPASFKPTGIEKYDGTTNPESWLTVYSLAICAAGGDSKAMANYLPVALADSARSWLHGLPRGTIGSWAELRDHFIANFQGTFERPGTHFDLYNIVQKSGESLRDYIRRFSEQRNKISDITDDVIIAAFTKGIRHEDLVGKFGRKPPKTVKHMFEKANEYAKAEDAITASKQSGTTWKPKKDTPTAGGSGSNNHKDRKRKPEELVATTSPSSRQRPRVNTFDKIMNSQCPHHPNSNHVAKDCFVYKQFAEQYVKNARKPSDGDQGTSKKKDDEDDAPTGFQDHRKELNHIFGGPLAYEYKRKQKLTEREINAVQPNTPQYLRWSEIAIKFDRSDHPDRVVHPGRYPLVLDPVVRNVKLRRTLIDGGSALNILFAKTLDDMQIPRTELKPSNAPFHGVIPGLSATPLGHITLPVTFGTRENFRTENVCFEVADFETAYHAILGRLALAKFVAVPHYTYMMIKMPGPRGVISLRNDIKQAVTCDKESCEMAQTHETTLAREEIRLAATTASEGEVPATKLTKTEESDAKTKKIPLDPSDPDKTANNKDIFAWKPSDMPGIPREVIEHSLHVKEDAKPIKQRLHRFAQDRKDAIKEELTKLLAAGFIKEVLHPDWLANPVLVRKKTGQWRMCVDYTDLYKSCPKDPFGLPRIDQVVDSTAGYELLSFLDCYSGYHQIRLKESDCLKTSFITPFGAYCYITMPFGLKNAGATYQRMIQRCFSTQIGRNVEAYVDDIVVKTKQKDDLIADLEETFTSIRAFKMKLNPEKCIFGVPSGKLLGFMVSQRGIQANPEKINAILNMKPPSSQKDVQKLTGCMAALSRFVSRLGEWGMPFFKLLKKTNNFQWGPEAQKAFEDFKKLLTTPPVLASPHPPEPLLLYVSATSQVVSTVLVVEREEEGHIQKVQRPIYFVSEVLADSKTRYPQVQKLLYGVLITIRKLSHYFQSHSVTVVTSFPLGDILHNREANRRIAKWALELMSLDISFKPRTSIKSQALADFLAEWTECQEDMPEEKMEYWTMHFDGSKRLTGTGAGVVLISPTGERLSYVLWIHFSASHNVAEYEALLHGLRIAISLSIRRLIVRGYSQLVVNQVMKEWSCLDDNMTAYRQEVRKLENKFDGLELTHVLRHNNEAADRLANFGSKREAAPSDVFVEHLYEPTVPRKETVEAMDIQGVSMIEADWREPFIKFLSKQELPQDENEAERISRRSRLYIIHETELYKKSPSGILQRCVSLEEGRQLLKDIHSGICGNHAAARTIIGKAYRQAQELQTIPLFWPFAVWGLDMVGPFKRVVGGYTHLFVAIDKFSKWIEAKPVITITTDKVRDFFINIVHRFGVPNRIITDNGTQFTGGAFKDFCEDFGIKIFYASVAHPMNNGQVERANGMILQGIKARVFDRLRPYAGKWVDQLPSVLWSLRTTPSRATGQSPFFLVYGAEAMLPSEVEFESLRFRNFNEEGYEEGRVDDINRLEEAREAALIQSTRYLQGLRRYHNRNVRSRAFLVGDLVLRKIQTTQDRHKLSPLWEGQFIIAEVTRPGSYRLKREDGTLINNSWNIEHLRRFYA

SEQ ID NO: 181325 - protein, 120 aa, Oryza sativa
  unsure (1)..(120): unsure at all Xaa locations
  Clone ID: PAT_MRT4530_7860C.1.pep
NSCNETNPKNLLILLSPDTVPPLPSAIRSFAPXPPPPPPPPPQHAAARPRRLAGRRQXAGEAPPGRPPPPLSLPSPPSSXPLAERCPRRQCCPPPSSIPAASAPPPAPRYPPQGRRLPWP

SEQ ID NO: 181326 - protein, 164 aa, Oryza sativa
  unsure (1)..(164): unsure at all Xaa locations
  Clone ID: PAT_MRT4530_78610C.1.pep
TSPLPLPAASSPPHRSSSTRGGFLPPPRPPPPSLAPMGRRGVGRNPLSPRGARPLRPPPPLPXLGGGSPVRPQPPVLGGGRRPRLPRQRWPPPPSTSPPPTASATTTGLDASEDLDWEFTSSSSRRQHKRSSSCRKGGWRRSSFKNHQQRVSKREREVRKWWFF

SEQ ID NO: 181327 - protein, 1961 aa, Oryza sativa
  unsure (1)..(1961): unsure at all Xaa locations
  Clone ID: PAT_MRT4530_78611C.1.pep
MGFISGIDDFVFPPGQAFRFGSLDFITNDFGKISLLDSDSNQSGRGQVSAPFGIPNSAEIYSRIISTKSASNHSDEIQSTPTQPDQDDGAYPLILMKLPDDLAVVFTTRASAPRRPRRDPASAPIQPSSREVGVILQPLGTVSTEELDGYLSSPGVDSRPTEIVEYDDFGYHYDYRNLDNFDEGNEDNYTPLFFGVFMADNETEEQRQAREAEEQREEKRQAQERERLQREQQERERAAKEAEDRRQRALEAGQRARELIGQQDVEGTAVFRTPQQNAVAAITLLDTLLKEVALNQANHLVNILNQTKTMIAASVPVNSASVRTPTGSRVPPLRSQDYHQPSLSVVGAGSSRRSRDHGERSVYSPPNRHREHRAEHPRSPCRRLLVDLRETINQRHAARSYIPHHSPDCYEDDEDGVAAFTSDLRLVDWLAGFKPTGIEKYDGTRNPESXLTVYGLAIRAAGGDSKAMANYLPVALTDSARSCLHGLPRGTIGSCAELRDHFIANFXGTFECPGTXFGLYNVVQKSGESLRDYIRRFSEQRNKISDITDDVIIAAFTKFIWHELLVGKFGCKPPRTVKQMFEKANEYAKAEDAVTASKQLGTIWKPKKDTPTTGGSGSTNHKDRKRKPEELVATTTPSSRQRSRVNTFDKIMNSQCPHHPNSNHAAKDCFVYKQFAEQYAKNACKPADGDQSMSNKKDDEDDAPTGFQDSRKELNHIFGGPLAYESKRKQKLTEREINVVQPDTPQYLRWSETAIKFNRSDHPDRVVHPGRYHLVLDPVVRNVKLRRSLIDGGSALNILFAKTLDDMQIPHTELKPSNAPFLGVIPVLSSTPLGQITLPVTFGTRENFRTKNICFEVADFETAYIAILGRPTLAKFMAVPHYTYMMMKMPGPRGVISLRSDIKQAVTCGKKSCEMAQTREITLAREEIXLATSTESALITFLQNNKDIFAWKPSDMPGIPREVIEHSLHVKEDAKPIKQRLRRIAQDRKDAIKEELTKLLAAGFIKEVLHPDWLANPFLVRKKTGQWRMCVDYTDLNKSCPKDPFGLPRIDXIHLKESDCLKTSFITPFGAYCYITMPFGLKNAGATYQRMIQRCFSTQIGRNVEAYVDDVVIKTKQKDDLIADLEETFASIRTFRMKXNPKKCIFGVPSGKLLGFMVSHKGIQANPKKINAILNMKPPSSXKDVQKLTGCMXVLSQFVXRLGEWGMPFFKLLKKTDNFQWGPEAXKAFEDFKKLLTTPPVLASPHPQEPRLLYVSATSQVVSTVLVVEREEDGHVQKVQRPIYFISEVLADSKTRYPQVQKLLYDVLITVRKLSHYFQGHSVTVVTSFPLGNILHNREANERIAKWALELMSLDLSFKPRTSIKSQALADFVVEWTECQEDTPIEKMEYWTMHFDGSKRLSGTGAGVVLISPTGERLSYVLWIHFSASHNVALYEALLHGLRIAISLGIRRLIVRGDSQLVVNQVMKEWSCLDNNIIAYRQEVCKLEDKFDGLELTHVLRHNNEAADRLANFGSKXEAAPSDVFVEHLYEPTVPRKEATEATDTQEVTMIESDWKEPLIKFLTKQELPQDKDEAERISRRSKLYVIHESELYKKSPSGILQRCVSLEEGRQLLRDIHSGICGNHAAARTIVGXAYRQGFFXPTAVSXADKIVRTCEGCQFFARQTHLPAQELQTIQLSXPFAVWGLDMVGPFKKATGGYTHLFVAVDRFSKWIEAKPVVTITADXGINIVHRFGIPNRIITDNGPQFTGGVFKDFCEDFGIKICYASVAHPMSNGQVERANGMVLQGIKARVFDRLHPYASKWVDQLPSVLWSLRTTPSQATGQSPFFLVYGAEAMLPSEVEFESLRFRNFKEERYGEDRVDDLNRLEEAREAALIQSARYLQGMRRYHNRNVXSRAFLVRDLVLRKTQTTXDRYKLSPLWEGPFIISEVTRPGSYRLKREDGTHVDNSWNIEHLRRFYA

SEQ ID NO: 181328 - protein, 123 aa, Oryza sativa
  Clone ID: PAT_MRT4530_78612C.1.pep
MTTPCLSTGTTPDLRVASPLLCPSLHARLRPHAPSSTLVLHSAALAAPRKDCSHSAKMGRSSSPAVRSRTATYGKAPRMRTTIGKPHMFPIHALENGDERSAMASATAELVLPSPQRSGCSCS

SEQ ID NO: 181329 - protein, 924 aa, Oryza sativa
  Clone ID: PAT_MRT4530_78613C.1.pep
MGNRGRWSGVEGSRWAAGLAPPPCAGSSNGDVSALGRGRVNLDFITNDFGKISLLESDPNQSGENQVSAPFGIPNSAKICSKLISIESVSNHSDEIQSTSTSPDQDDGAYSPILMKLPDDLAAVFTTRASSPRRPRRKSTSTPISPSFREVGVILQPLGTISMDQLEGYLSSPGVDSRPTEIVEYDEFGYCYDDRDLDDFDESFEDNYTPLYVGVFMANNETEEQRQAREAEAQRRRARDLIGQQDVEGTAVFRTPQQNAVAAITLLDTLLKEDALNQADHVVNILNQTKTMIAASVPVNSGSVRTPTGSQVPHLRSHDYHPPSLSIVGVGSSRRSRGHDERSIHSPPERHRERRVERPRSPPRQRPVDLRDTINQRRAARGHRHSPDRYDDDVDGVAAFTNDLRQVDWPAGFKPTGIEKYDGTTNPESWLTVYGLAIRTAGGDSKAMANYLPVALADSARSWLHGLPRGTIGSWAELRDHFIANFQGTFERPGTQFDLYNVVQKSEESLRDYIRRFSEQRNKISDITDDVIIAAFTKGIRHEDLVGKFGRKPPKMVKQMFEKANEYAKAEDAIIASKQSGTTWKPKKDTPAAGERASNNHKDRKRKPEELVATTTPSSRQRSRVNTFDKIMNSQCPHHPNSNHVAKDCFVYKQFVEQYAKNTRKPSDGDQGTSKKKDDEDDAPTGFQDSLVRNVKLRRTLIDGGNALNILFAKTLDNIQIPRTELQPSNAPFHGVIPGLSATPLGQITLPVTFGTRENFRTENICFEVADFETAYHAILGRPALAKFMAVPHYTYMMMKMPGPREVISLRSDIKQAVTCDKKSCEIAQTREITLAREEIRLAATMASKGEVPATKMPKSGESDAKTKKIPLDPSDPSKTAVIGAEKDAIKEELTKLLAAGFIKEVLHPDWLANPVLVRKKTGQ

SEQ ID NO: 181330 - protein, 126 aa, Oryza sativa
  Clone ID: PAT_MRT4530_78614C.1.pep
IFEFTTFLNSDCWGSSHVGTEEGEIVILRINHSQQERRRHKLIGRNTWKTRPASRELPFLSENLELDRRLRGDSPDHLGSTASKVQGRHAQSGERRRSPHERTDYEEGGGERYGTLSKDCSRSSLV

SEQ ID NO: 181331 - protein, 297 aa, Oryza sativa
  Clone ID: PAT_MRT4530_78615C.1.pep
MAHQAFWFGSLDFITNDFGKISLLDSDSNQSGRGQISAPFGIPNLAEIYPKIISPELASNHSDEIQSTLTRPDQDDGAYPPILMKLPDDLAAVFTTRASSPRRTRPDPASAPIQPSSREVGIILHPLGTVSTEQLDGYLSSPGVDSRPTEIIEYDYFGYRYDYRNLDDFDEDFEDNYTPLYFGIFMADNEMEEQRKAREVEEQRVQQEAERRRLEEERQAQERERLQREQQERERAAKEAEDRRQHALDARRLARELIGQQDVEGTTVFRTPQKNAVAAITLLDTLLKEDALNQANH

SEQ ID NO: 181332 - protein, 136 aa, Oryza sativa
  unsure (1)..(136): unsure at all Xaa locations
  Clone ID: PAT_MRT4530_78616C.1.pep
MATDEEMESGGSAGEXSAKDYTDPPSAPLSDAENLGPWSLNRAVITQFIASLLVLYITAITLIGFKHQTDASDSGADTTSCVMSVLSICMSXGAPTTMLGLLHTHSLCGGHIYPRSTLGLLLTRKLSMTTAILYIW

SEQ ID NO: 181333 - protein, 998 aa, Oryza sativa
  Clone ID: PAT_MRT4530_78617C.1.pep
MARGSALLDGSVLPPSRIVSERHAGLPRRFMPESATGREIVMLGEGRPAPDYPGRSVFFLPFAMAGLVPPFSSFFMDVLDFYDLQMAHLTPNAVMTLAIFTHLCEMFIGVRPSLRLFRWFFTVQSVSPPSVVGGCYFQPRGPVLNRYIPCALRKKWDDWKSDWFYTPLANEARLRLPSQPPAQVSSWRAPVDLGDDYDAVLDRLAGLRSQGLTGAMVYGDYLRRRIAPLQRRARGAWEYTGSEDYMRTHQGVRWDWAPEDFKIVVQRVLNLSSVETSLIPQGILPLCSDPDRASILTIMMGVGASEEETPKGHDGAGESRRGEQSTPGGGRASGPRVGGSGSSRPADAQGKRKLGGTPPPSPPRGGGAVRASSRHPEGAAPTSQPEGERKKKRLRKMGETEPSRGNLISPPRWSFNRPPRSDVPSRSSRHPKSGQSEAEDPGAVEERRRESDRREAADRLREAEEAAREAAREEAARARQAEEAAKEEAARARQAEAMASSEAAHDKAAGAASSGGPSRVAFSPRRLFSSSSVAPLSAEPLLQALAAANTAVLDGFSAQVEALRAERAELEAAWARVEEGRRSVDVMVEVGRKAHRRHVSELEARKAALAEIAREVDEEREVALIATTAMIEAQDTLRLQHGSWEAELKKKLDAAQGVLDTAAARERRATEIEAASRRREEALEARAMALEEHAGAVERGLADREAAAAIREATLAVHEAACAEEESALRLREDALAERERALEEAEAAAQRLADSLSLREAALAEQARRNLESIRAERAALEQRAANLEAREKELDARAHISGAAAGESDLAARLAAAELTIADMQCALDSSAGEAEALRLAGEIGPGMLWDAVSRLDRAGRQAGLWKGQTRTHSTNLEGLAPHLTKMAWALQQLPEELEKTIKSSSRDLAQGAVELVLASYQARDPNFSPWMALEEFPPGTEDDARARVRDAADHIVHSFEGSAPRLAFAPNSDEEGDASGADDRDDEAGDPGASD

SEQ ID NO: 181334 - protein, 75 aa, Oryza sativa
  Clone ID: PAT_MRT4530_78618C.1.pep
SKEHYSRGKNDSFLPFIILGKILGGGGIWPHRILSLGRGETKTPCWAVSMRPRGHTVGYRTEQAWGFWFLKEGVY

SEQ ID NO: 181335 - protein, 177 aa, Oryza sativa
  unsure (1)..(177): unsure at all Xaa locations
  Clone ID: PAT_MRT4530_78619C.1.pep
EIPSRPPRHSKSGRSEAEETVTAEARRREADRREATDRLREAEEAAQEAVRAVCQAPDPTPAEVTTTSEATHDEAAGAPIGPDPSGDAWDKPAPGDAPESGTSISGPSRAAPTPRRLSPLASAAPPSAEPLLAALAATNTTVLDGLSAQMEVLQAERAELDAAWARVXEGRRSVEAM

SEQ ID NO: 181336 - protein, 76 aa, Oryza sativa
  unsure (1)..(76): unsure at all Xaa locations
  Clone ID: PAT_MRT4530_7861C.1.pep
FCLQKVQMSLTYYNHTDKKDLLILSNQINLKSXITGNALKHQQNQLTLQHCKQDRERVDIEILTFPXXXEXDSATL

SEQ ID NO: 181337 - protein, 115 aa, Oryza sativa
  unsure (1)..(115): unsure at all Xaa locations
  Clone ID: PAT_MRT4530_78620C.1.pep
MPRFVHRHLSSNSGGLPFFSGTGDTPTPAEGWPWRGKDWRWPVDSGGRRGGGSAAEAAGMXEAAAGYGEDGGAGAPRRRRHEKXEGEGGRGLAGAVDLFRPAXEASGGTVGRWRW

SEQ ID NO: 181338 - protein, 913 aa, Oryza sativa
  Clone ID: PAT_MRT4530_78621C.1.pep
MARGSAPLDGSVLPPSRIVSERQAGLPRRFMPESATGREVVELGEGRPVPHYPGRSVFFLSFAMAGLVPPFSNFFMDVLEFYDLQMAHLTPNAIMTLAIFAHLCEMFIGVRPSLRLFQWFFTVQLVSPPTVVGGCYFQPRGQVLHRYIPCVLRKKWDDWKSDWFYTPLADEARLRLPSQPPAQASSWRATVDLGDGYDAVLDRLAGLRSQGLTGAMVFGDYLRRQIAPLQRRARGAWEYTGPEDYMRTHQGRKWDWVPEDFRMVVQRVLNLSSVEASLIPQGVLPLCSDPDRANILTIMQAVGASGERPPRGHDGVGGSRRGKQSTLGGGHASGPRDGGPGGSRPADARGKRKQEGTTPPSPPREGEAVRASSRRPEGAVPTPQPEGERKKKRLRKMGGTEPCRGNLISLPRWSFSRPPRSEIPSPPPPRHSKSGRSEAEETAIAEARRREADRREAADRLREAEEAAQEAVRVRQAEEAAREEARLRRAGESVREEETARARQAACQAPDPTPPEATTTSEATHDEAADAPLGPDPSGDAWDEPASGDTPGSGTSIGGPSRAAPTPRRLSPLPSVAPLSAEPLLQALAAANTTVLDGLSAQMEALQAERAELDAAWARVEEGRRSVEAMVEAGRKAHRRHASELKARRRDLAEIAREVEEERETALIAIAVLDEVRDDLRLQYGSRAAELEKKLDAARGVLDAAAARERRAAEIEAASRQREEALEARATALEKRARALDTKEKDLADREAAVATREATLAAHEAACAEEESALRLREDALTERERALEEAEAAAQWLADSLFLREAAREEQARRNLEGAHAERAALDQRAAELEARAKELDARAHSGGAAAGDGDLAARLAAAEHTIAGLQGALDSSAREVEALRLVSEVGPGMLRDAVSRLDRAGRQAGL

SEQ ID NO: 181339 - protein, 337 aa, Oryza sativa
  Clone ID: PAT_MRT4530_78622C.1.pep
GTEAACAGSGGVVVLAPRLWGSSRLEVRRGNDSRARDGERSGLAAWAEERREQACGGSARVAGGEVTSAGAVRTAGEMPRASAYLEESIEGGGRAESDMWARGALADAGGRPGPGEEKVYKQAIKHKDYTMSSVPRKLMKNKKRENTEKEGGGPSTGAQDNLLSHHRIGLARPNTVSPPRTAREENVARAWGDVAPSDWRTRHLPLAGGPTRMQEKGGAVAIAQASVGLLEEIKPMVVELAGWKPTIDKAVVELREDIGDLRHQVNQLSKQQASAIKPAERPPLLPTSPGSRPLPKEEETCPSHGDMGHGPLGHRAGISLRGKAIGKNTSPLSLPGK

SEQ ID NO: 181340 - protein, 819 aa, Oryza sativa
  Clone ID: PAT_MRT4530_78623C.1.pep
MARGSALLDGSVLPPSRIVSERQAGLSRRFMPESATGREIVTLGEGRPAPDYPGRSVFFLPFAMVGLVPPFSSFFMDVLEFYDLQMAHLTPNAVMTLAIFAHLCEMFIGVRPSLRLFRWFFTVQSVSPPSVVGGCYFQPRGPVLNRYIPCALRKKWDDWKSDWFYTPLADEARLRLPSQPPAQASSWRAPGLTGAMVYGDYLRRRIAPLQRRARGAWEYTGSEDFTRTHQGVRWDWAPKDFKILVQRVLNLNSVEAALIPQGILPLCSDPDRASILTIMMAVGASEERAPKGHDGAGGSRRGEQSTPRGGRASGSRDRGPGSSRPADARGKRKQGGTPPPSPPRGGGAARASNRRPEGAAPTSQPEGERKKKRPRDTQATTSGAAGDEAAGASLGPTPSGDAQDQPGPGDIPESGTSIGGPSRVASSPRRLFPTPSIALLNAEPLLQALAAANTTVLDGLSAQVEVLQAERAELDAAWARVEEGRRSVEAMVEVGRKAHRRHVSELETRKKVLAEIAKEVEEERGAALIATTVMNEAQDTLRLQYGSWEAELGKKLDRRPGERACVVERDLADREAAVTIREATLAAHEAACAEEEFTLRLREDALTERERALEGAEAVAQQLAVNLSLREAAQEEQARRNLEGACAERAVLNQRAAELEARANELDARARSGGAATGESDLAACLAAAERTIADLQGALDSSAGEVEALRLAGEVGPGMLWDAVSRLDCAGRQVGLWRGRTVKYAANQGGLAQRLSKMAGALQRLPEELEKTIKSSSRDLAQGAVELVLASYQARDPNFSPWMALDEFPPGTEDRARA

SEQ ID NO: 181341 - protein, 369 aa, Oryza sativa
  Clone ID: PAT_MRT4530_78624C.1.pep
MVPWRRSSSSSSAPSSRPARRPARTNARVSPDVSSELSPLAGEEGAGEERWSALVPDLLADILRCVEAGSERWPPRRDVVACASVCRRWRDVAVAVVQPPLESGKITFPSSLKQPGPRDAPMQCFIKRNKKNSTFFLYLGLTQAELTDDEKFLLAARRCRRGLHKEYAITINSDGLFHGSQSCVGNLKSNFTGTKFTIRDWQPPYEGAKAFSSRSGRWFGNKHRCPLVSTGDVEVGEVSYKYSLLRPRGPRRMSCSVQCPVLKGTAVDPQDGKRLSNSIPSSLVLNSKVPSWHEHLQCWCLNFHGRVMVASVKNFQLIAPVEPGEPSDKTVVLQFGKIDDDVFTMDYRQPLSAFQAFAICLSNFGTKLA

SEQ ID NO: 181342 - protein, 64 aa, Oryza sativa
  Clone ID: PAT_MRT4530_78625C.1.pep
LRRWSAFYLRGRFVLLRNHETRCCNRRYHHAGGSWGAQTNAWCRSRASDVVMEDGLPVHRCEGR

SEQ ID NO: 181343 - protein, 1839 aa, Oryza sativa
  Clone ID: PAT_MRT4530_78626C.1.pep
MGFVSGIDDFAFPPGHAFQFGSLNFITNDFGKISLLDSDLNQSGRDQVPVPFGIPNSAEAYSKIISPESASNHSDEIQSTLPRPDQDDGSYPPILMKLPDDLAVVFTVKTSSTRRSRRAPASAPIRSRSREVGVILQPLGTVSTEELDGYLSSPGVSSRPTEILDYDDFGYHYDHGDLDNFDDSYEDNYTPLYFGVFMADNETEEQRQAREADQDRARQEAERRQLEEERQRQERERLQREQQDHERIAKEAEDRRQHALESGRRARELIGQQDVDGTAVFRTPQQNAVAAITLLDTLLKEDALNQADHVVNILNQTKTMIAASVPANSTSTRTPTGSRVPHFRSHDYHQPSLSIIGTGSSRRSRGHDERSVHSPPERHRESRVERPRSPPHRRPVDLRDTINQRRAARSHRHSPDRYDDDVDGVAAFTNDLRRVDWPAGFKPTGIEKYDGTTNPESWLTVYGLAIRAAGGDSKAMANYLPVALADSARSWLHGLPCGTIGSWAELRDHFIANFQGTFERPGTQFDLYNVVQKSGESLRDYIRRFSEQRNKISDITDDVIIAAFTKGIRHDDLVGKFGRKPPRMVKQMFEKANEYAKAEDAITASKQSGTTWKPKKDTPTVGGSGSNNHKDCKRKPEELVATTSPSSRQHSRVNIFDKIMNSQCPHHPNSNHVAKDCFVYKQFAEQYVKNARKPADGDQGTSKKKDDEDDAPTGFQDHRKELNHIFGGPLAYESKRKQKLTEREINAVQPNTPQYLRCALNILFAKTLDDMQIPRTELKLSNAPFHGVIPGLSATPLGQITLPVTFGTRENFRTENVCFEVADFETAYHAILGRPALAKFMAVPHYTYMMMKMPGPRGVISLRSDIKQAVTCDKESCEMAQTHETTLAREEIRLAATTASEGEVPATKLTKTKESGAKMKKIPLDPSDPDKTANNKDIFAWKPSDMPGIPREVIEHSLHVKEDAKPIKQRLRRFAQDRKDAIKEELTKLLAAGFIKEVLHPDWLANPVLVRKKTGQWRMCVDYTDLNKSCPKDPFGLPRIDQVVDSTAGCELLSFLDCYSGYHQIRLKESDCLKTSFITPFGAYCYITMPFGLKNAGATYQRMIQRCFSTQIGRNVEAYVDDVVVKTKRKDDLIADLEETFTSIRAFKMKLNPEKSIFGVPSGKLLRFMVSQRGIQANPEKINAILNMKPPSSQKDVQKLTGCMAALSRFVSRLGERGMPFFKLLKKTDNFQWGPEAQKAFEDFKKLLTTPPVLASPHPQEPLLLYVSATSQVVSTVLVVEREEEGHIQKVQRPIYFISEVLADSKTRKLSHYFQSHSVTVVTSFPLGDILHNREANGRIAKWALELMSLDISFKPRTSIKSQALADFLAEWTECQEDMPEEKMEYWTMYFDGSKRLTGTGAGVVLISPTGERLSYVLWIYFSVSHNVAEYEALLHGLRIAISLDKNEAERISRRSRLYIIHETELYKKSPSGILQRCVSLEEGRQLLKDIHSGICGNHAAARTIVGKAYRQGFFWPTAVSDADKIVRTCEGCQFFARQTHLPAQELQTIPLSWPFAVWGLDMVGPFKRAVGGYTHLFMAIDKFSKWIEAKSVITITADKARYFFINIVHQFGVPNRIITDNGTQFTGEAFKDFCEDFGIKICYASVAHRMSNGQVERANGMILQGIKSRVFDRLRPYAGKWVDQLPSVLWSLRTTPSRATGQSPFFLVYGAEAMLPSEVEFESLRFRNFNEEGYEEGRVDDINRLEEAREAALIQSTRYLQGLRRYHNWNVRSRAFLVGDLVLRKIQTTQDRHKLSPLWEGLFIIAEVTRPGSYRLKSEDGTIINNSWNIEHLRRFYA

SEQ ID NO: 181344 - protein, 72 aa, Oryza sativa
  Clone ID: PAT_MRT4530_78627C.1.pep
IDDWRPWYAAGQVAGFTRSYANNNLIYATVKGAGHTAPEYKPKECLEILGFTAMPVTVVPSSVMGFSCGPTQ

SEQ ID NO: 181345 - protein, 52 aa, Oryza sativa
  Clone ID: PAT_MRT4530_78628C.1.pep
ASLDCRSGNLNHFLQKLSQDLQQLRLLLVPYHGTTPLQNQHYLAPEGSLLFS

SEQ ID NO: 181346 - protein, 42 aa, Oryza sativa
  unsure (1)..(42): unsure at all Xaa locations
  Clone ID: PAT_MRT4530_78629C.1.pep
CPRLRSCVRPRLWPMRMIKVXTLITRGRMMTEITYYKVVRVR

SEQ ID NO: 181347 - protein, 2055 aa, Oryza sativa
  unsure (1)..(2055): unsure at all Xaa locations
  Clone ID: PAT_MRT4530_7862C.1.pep
GLLSPSSTWKPPDLRYKRDPPGRTXGIESQSQHNPHSLRNYCTNVPQYPLYPVYGYHPSTVARXVGGLGTQGSTTMSSSLVDNSVNTNLSQVFPASTMLVXTQVGEIVFPVYTTTPISTGPSMTGNENAVATNQGDSMSKNPPAEAENGASTTSELEKDSNAAKPCRSDMNREPTKMTSEATRSWCPIHKTRKHTLQACWVFLNVRAEIRACKERGIQRISPTRDVYCPIHKTKNHDLSSCKVFSSAMEAPSPKVQQAHIPIRDKDKERGAMPTSDRFVGVINIDPHELSVLHLLEDYGSSTTSAPREVLAIDDVGISACTNAETENQLTTPAQHIRAVNAIMRETPYGPVLNDDLARWTEXLRESVTNLSNAFEEAAAAAHPEQPPTGDANGENPEXRESPQRATPQPRGTGDLRDHINGRREARRTRDNENRSRRHVSSRRHDNGDNRHNHHDHNDHKRRVLDDTGXGRRHNDDYDGDRHQDNSGRRRQDSRDPGRHPRNRTPEPSDPSSSSSSSSSSSSDRHPRRTHDRRQPTAPSAGCRAFSRSLHDVRWPERFRPRAIEKYDGSTDPEEFLQVYSTVLYAAGADDNALANYLPTALKGSARSWLMHLPPYSISSWADLWXQFVANFQGTYKRHAIEDDLHALTQNPGESLRKYIRRFNECRNTILEITDAFVIRAFKSGVRDRYTTQELATRRITTTRRLFEIVERCAHADDALRRKNDKPKTEGEKKPATDAPESSKKKNRKNGKRKAQAEVLAAEYANPPKRPDPQSSNTKKAWCPIHKTNRHSLEDCLVFKKSLEKHIASEKGKRVRVVEKDAEAAPXESDSAYPDSDLHVSHITAVIPGRYPIVVEPTIRNIKVARVLIDGGSSINLLFASTLDAMGIPQSKLTPTDQPFHGITPQSSSRPLGKITLPVTFGQANNFRTEQITFDVAEFDTAYNAIIGRTALAKFMAASHYAYQVLKMPGPKRIITIQGNAKLEVQCDKRSLDMVKQTPSPPATTEPPKKVSKTNKTPKPDGAIKIVPLSSANPDKTELALITFLRDNADVFAWXPSDMPGVPREVIEHKLMVQPDAKPVKQRLRRFAPDRKQAIREVLHPEWLANPVMVRKANGKWRMYVDFTDLNKACPKDHFPLPRIDQLVDSIAVCELLSFLDAYSGYYQISMAKEDEEKTSFIMPFGVFCYVKMPFGLITAGNTFQRTVQGALSDQLGNNVEAYVDDIVVKTKTCDSLIDDLWETFDNLRRYRLMLNPEKCTFGVPSGKLLGFLVSGRGIEANPEKIKAIENMKSPTRLKEVQKLTGCMAALSRFVASMGERGQPFFALLKKQDKFVWTQEAEEAFVALKRYLSXPPVLVAPQPNEELFLYIAATPYSVSTIIVVEREKVQRPIYYISEALHDAKTRYPQIQKLIYAVIMTSRKLRHYFQAHRVTVVSSFPLGEVVRNKDVVGRIAKWVFELSQFDVHFAPRTAIKSQVLADFVADWTMPDNKSDNQVDNETWTMAFDGALNSQGAGAGFILMSPSGDQFKHAIHLNFRATNNTAEYEGLLAGIRAAAALGVKRLIVKGDSELVANQVHKDYKCSNPELSKYLAEVRKLEKRFDGIEVRHVYRKDNIEPDDLARRASRREPLKPGTFLDILTKPSVKEVSGEVSPDTPDISSEATKAERAVADIETXDDWRIPLIKFINSEELPEDDTEAEKITRKAKIYCMVGDDLYKKAPNGVLLKCVSSNDGRHLLLDIHEGICGSHAAGRTLVRKAFRQGFFWPTALKDACDMXTHKATRASAPDYPSYLAVLVLGARYTRAIPTRTERLQVPIXVAIDKFTKWIEAVPTGEIKADNAIKFIKGIFCRYGLPHRIITDNGSQFISADFQDYCIGLGVKICFASVSHPQSNGQVERANGIVLQGIKTLLWAICTTPTTSNQETPFFLVYGSEAMLPSELRHQSTRVQKHSDEDQEEQRNIDVNLLEEHRERVAIRAASYQXALRRYHEKRIRARILSIGDYVLRWVQSQAWRNKLSPKWEGPYTITQVLRPGAFKIVDGEGRELANSWNIDQLRKFCV

SEQ ID NO: 181348 - protein, 121 aa, Oryza sativa
  unsure (1)..(121): unsure at all Xaa locations
  Clone ID: PAT_MRT4530_78630C.1.pep
IVIRLTIGRIGYRAPPRVFFFFFYKIXILPXIXTXXXITSQCXKXGXIXXXXXILFXSPLXXTSRFRTQSIXXCTXVVEXXXSVXXXXXXXRXXXVGPXPXISXXPXXXDNWVXXXHXXFP

SEQ ID NO: 181349 - protein, 142 aa, Oryza sativa
  unsure (1)..(142): unsure at all Xaa locations
  Clone ID: PAT_MRT4530_78631C.1.pep
MEKSQRKRGPDHLLILVHGIIASPSDWTYGEAVLKKRLGDNFFIYAMKDASQSAACIAPTTGGSEKLECTSGLGAIAGLEPINFITLATPHLGVRGKNQLPFLQGLSILEKIAAPLAPLXVGRTGAQLFLTDGEPSKPPLLL

SEQ ID NO: 181350 - protein, 191 aa, Oryza sativa
  Clone ID: PAT_MRT4530_78632C.1.pep
MTSARRPARDRDLAGARDFGGGNGDHLRVEGNETNPDGGAPVVDGGNGGAAELLLLTAHLTVMAATDGDDGDGGATMPKMTGGGGGLGERRDGARRHGRTRERGQTKEEITGKEEETERNKTPQSIGEDGVGFGRIWGGKRRLGFGSAAPGRRLTKGLTANESSIRRSGVGNIGENERLATCASAGHIHVG

SEQ ID NO: 181351 - protein, 71 aa, Oryza sativa
  Clone ID: PAT_MRT4530_78633C.1.pep
PSLSNGNLSDLLMVASAIVFSLCKIEPRFAEAYCPRVNLAELQTFFMKAHILQNPLCWPLPYFFAVCFVFL

SEQ ID NO: 181352 - protein, 205 aa, Oryza sativa
  Clone ID: PAT_MRT4530_78634C.1.pep
MLAQHPLMFTSSLYRCRCLLSSALLPNTDLVLRLHLNPCHNDDAHFVAGDTGGEARREERRRRRGFLTSALSLFPPSHSAELPVADTNTVDAAINPLSCCSRRSAEFSLLLLSPSQSTSSIKREERGAEELTNEERGGRGEGQSIDRIEGEPGNNGNAQREGFDHLEVVLEATCSGGRATTPHPSMLQLSVDSSFAAAATTPEKR

SEQ ID NO: 181353 - protein, 455 aa, Oryza sativa
  unsure (1)..(455): unsure at all Xaa locations
  Clone ID: PAT_MRT4530_78635C.1.pep
MASTLSSPCHHHLSSYYSHQLRRLRLRLRPSTAASGRPSELDSGRELYSHPTFGGSRSRVSRSSFMEKSQRKRGPDHLLILVHGIIASPSDWTYGEAVLKKRLGDNFFIYGSYIGLHFANENNSFLAIKLTVNYIIAASSSNIYTKTFDGIDVAGRRLANEVLDVIQKMAGLRKISFLAHSLGGLFARYAISILYSTAMKDASQSAACIAPTTGGSEKLECTSGLGAIAGLEPINFITLATPHLGVRGKNQLPFLQGLSILEKIAAPLAPLVVGRTGAQLFLTDGEPSKPPLLLEMASDHEDKKFXMVGWRTSSIRREKDLXKVIFFLLHMQPSHRSLDGYKHIVNMEYCSPISSDGPHFPLQAARAKEAAQSRPNKENTEEYHEMMEEEMIHGLQRVGWKKVDVNFHTALWPYFAHNNIHVKNEWLHNAGAGVIAHVADSIKQQESRKYFRANL

SEQ ID NO: 181354 - protein, 62 aa, Oryza sativa
  Clone ID: PAT_MRT4530_78636C.1.pep
AISLIGNTVIVGVFYFLGFAMFCLESLLSMWVIQRVYLYFRGSGKEAEMKREAARSAARAAF

SEQ ID NO: 181355 - protein, 1103 aa, Oryza sativa
  unsure (1)..(1103): unsure at all Xaa locations
  Clone ID: PAT_MRT4530_78637C.1.pep
MAGGSSPSPAAAPIQVRCAGCRGVLAVGPGMTEFICPKCGMAQRLPPQLMPKPPPSSSSSAAATPAPPAPAAPPPPTSRRGGGGGAALPPPQAQGVDPTKIQLPCANCQAVLNVPHGLARFRCPQCGVELAVDLAKLHNFLASSNNNAAAAPPDNVPPASGPASRAPLVPAPPPAPFPPVPTPGMTQAPQMVPGALIPMVLPITDPPEEINEVAIDVEREEDEGGTVGETFTDYRPPKLSLGLPHPDPIVETSSLSAVQPPEPTYSLNIMDELDETKALSCLQIETLVYACQRHLYHLPTGDRAGFFIGDGAGVGKGRTIAGLIWENWQQGKHKAVWVSIGSDLKYDARRDLDDVGAKCVQVHPLNKLPYSKLDSKAIGIKNGCHKAKNLIPDAGSQPTRTGSLEKGGVGALELVAMDMKARGMYVCRTLSYKGVDFDIVEAPLEERMMNMYRKAAEFWAEFRLELLSAGESFTEGISNQIWRLYWASHQRFFRHMCMSAKVPAVVKLAKEALAENKCVVVGLQSTGEARTEEAITKYGVEMEDFVSGPRELLLKLVEENYPLPPKPDSFQQGEEKVTEIHRKRHSAPDVSFKGRVRKVAKLVEVSDDDSDDYSPSESDHGSTESDEEFHMCQICNTEEEKTLLLHCSGCSRHVHPGCLTPPWTGVLTDDWSCYTCKKLEGEENEQDAHVADFSQRYDAAVEKKKKILDMIRSLDLPNNPLDDIIDQLGGPDNVAEITGRRGMLIRASDGKGVVYQARNAKEVSMEMINMHEKQQFMDGKKLISIISEAGSAGVSLHADRRAKNQRRRVHITLELPWSADRAIQQFGRTHRSNQTSAPQYRLLFTNLGGEKRFASIVAKRLESLGALTQGDRRAGPSLSAFNYDSNYGKKALTIMYRGIMEQSYFQDDQDSFPVVPPGCSDNQSSIQEFIAEAKAALVSVGIIRDAVVCNGKVAGKLSGRIVDSDMHDVARFLNRLLGLAPKIQNRXVHIDSLSGASTVLFTFTIDRGVTWEXKDGAGSSNDGFYESKREWMGGRHFILAFEGSIEGMYKIIRPAIGEALREMPLTELKSKYRKVSSIEKVNKGWQDEYDASSKQILKRIRIS

SEQ ID NO: 181356 - protein, 56 aa, Oryza sativa
  Clone ID: PAT_MRT4530_78638C.1.pep
IVNAPACLQYEHIESPSSVIAHACVSVTESISVRVCLCQPCVHQVSKVPAGKPCGF

SEQ ID NO: 181357 - protein, 118 aa, Oryza sativa
  Clone ID: PAT_MRT4530_78639C.1.pep
VSFPNYFHPSSPPLVSLSPFLLLLLSSPRAEPVRRRRRCGASAAEKGRRRQGGQSASGNCGSGVDGGGAVESARRRWEGGGERGDRSAGAVCAAEMGRAWRGRRSAGGNGAGGGGRRQ

SEQ ID NO: 181358 - protein, 1512 aa, Oryza sativa
  Clone ID: PAT_MRT4530_7863C.1.pep
MPISDRFVGIIDIDPHEPSVLHLLEDYGSSTMSTPREVLAIDDVGTSARTGAEAENQVTTPAQLIRAVNAILRETPYDHVLNDDLARWTKRLRESVTNLSNAFEETAAAAHPEQPPTGDANGENPEQRESPHRATPPPRGTGDLRDHLNGRREARRTRDNENHSRCHISSRRHNNEDRGGRSSEDRDRDNRHNRHDHDDRERRVLGDTDRHPRRTYDRRQLTAPSAGCRSFGRSLRDVRWPERFRPVAIEKYDGSTDPEEFLQVYSTANLWQQFVANFQGTYKRHAIEDDLHALTQNPGESLRDYVRHFNECRNTIPEITDASVIRAFKSGVRDRYTTQELTTRRITTTRRLFEIVDQCAHADDALRRKNDKPKTGVEKKPAKDALESNKKKNRKSGKRKAKSEILATEYADPPKRPDPQGSDTKKAWCSIHKTDRHSLEDCLVFKKWLAKHMASEKGKRVRVVEKDAEAPTQELDSAYPDSDVHVSHIFGGSTAYSSKREYKKVERRYPIVVEPTIRNIKVARVLIDGGSSINLLFASALDAMGIPRSELTPTDQPFHGITPQSSSKPLGKITLPVTFGQANNFRTEQITFDVAEFDTAYNAIIGRTALAKFMAASHYAYQVLKMPGPKGTITIQGNAKLAVQCDKRSLDMVEHTPSPPATIEPPKKPSDMPGVLREVIEHKLMVRPDAKPVKQKLRRFAPDRKQAIREELDKLLKAGFIREVLHPEWLANPVMVRKANGKWRMCVDFTDLNKACPKDHFPLPQIDQLVDSTAGCELLSFLDAYSEKCTFGVPLGKLLGFLVSGRGIEANREKIKAIENMKSPTRLKEVQKLTGCMAALNRFVVRMGERGQPFFALLKKQDKFVWTQEAEEAFIALKRYLSNPPVLVAPQRNEELFLYIAAMPYSVSTVIVVEREKVQRPVYYVSEALHDAKTRYPQIQKLLYAVIMTSRKLHHYFQAHRVTVVSSFSLSKVVRNKDVVGRIAKWVVELSQFDIHFVPRTAIKSQPNMKDYLGVRRLIVKGDSELVANQVHKDYKCSNPELSKYLAEVRKLEKRFDGIEVRHVYRKDNIEPDDLARRASRREPLEPGTFLDVLTRPSVKEARGEDSPVTPDTSSGAIEAERAVADIETTDDWRTPLIKFISSEELPEDDAEAEKISRKAKVYCMIGNDLYKKAPNGVLLKCVSSDDGRHLLLDIHEGICGSHAVGQTLVGRAFRQGFFWPTALKDACDMCWGLDILGPFPRGQGSYRFLFVAIDKFTKWIEATPTGEIKADNAIKFIKGIFCRFGLPHRIITDNGSQFISADFQDYCIRLGVKICFASVSHPQSNGQVERENGIVLQGLKTRVYDRLMSHDKKWVEEIPSVLWAVRTTPTTSNKETRFFLMYGSEAMLPTELRHQSTRVHKYSDEDQEEQRNDDVNLLEEHRERVAIRAASYQHALRHYHEKRIRARTLSIGDYVLRRVQSQAGRNKLSPKWEGPYTITQVLWPGAFKIADGDGHELANSWNIDQLRKFYV

SEQ ID NO: 181359 - protein, 152 aa, Oryza sativa
  Clone ID: PAT_MRT4530_78640C.1.pep
TLSFATNMAKHSLCMQVVNNSDQDYSHLPELDLSVMLNQGTLHQSQDQLLINHTSPVRSPSDCGVRYHRCLWSRGLRTMVETSTDLEGTLDQVSGIFSLWVDRAKWTVQGGTTIGKDPTVVETLRNECKKGITCMLEEILAGQAEVEFFCRQ

SEQ ID NO: 181360 - protein, 363 aa, Oryza sativa
  Clone ID: PAT_MRT4530_78641C.1.pep
MGSLAAEKTVTGWAARDASGHLTPYNYTLRKTGPEDVVVKVLYCGICHTDIHQAKNHLGASKYPMVPGHEVVGEVVEVGPEVTKYSAGDVVGVGVIVGCCRECHPCKANVEQYCNKRIWSYNDVYTDGRPTQGGFASAMVVDQKFVVKIPAGLAPEQAAPLLCAGLTVYSPLKHFGLMSPGLRGGVLGLGGVGHMGVKVAKSMGHHVTVISSSARKRGEAMDDLGADAYLVSSDAAAMAAAGDSLDYIIDTVPVHHPLEPYLALLKLDGKLILMGVINQPLSFISPMVMLGRKAITGSFIGSMAETEEVLNFCVDKGLTSQIEVVKMDYVNQALERLERNDVRYRFVVDVAGSNIDDADAPPA

SEQ ID NO: 181361 - protein, 113 aa, Oryza sativa
  Clone ID: PAT_MRT4530_78642C.1.pep
MAGFVRSNPTLALEFFMRRIHCSGPNLMCAYYADAAEAVLTQQQIKQAAVRTIFPQSLAILFSNRLSNLPGPFHTSSSFFGGNKWSSRSVVSGPTNQLALHCCCAASPSSKPE

SEQ ID NO: 181362 - protein, 163 aa, Oryza sativa
  unsure (1)..(163): unsure at all Xaa locations
  Clone ID: PAT_MRT4530_78643C.1.pep
PTATQTHSPSPPPPPPTPSRAAALRLSSSRLRLGGYMGKKRGGHGHAPAAPPRAGNQAVSLREESSGKTRADAASLLRVQHLQRLAAWAGGEAGAGPLGALLGRRLAANAEAAGIPLAASTFLCQSQFKDLSGXFNCTIRIKNNTRNAKRRKMLNTCQNSISY

SEQ ID NO: 181363 - protein, 983 aa, Oryza sativa
  Clone ID: PAT_MRT4530_78644C.1.pep
MARGSVSLDGWVLPPSRIVSERQAGLPRRFMPESATGREIVSLVEGRPAPRYPRRAIFFLPFAMAGLGPPFSSFFMDVLEFYDLQMAHLTPNAVMTLAIFAHLCEMFIGERPSLRLFRRVFTVQPVSPPSVVGGCYFQPWGPVLNRYIPCVLRKKWDDWKSDWFYTPSPTKRASDFRASLQRRPPTGGRRSAEASLIPQGVLPLCSDPDRANILTIMMAVGASEERAPKGHDGASGSRKGDQSTPGGGRASGPRDGGSGGSRPADARGKRKQEGFSSPSPPRGGGVARVSSRRPEGAAPTPQPEGERKKKRLRKMGGTEPSRGNLISPPRWSFNRPPRSEIPSRPSCQSKSGQSEAENAATTEARRRESDRREAADRLREAEEAARGAARARQAEEAAREEARLRQAEATTSSEATRETDRQEAADRLREAEEAAQVAVRARQAEEAAREEARLRQAEAATTSEAARDEAAGASLGPTPSGDAQDKPGPGDIPESGTSIGGLSRAASSLRRLSPTPSAAPLSAEPLLQALAVANTTVLDGLSAQMEALQAERAELDAAWARVEEGRRSVEAMVEVGRKAHRRHASELEARRKVLGEIAREVEEERGAALIATTVMNKAQDDLRLQYGSWEAELGKKLDAARGVLDAAAARERRAAETEVASRRREEALEARAMALEERACVVERDLADRKAAVAIREVTLAAHEAACAEEESALRLCEDTLTERERALEEAEAAAQKLAESASLREAAQEEQARRNLEGARAERAALNQRAAELEALARELDARARSGGAATGDSDLAARLAAAEHTIADLQGALDSSTGEVEALRLAGEIGPSMLRDAVSRLDHAGRQAGLWGGRTAKYAANQGGLAQRLSEMAGTLQRLPEELERTIKSSSRDLARGAVELVLASYQARDPDFSPWTALDEFPPGTEDGACAQVWDAANHIVHSFEGSAPRLAFALNSDEEDDDGGVGDSGDEAGDPGASE

SEQ ID NO: 181364 - protein, 154 aa, Oryza sativa
  unsure (1)..(154): unsure at all Xaa locations
  Clone ID: PAT_MRT4530_78645C.1.pep
PSPRPPAPPPLPSAVVPPPPPSVAAPPPPPSATASPPPPSAAPPPPPPSAAAPPPPSAATPPPSPSAATPQPRCPXPGKSPPPTPKMSSVVVASTPTVLPXPKVQIPPPPPLSPLISPPSLISPPLCSSVAPPHTADHRGRPRCLAPPLCRQSE

SEQ ID NO: 181365 - protein, 1008 aa, Oryza sativa
  Clone ID: PAT_MRT4530_78646C.1.pep
MARGSAPLDGSVLPLSRIVSERQAGLPRRFLPESATGQEIVTLGEGRPAPRYPGRTVFFLPFAMAGLVPLFSSFFMDVLEFYDLQMAHLTPNAVMTLAIFAHLCEMFIGIPCVLRKKWDDWKSDWFYTPLADEARLRLPNQPPAQASSWRAPVDLGDGYDAVLDRLAGLRSQGLTGAMVYGDYLRRRIAPLQRRARGAWEYTGSEDCMRTHRGVKWDWVPEDFKVMIQRVLNLSSAEASLIPQGVLPLCSDPDRATILTIMKAVGASEEQAPRGHDGAGGSCRGEQSTPGGGRASGLRDGGSGGCRPADARGKRKQEGSSSPSPPRGGGAARVSSRRPEGAAPTPQPEGERKKKRLRKMGGQNHPGETLFPLQGSRLTDPLAGSSHAHCGCIHSPNASFHSPILFVFWSFFCFSEISSRPSRHSKSGQSEAEDTATAEARRRESDRREAADRLREAEEAAREAVRARQAEEAAWEEARLRQAEAATTSEAARDEAAGTSLGPTPSGNTQDKPGPGDVPEPGTSIGGPGRAASSPRRLSPTPSVAPLSAEPLLQALAVANTTVLDGLSAQMEALQAERAELDAAWARVEEGRHSVEAMVEVSRKAHRRHASELEARRKVLEEIAREVEEERGAALIATTVMNEAQDDLRLQYGSWEAELGKKLDAARGVLDAAAARERRAAETEVASRRREEALEARAMALEERACVVERDLADREAAVAIREVTLAAHEAACAEEESALRLREDALTERERALEEAEAAAQRLAESASLREAAQEEQARRNLEGARAERAALNQRAAELEAQARELDARARSGGAATGDSDLAARLAAAEHTIADLQGALNSSTGEVEALRLAGEIGPSMLRDAVSRLDRAGRQAGLWGGRTAKYAANQGGLAQRLSEMAGTLQRLPEELERTIKSSSRDLARGAVELVLASYQARDPDFSPWMALDEFPPGTEDGARARVQDAANHIVHSFEGSAPRLAFALSSDEEGDDGGVGDSGDEAGDPGASE

SEQ ID NO: 181366 - protein, 969 aa, Oryza sativa
  unsure (1)..(969): unsure at all Xaa locations
  Clone ID: PAT_MRT4530_78647C.1.pep
MARGSAPLDGSVLPLSRIVSERQAGLPRRFLPESATGQEIVTLGEGRPAPRYPGRTVFFLPFAMAGLVPLFSSFFMDVLEFYDLQMAHLTPNAVMTLAIFAHLCEMFIGIPCVLRKKWDDWKSDWFYTPLADEARLRLPNQPPAQASSWRAPVDLGDGYDAVLDRLAGLRSQGLTGAMVYGDYLRRRIAPLQRRARGAWEYTGSEDCMRTHRGVKWDWVPEDFKVMIQRVLNLSSAEASLIPQGVLPLCSDPDRATILTIMKAVGASEEQAPRGHDGAGGSCRGEQSTPGGGRASGLRDGGSGGCRPADARGKRKQEGSSSPSPPRGGGAARVSSRRPEGAAPTPQPEGERKKIRLRKMGGXQNHPGETLFPLQXEISSRPSRHSKSGQSEAEDTATAEARRRESDRREATDRLREAEEAAREAVRARQAEEAAREEARLRQAEAATTSEAARDEAAGTSLGPTPSGNTQDKPGPGDVPEPGTSIGGPGRAASSPRRLSPTPSVAPLSAEPLLQALAVANTTVLDGLSAQMEALQAERAELDAAWARVEEGRHSVEAMVEVSRKAHRRHASELEARRKVLEEIAREVEEERGAALIATTVMNEAQDDLRLQYGSWEAELGKKLDAAQGVLDAAAARERRAAETEVASRRREEALEARAMALEERACVVERDLADREAAVAIREVTLAAHEAACAEEESALRLREDALTERERALEEAEAAAQRLAESASLREAAQEEQARRNLEGARAERAALNQRAAELEAQARELDARARSGGAATGDSDLAARLAAAEHTIADLQGALNSSTGEVEALRLAGEIGPSMLRDAVSRLDRAGRQAGLWGGRTAKYAANQGGLAQRLSEMAGTLQRLPEELERTIKSSSRDLARGAVELVLASYQARDPDFSPWMALDEFPPGTEDGARARVQDAANHIVHSFEGSAPRLAFALSSDEEGDDGGVGDSGDEAGDSGASE

SEQ ID NO: 181367 - protein, 1041 aa, Oryza sativa
  Clone ID: PAT_MRT4530_78648C.1.pep
MARGSAPLDGSVLPPSRIVSERQAGLPRRFMPESATGREVVALGEGRPAPHYPGRSVFFLSFAMAGLVPPFSSFFMDVLELYDLQMAHLTPNAVMTLAIFAHLCEMFIGVRPSLRLFRWFFTVQPVSPPSVVGGCYFQPRGPVLNRYIPCVLRKKWDDWKSDWFYTPLADEARLRLPSQPSAQASNWRAPVDLGDSYDAVLDRLAGLRSQGLTGAMVYGDYLHRRIVPLQRRARGAWEYTGSEDYMRTHQGGRWDWAPEDFKMVVQRVLNLSSVEASLIPQGVLPLCSDPDRANILTIMQAVGASEERSPRGHDGAGGSRRGEQSTPGGGRASGPRDGGPGCSRPADAWGKRKQEGTPSPYPPRGGGAARASSRRPEGAVPTSQPEGERKKKRLRKMRETEPCRGNLISSQGGRLADLFAGSSPRPLRPYSFSHLPRQVFTHPFLFVLWFFFCLSEIPSRPSRHSKSGQSEAEETATAEARRREADRREAADRLWEAEEAAQEAVRVRQAEEAAREEAKLRRAEESVREAEVARARQAGCQTPDPTPPEVTTTSEATHDEVAGAPLGPDPSGDVWDEPASGDAPGSGTSIGGPSRAAPIPRRLSPLPSAAPLNAEPLLQALAAANTTVLDGLGAQMEVLQAERTELDAAWARVEEGRRSVEAMVEAGRKAHRRHASELEARRRELAEIAREVEEERQTALIATAVLNEARDDLRLQYGSRAAELEKKLDAARGVLDAAAARERRAAENEAASRRREEALETRAKALEERARARERDLADREAAVAIREATLAAHEAACAEEESTLRLREDVLTERERALEEAEAAAQRLADSLSLREAAREAALDQRAAELEAWVKELDARVRSGGVAAGDGDLAARLAAAEHTIADLQGALDSSVGEVEALRLAGEAGLWGGQTAKYAANQGGLAQRLSEMAGTLQRLPEELEETIKSSSRDLARGAVELVLASYQVRDPDFSPWAALDEFPPGTEDDARAQVQDAADHIVHSFEGTAPRLAFALDSDEKGGDGGEGDSGDEAGDPGVSE

SEQ ID NO: 181368 - protein, 916 aa, Oryza sativa
  Clone ID: PAT_MRT4530_78649C.1.pep
MARGSAPLDGSVLPSSRIVSERQAGLPRRFMPESATGREIVSLGEGCPAPRYPGRSVFFLPFAMAGLVPPFSSFFMDVLEFYDLQMAHLTPNAVMTLAIFAHLCEMFIGPVSPPSVVGGCYFQPRGPVLNRYIPCVLRKKWDDWKSDWFYTPLADEARLRLPSQPPAQASNWRAPVDLGDGYDAVLDRLAGLRSQGLTGAMVFGDYLRRRIAPLQRRARGAWEYTGSEDCMRTHRGVKWDWVPEDFKVMIQRVLNLSSAEASLIPQGVLPLCSDPDRANILSIMMAVGASEERAPKGHDGGGAARVSSRRPEGAAPTPQPEGERKKKRLRKMGGTEPSRGNLISPPRWSFNRPPRSEIPSRPSCQFKSGQSEAENAATTEARRRESDRREAADRLREAEEAAQVAVRARQAEEAAREEARLRQAEAATTSEAARDEAAGASLGPTPSGDAQDKPGPGDIPESGTSIGGPSRAASSPRRLSPTPSAAPLSAEPLLQALAVANTTVLDGLSAQMEALQAERVELDAAWARVEEGRRSVEAMVEVGRKAHRRHVSELEARRKMLGEIAREVEEERGAALIATTVMNEAQDDLRLQYGSWEAELGRKLDAARGVLDAAAARERRAAETEVVSRRREEALEARAMALEERACAVERDLADREAAVAIREATLTAHEAACAEEESALRLREDALTERERALEEAEAAAQRLADGLSLREAAWEEQARRNLEGARAERAALNQRAAELEAREKELDARARSGGAAAGESDLTARLTAAEHTIADLQGALDSSAGEVEALRLAGEGGLAQRLSEIAGTLQRLPEELERTIKSSSRDLARGAVELVLASYQARDPDFSPWTALDEFPPGTEDGARAQVRDAADHIVHSFEGSAPRLAFALNSDEEDDDGGVGDSGDEAGDPGASE

SEQ ID NO: 181369 - protein, 250 aa, Oryza sativa
  Clone ID: PAT_MRT4530_7864C.1.pep
MDDHQSKVQRLYDACDAVFSSGSKAGLPTLKQIRWLQDLLDGMEAADVGIEGGGSGGERSSSSEDDDERSPPGRRFLSARAFTRITYVHIHECDDFSIGVFCFPAGATLPLHDHPQMVVLSKLLYGSMRVKSYDWANAPPCSGPRKSGLARVVAVDEMREAPCKASVLFPRSGGNIHSLTAVTPCALLDVLAPPYAEDLGRPSTYFSDIPIPSLPGFAVLEEADLPDGFRVAGAPYVGPELTIDMDSMYN

SEQ ID NO: 181370 - protein, 930 aa, Oryza sativa
  Clone ID: PAT_MRT4530_78650C.1.pep
MARGSVPLDGSVLLPSRIVSERQAGLPRRFMAESATGREIVTLGEGRPAPRYPGRFVFFLPFAMAGLVPPFSSFFMDVLEFYDLQMAHLTPNAVMTLAIFAHLCEMFIGVRLSLRLFRWFFTVQPVSPPSVVGGCYFQPRGPVLNRYIPCVLRKKWDDWKSDWFYTPLADEARLRLPSQPPAQASNWRAPVDLGDGYDAVLDRLAGLRSQGLTGAMVYGDYLRRRIAPLQRRARGAWEYTGSEDCMRTHRGVKWDWVPEDFKVMIQRVLNLSSVEASLIPQGVLPLCSDPDRANILTIMMAVGASEERAPKGHDGASGSRKGDQSISGGGRASGPRDGGSGGSRPADARGKRKQEGTSSPSPPRGGGAARVSSRRPEGAAPTPQPEGERKKKRLHKMGGTEPSRGNLISPPRWSFNRPPRSEIPSRPSCQSKSGQSEAENAASTEARRRESDRREAADRLWEAEEAAREAARARQAEEAAREEARLRQAEATTSSEATRETDRQEAADRLQEAEEAAQVAVRARQAEEAAREEARLRQAEATTTSEAAHDKAAGASLGPTPSGDAQDKSGPGDVPESGTSIGGPSRAASSPRRLSPTPSAAPLSAEPLLQALAVANTTVLDGLSAQMEALQAERAELDAAWARVEEGRRSVEAMVEVGRKAHRRHNSELEARRKVLGEIAREVEEERGAALIATTVMNEAQDDLRLQYGSWEAELGKKLDAARGVLDAAAARERRAAETEVASRRREEALEARAMALEERACVVERDLADREAAVAIREVTLAAHEAACAEEESALRLREDALTERERALEEAEAAAQRLVESASFREAAQEEQARRNLESARAERATLNQRAAELEAQARELDARARSGGAATGDSDLAARLAAAEHTIADLQGALDSSTGEVEALRLAGEIGPNMLRDAVSRLDRAGR

SEQ ID NO: 181371 - protein, 1107 aa, Oryza sativa
  Clone ID: PAT_MRT4530_78651C.1.pep
MARGSALLDGSVLPPSRIVSERQAGLPRRFMPESATGREIVTLGEGRPAPDYPGRSVFFLPFAMAGLVPPFSSFFMDVLEFYDLQMAHLTPNAVMTLAIFAHLCEMFIGVRPSLRLFRWFFTVQSVSPPSVVGGCYFQPRGPVLNRYIPCALRKKWDDWKSDWFYTPLADEARLRLPSQPPVQASSWRAPVDLGDGYDAVLDRLAGLRSQGLTGAMVYGDYLRRRIAPLQRRARGAWEYTGSEDFMRTHQGVRWDWAPEDFKILVQRVLNLNSVEAALIPQGILPLCSDPDRASILTIMMAVGASEERAPKGHDGAGGSRRGEQSTPRGGRASGSRDRGPGSSRPANTRGKRKQGGTPPPSPPRGGGAARTSSRRPEGAAPTSQPEGERMKKRPRKMGETEPSRGKLISPPKWSFNRPPRSEIPSRPSRHSKSGQSEAEDPATAEARRRQADRREAADRLREAEEAAQEAARARQAEEIAREGAARARQAEEAAREEAARAHQAEEAAREEAVRAHKAKEAAREEAGFRQDEVMATSEAARDEAAGASLGPTPSGDAQATTSGAAGDEAAGASLGPTPSGDAQATTSGAAGDEAAGASLGPTPSGDAQDQTGPGDIPESGTSIGGPSRVASFPRRLFPTPSIAPLNTEPLLQALATANTTMLDGLSAQVEALQAERAELDAAWARVEEGRRSVEAMVEVGRKAHRRHVSELETRKKVLAEIAKEVEEERGAALIATTVMNEAQDTLRVQYGSWEAELGKKLDAAQGVLDAAAAREQRAAETEAASRRREEALEARAMALEERACVVERDLADREAAVTIREATLAAHEAACAEEELALRLREDALTERERALEGAEAAAQQLADSLSLREAAQEEQARRNLEGARAERAALNQRAAELEARAKELDARARSGGAAAGESDLAARLADAEHTIADLQGALDSSAGEVEALRLAGEVGPGMLWDAVSRLDCAGRQVGLWRGRTVKYADNQGGLAQHLSKMAGALQRLPEELEKTIKSSSRDLAQGAVELVLASYQARDPNFSPWMALDEFPPGTEDRARTQVRDAADYIVDSFEGSAPRLAFAPNSDEEGNAGGADDSDVEAGDPGASE

SEQ ID NO: 181372 - protein, 40 aa, Oryza sativa
  Clone ID: PAT_MRT4530_78652C.1.pep
PRVRPRVRSIPCMAEPQTQQDLDRDDGSWRTGRSSAVGLD

SEQ ID NO: 181373 - protein, 96 aa, Oryza sativa
  unsure (1)..(96): unsure at all Xaa locations
  Clone ID: PAT_MRT4530_78653C.1.pep
RSNVVEDDXHPMSVAEVEIIDQSXVLEEELAVRNDTQSIPSESEKGKLHITSDDYDXRSKTGLKDVAPVSSRTGNVNSPGQEEDLXFRDLEDEEDD

SEQ ID NO: 181374 - protein, 1038 aa, Oryza sativa
  unsure (1)..(1038): unsure at all Xaa locations
  Clone ID: PAT_MRT4530_78654C.1.pep
MARGSAPLDGSVLPPSRIVSERQAGLPRRFMPEYATGREIVSLGEGCLAPRYPGRSVFFLPFAMAGLVPPFSSFFMDVLEFYDLQMAHLTPNAVMTLAIFAHLCEMFIGVRPSLRLFRWFFTVQPVSPPSVVGGCYFQPRGPVLNRYIPCALRKKWDDWKSDCFYTPLADEARLRLPSQPPAQASNWRAPVDLGDGYDAVLDRLAGLRSQGLTGAMVFGDYLRRRIAPLQRRARGAWEYTGSEDCMRTHQGVRWDWAPEDFKILVQRVLNLSSVEASIIPQGVLPLCSAPDRASILTIMQAVGASEERAPRGHDGAGGSRRGEQSTPGGGRASGPRDGGPGSSRPADARGKRKQGGTPPPSPPRGGGVARASSRRPEXGPRQRRSPRGSGRRNGPARWGXQNHPGETSFPLQGGRVIDPLAGSSHAHRGRIHSLNASFHSSILFVFWSFFYFSEIPSRPSRHSKSGQSEAEDPATTEARRRESDRREAADRLREAEEAAQEAARARQTEETIREEAGLRQAETTTSSEATRETDRQEATDRLREAEEAAQVAVRARQAEEAAREEARLRQAKAATTSEAVCDEGAGASLGPNPSGDAQDKPGPGDIPESGTSLGGPSRAASSPRRLFPTPSVAPLSAEPLLQALAVANTTVLDGLSAQVEALQAEQAEIDAAWARVEEGRRSVEAMVEVGRKAHRRHVSELEARRKVLEEIAKEDTLRLQYGSWEAELEKKLDAAQGVLDAAAAREQRAAETEVASRRREEALEARAMALEERACAVERDLADREAAVAIREVTLAVLEAACAEEESALRLRQDALTERERALEEAEAAAQRLADSLSLREALQEEQARRNLEDARAERAALNQRAAELEAREKELDARARSGGAAAGESDLTARLAAAEHTIADLQGALDSSAGEVEALRLAGEVGPGMLRDAVSRLDRAGRQVGLWGGRTAKAVELVLASYQARDPDFSPWTALDEFPPGTEDGACAQVRDAADHIVHSFEGSAPRLAFALNSNEEDDDGGVGDSGDEAGGPGASE

SEQ ID NO: 181375 - protein, 1025 aa, Oryza sativa
  Clone ID: PAT_MRT4530_78655C.1.pep
MARGSALLDGSVLPPSRIVSERQAGLPRRFMPESATGWEIVTLGEGRPAPCYPGRSVFFLPFAMAGLVPPFSSFFMDVLEFYDLQMAHITPNAVMTLAIFAHLCEMFIGVRPSLRLFRWFFTVQSVSPPSVVGGCYFQPRGPVLNRYIPCVLRKKWDDWKSDWFYTPLADEARLRLPSQPPAQASSWRAPRRARGAWEYTGSEDCMRTHQGVRWDWAPEDFKIVVQRVLNLSSVEASLIPQGVLPLCSDPDRASILTIMQAVGASEERAPRGHDGAGGSRRGEQSTPGGGHGSGPRDRGPGSGRPADARGKRKQEGTPPPSPPRGGGAARASSRRPEGATPTSQPEGERKKKRPRKMWGTEPSRGNLISPPRWSFNRPPRSEIPSRPSRHPKSGQSEAEDPATTEARRRESDRREAADRLREAEEAAQVAVRARQAEEAAREEARLHQAEATTSSEATRETDRQEATDRLREAEEAAQVAVRAGQAEEAAREEARLRQAEATTTSEAARDEAAGASLGPTPSCDAQDKPGPGDIPESGTSIGGPSRAASSSRRLFPTPSVAPLSAEPLLQALAVANTTVLDGLSAQMEALQAERVELDAAWARVEEGRRSVEAMVEVGRKAHRRHVSELEARRKVMGEIAKEVEEERGAALIATTVMNEAQDTLRLQYGSWEAELGKKLDAARGVLDAAAARERRAAETEVASRRREEALEARAMALEERACAVERDLADREAAVAIREVTLAVHEAACAEEESALRLREDALTERERALEEAEAAAQQLADSLSLREAAQEEQARRNLEGARAERAALNQRAAELEAREKELDARARSGGAAAGESDLTARLAAAEHTIADLQGALDSSAGEVEALRLAGEVGPGMLRDAVSRLDRAGRQAGLWGGRTAKYAANLGGLAQRLSEIAGTLQRLPEELERTIKSSSRDLARGSGELVLASYQARDPDFSPWTALDEFPPGTKDVARAQVRDAADHIVHSFEGSAPRLAFALNSDEEDDDGGVGDSGDEAGDPGASE

SEQ ID NO: 181376 - protein, 1284 aa, Oryza sativa
  unsure (1)..(1284): unsure at all Xaa locations
  Clone ID: PAT_MRT4530_78656C.1.pep
MGFVSGIDNFVFPPGQAFRFGSLDFITNDLGKISLIDSDSNQSGRGQIFAPFGIPNSAEIYPKIISTESASNHLDEIQSTPTQPDQDDGAYPPILMKLPDDLAAVFTTRAPSPFFFFFLRVSLSFLSLRRRPVDLRDTINQRCAAREYASHHSLDRYDNDVDGVAAFTSKLRRVDWPAGFKPTGIEKYDGTTNPESWLTIYGLAIRAAGRDSKVMANYLPVALADSARSWLHGLPRGTIGSWAELRDHFIANFQGTFECPASQDGQAEDVITASKQSGTTWKPKKDTPTTGGSGSTNHKDRKRKPKELVATTTPSSRQRSRVNTSDKIMNSQCPHHPNSNHAAKDCFVYKQFAEQYAKNARKASDGDQSTLKKDDEVDAPTGFQDHRKELNHIFGGPLSYESKRKQKLTEREINAIQPDTPQYLRWSETTIMFDRLDHPYRVVHPGRYPLVLDPVVRNVKLRRSLIDGGSALNILFVKTLDDMQIPRMELKPSNAPFHGVISGLSATPLSQITLPITFGTWENFHTENICFEXAYHAILGRPXMPGPQGVISLRSDIKQAVTCDKESCEMAQFREITLDREEIRLAASTASEGEVPATKMPKSGASDTKTKKIPLDPSDPTKTADRKDAIKVELTKLLAAGFIKEVLHPDWLANPVLVQKKTGQWRMCVDYTDLNKSCPKDPFGLPRIDQVVDSTAGYRPQREAYVDDIVVKTKQKDDLIVDLEETFESIRAFRMKLNPEKCIFGVPSGKLLGFMVSHRGIQANPEKINAILKMKLPSSQKDVQKLTGCMAALSRGDPRKAFEDFKKLLTTPPVLASPHPQEQLLLYVSATSQVVSTVLVVEREEEGHVQKVQRPIYFVSEILADSKTRYPQVQKLLYGVLVTVRKLSHYFQVMKEWSCLDDNITAYRQEVRKLEDKFDRLELTHVLRHNNEAADRLANFGSKREAAPSDVFCEHLYEPTVPRKETIEAMDTQDISMIEADWREPLIRFLTKQELPQDKDEAERISRRSRLYVIHETELYKKSPSGILQRCMSLEEGRQLVKDIHSGICDNHAATRTIVGKAYQQGFFWPTAVSDADKIVRTCEGCQFFARQTHLPAQELQTIPLSWPFAVWGLDMVGPFKKAVGGYTHLFVAVDKFSKWIEAKQVITIAADKARDFFINIVHRFGVPNRIITDNGTQFTGRVFKDLCEDFGIKICYASVAHPMSNGQVERANGMVLQGIKARVFDRLRPYAGKCVEQLPSVLWSLRTTPSRATGQSPFFLVYGVEAMLPSEVEFESLRRRPSR

SEQ ID NO: 181377 - protein, 94 aa, Oryza sativa
  Clone ID: PAT_MRT4530_78657C.1.pep
MAGDARLAADAKSIVVPEVVPGVVCLGFNRISQGPSIIGNVLMQEHIWEIDHMSTVLRFRKDKCINHQQLNRHHKKASSSSSSSSSSPPPYPAA

SEQ ID NO: 181378 - protein, 76 aa, Oryza sativa
  Clone ID: PAT_MRT4530_78658C.1.pep
ERRSSAPCACGAVGPAARRATGSGRGEEEEEEEEEEVATSPCRRLAVRDLLARPAELLVCRCSRPTARAPASVEVR

SEQ ID NO: 181379 - protein, 757 aa, Oryza sativa
  Clone ID: PAT_MRT4530_78659C.1.pep
MALRAHPLLSSSSLPPPTLPILCLRCPGSSLSSKRFLRSHSRSAIRPWRNPCAARPGGPRFLGQDDADSDADEEDEEEWRWAPSAGPSGAHLVGAVDEDDSVGEGGGGVGWGAPDGDAAGGSGIRESGVDDGGQVGEWDLPMSSFRGRVQVQHHQEEEEEEEEEEEDEDGGGCEWSDPGFFLRGQEEEASSSVSTTTAMEEILTLARSPAVDGQAFAEFLAGYGRGALSVEECVELMRRMGEEGLALGCLHLLRWMQAPEEEPLLLPPQAWLLAVVALGRAQMADEVLEIVESLPPERRFSEAVLYNAAMSGLAYRGRYDDTWKVFKLMEKKNIQPDHMTSLIMLDVMNKSKTSAKDAWEFFQRMERKGVKWSLDICISLIKIFCDNGLKTEALIIQSAMEKKGIASNTSMYNTLINAYCKANQIEEAEGVFVEMKEKGLSATAMTYNILMGAYCRRLQPEVVESLLLEMQDLGLRPNARSYNFLIRVYGQQKKMSEKAEDAFLRMKTDGIMPTSSTYTSLLCAYAVNGLHEKAYLTYVDMKREGLKPSLETYTALIDMFRRAGDTEKLMETWRSMINEKVPGTRVIFHMVLDGLAKHGLYVQATDVIYEFRRAGLQPTVMTYNILMNAFARGGQHYKLPQLLKEMAAMELKPDSVTYSTMIYAYARVRDFSRAFYYHKLMVRSGQLPDVSSYKKLLNTLDVKAARKNIKDKNAIVGILKGKSSLKHRKEKKDEFWKNRKKRSMMNHVYGYPRKRFL

SEQ ID NO: 181380 - protein, 133 aa, Oryza sativa
  Clone ID: PAT_MRT4530_7865C.1.pep
MTPGLEGVDPAVLDSGAADSPLLTSVTSTMRMTVVARATATIATSHARVDLAAPDSGAADPPPPSSAMMMTIMTTRARMTTMTMASRARADPSGAELGRGRFANVGLRSCGDCCGARAPLPTTIPSPSSLVLL

SEQ ID NO: 181381 - protein, 853 aa, Oryza sativa
  Clone ID: PAT_MRT4530_78660C.1.pep
MSGQTGDGNDGEKGARIPFDYPSTSTSYVSTYNGKAPYFNGTDYAAWKHKMKMHLKSINPSIWRIVEKGYVLQNPEDPTKEDDENEHKNAQAANAILSALSGSEFNRVDGIKSAKVIWDMLRNLHEGTDSVQSPSDMYDRLSKIVNEIKGLGSKDMTDEVVVKKMVRAITPRNSKRPDYKNITPHDLLGHILAHDMLVQESKDVIQYINQSSTASIKKEDLALKAKEEEEENHESKSKAEIDDEEMALFVKKFGKFMRRSGFFKGNSSKHYSNKSSGRHSARVCYVSKEPEHFIAECPHLKDGSHLKEDKKGEKKGEKKDEKKEKHKHSKREHYGQAHIGMIFGSDSESSSSDEEGVATFAVKPSSPPRLFDYSSDEDAPICLMAKEPKVPCPLKSFNADLVSNEEDEVEDEVIDDELFKSITKESIPHLSELLGRIEDQYTTLERQEALLIREKERSHELKSELAKEREKNEALVRLYKQTKESHANLEVANAQLQERVDGLDKAYLSLEEKFETLKSSVSLPSEASCSKIVPSNKPCVRCKNIDIEACATNSISLSALQKQNEKLMGLLHNGLLKCHMGSKALKEYVGYQRDNFNHEGLGKNASGRIIAKYVGPRGKNISIKRVLWVPKALITNMRGPKQEYVSGGKSWVIDSECTNHMTGEESMFSSLDSNGTSQENIVFGDDGKGKVMGLGKIAISNDLSIANVLLVKSLNYNLLSVSQLCSMGYNCLFTDVDVTVYRRNDSSVVFTGVLKGKLYLVDFSSSKAKHETCLVAKSNTGWLWHRRLAHVGMRNLRKLLKHDHILGLTNYQFEKDRVCSACQAGKQIGAHHSVKNVMTTCNTLKIRPTKSKL

SEQ ID NO: 181382 - protein, 612 aa, Oryza sativa
  Clone ID: PAT_MRT4530_78661C.1.pep
MSGQTGDGNDGDKGAKIPYDYPPTSTSYVSTYSGKAPYFNGTDYAAWKHKMKMHLKSINPSIWRIVEKGYVLQNPEDPTKEDDENEHKNVQAANAILSALSGSEFNRVDGIESAKVIWDTLRNLHEGTDSVRESKVEILKGPSDMYDRLSKIVNEIKGLGSKDMTDEVVVKKMVRAITPRNSNLVTIIRERPDYKTLTPHDLLGRIFAHDMLVQESKDVIQYINQSSTASIKKEDLALKAKEEEEENRKSKSKAEIDDEEMALFVKKFGKFMRRSGFFKGGFSKHYSNKSSGRHSARVCYVCKEPGHFIADCPHLKDGSHIKEDKKKSEKKDEKKEKHKHSKREHYGQSHLGMIFGSDSESSSSDEEGVATFAVKPSSPPRLFDYSSDEDAPVCLMAKEPKVPSPLKSFNVDLVSDEEDEVEDEIMDDELFKSITKESLPHLSELLGRIEDQYAILERQETLLIREKERSHELKSELVKEREKNEALVRLYKQTKESHANLDVANAQLQERVDGLDKAYLTLEEKFETLKNSVSLPSEPSCSKIVPSNEPCVRCKDIDINACATNSIALSGLQKQNEKLTGLLHNGLLKCYMGSKALNVATGKIAFSRTLVY

SEQ ID NO: 181383 - protein, 82 aa, Oryza sativa
  Clone ID: PAT_MRT4530_78662C.1.pep
SGILVELRRGAAGAVHPRRRSTEMAPRLSVKKCLIILALAAAAAIAGFLSVAGAGRGRSSSSSPARRLSNGLAAVRVVFVYA

SEQ ID NO: 181384 - protein, 91 aa, Oryza sativa
  Clone ID: PAT_MRT4530_78663C.1.pep
INDLIGPNPTFIKKMPNILFFTLFYSKKRKLSRPNFNSFHPVMSSGIESLQSCVRCALVADNEAFSDHVRCNGGLNHAFTHPVCVEGALCP

SEQ ID NO: 181385 - protein, 122 aa, Oryza sativa
  unsure (1)..(122): unsure at all Xaa locations
  Clone ID: PAT_MRT4530_78664C.1.pep
FFFFXXQKCKSFFLDXGKSLPYYIDTQGRVTPSAVXQPQPASHHPSRTPLPTLNTPGLTHTATLHTPLGTTHTSSQLHTSHIXAGALGGAPHSSHSANNLCXSPIQHAHPRNISTKPPGPTI

SEQ ID NO: 181386 - protein, 232 aa, Oryza sativa
  unsure (1)..(232): unsure at all Xaa locations
  Clone ID: PAT_MRT4530_78665C.1.pep
SIHYNRFSTLPSSLSLSLSHFSSAGSRPVGEECRRLAEEEVRCGGWRRRVGREAAADGEELGVGSGGRRLDPAGVVLCQERVAVRPDVEPGGLVGEVEIDSHGMGELPVAVRDEEHLITAASSATLQNRQPPRFAPSASSPPAGCGGSGGGGGACSGGEPPHRGRGGERLWLQLPAEADADTQHRVVVEPTRRAKAARLPSSSPREKKSERERXEKGEPERRGRERDDDVVY

SEQ ID NO: 181387 - protein, 41 aa, Oryza sativa
  Clone ID: PAT_MRT4530_78666C.1.pep
RTKFNGLIPAPVLSNLVLRQIWPLLTKDPVCYVLFVVCIAP

SEQ ID NO: 181388 - protein, 437 aa, Oryza sativa
  Clone ID: PAT_MRT4530_78667C.1.pep
MTLGRPSVGYDPQEGETWRRCEAHGPVDLELCIHFVRLYNLLASKVKEELHGNCRSWGGWKCEHMSLGRRGRSEKIKSIRASTGHKLYCLLDLRLTFISPVIEEVQHFPVIEALVTFGRVWSMDPGYEDPAKCISFKLKVEEEFAEMECMNRWMLLGEENTKFFQSIATERFRLNSISQIYDHSGQVVTLHDQKANMFFQSFESRMGISLSPSMSFNLMELFPNPVILDCLVDYFSTQEVDSLIKIIPPDKAPGPNGYNGFFLKKCWPIISQDFYRLSAHFHVCYTDLQPLNSSFITLVPKKPSPETVNDFKPISLMGISLKVLNKLMADHLQGVMLKVVQENQYGFIKGKTIQDCLAWSFEYIHQCHQSKREIILLKLDFEKSFDSIEHYALISIMQSMGFSDKWLQWVHMIFTSAHTSVLLNGVPGNSFKCRRGV

SEQ ID NO: 181389 - protein, 227 aa, Oryza sativa
  Clone ID: PAT_MRT4530_78668C.1.pep
RLRKVKVWCDSTGEGTTDWMKLKKAIENFVKSEMDTAVGERSLSLYLGDGLERFPELGDNIKVELNGFVSSLKLQGKLNQLPNFDTSLNGITKLCLSSTNLEGHHYSDLGKLLCLKYLKLVENYLGGFVIKIGTFPSLEFLCLLMPSFLYAVPEIQEGALPKLVSLQLLCKHLHGLAGINIKNHTKLQEVALDSAVSMETINTWENEAQKHPKRPKVLFFKRVGTSK

SEQ ID NO: 181390 - protein, 801 aa, Oryza sativa
  Clone ID: PAT_MRT4530_78669C.1.pep
MEGAVASNVELDSAVFQVSSAQNRYEAIACSKGNTELIASGPFDQLVLHLEDARKFQSCSTAGTFKLSLSGNAKGSSWFTKSTIARFLNTINSPDASKSANGILHEISQLEETRKFHQSLYSKEQRNPMGGALSGGVFGTIGVEQQVNCFSFLQDLNQLYADDLYDYYARNELLRALDLRLTVLKEEIFALLNRAVVSNMSTRDVSDLSSFVQHFGASEFSWLMRCLLLIPDCQPSEVSQQQSFPAEKDDKGENALHTRNISSHTIIQRPITNNVSPAKLAQIERESSTESDDSSESSAEDEAVVERSRPLMRSASPRRSASPMRRVQIGRSGSRRSTAIAIKSLSYFPPSQRIPLDKDDESGSCNGETDQPSRKSDNNVRRMSVQDAINLFESKQKDQNPDSQNKKAGLFATKSVLRRWSAGMGDSLNNNSEEKTIDSTSQSKSNNTGSDSEKDGAETQAEPGSASASNTVVTPSVEGFHTNMQGVAMPETETAVSSHTEISAEQTKSGQEENSDRAMASAEWNRQKEAELNQMLMKMMQVMPGKFSSANVTTTGITSTNEKKGGLQGQHKEKRDSKVRTDKGGRRPAKEASTRPLKETVGQKKQQLPPKLALQLRNAILQFHKGHGEIHHLRSWSGGSLTKATTAQKTKSSPGTVSAPTATSRRRTPVAPSSSQPTSKVERSAQPVKNKKETVAASKPAIKGIEEKKTKTATKTSRLAKSTPISDEKSSAATRPNLYNKVAKKSSVVPLESKPSKKATGIRSTPVLPKELTPKAHPRKSSTKIITCTCAQQLKVSWIFA

SEQ ID NO: 181391 - protein, 376 aa, Oryza sativa
  unsure (1)..(376): unsure at all Xaa locations
  Clone ID: PAT_MRT4530_7866C.1.pep
KENPKRSPLSPPSFLGRLGPVPPSLSLFPRGPSASPRARAADRRARPPLSLTGGTHLSSPSSRRVLRRARALAPPPPRIAPHPAVPARIKERGIIPRDPLSRFPRFPLSLSLGSVRIHPVILAGDIYGARDPRAXFPSSPAAFSPSRCYIIAPRAPLFRFRRSPLALAVGIVLAPCSSLSAVAAELRSAAAAAPVFLLTRRHLHPLRRVVADPVRRSASPADRRSTVVIVIPSHAAAFLHSGRRSRRRRCPGVSRGPPFAFPLPSSLSGAAPPRRWSPAVTIGARARRSRRPRRRGRPRARPRGCQVDPAVSRPRPRVRLTRGTHGADRRQPRAPGPPWTVGLTRGPHFPWTRSARPLPRLVHPRQTKPQLVDTLL

SEQ ID NO: 181392 - protein, 121 aa, Oryza sativa
  Clone ID: PAT_MRT4530_78670C.1.pep
MQHSQITKIITFTIIWTQNGSAKIITITFIWPKNKITSHLQSFGHKTKSQKSSQSYSSPLDPAVGARIRPRAPDPAGACNLQNGSGEGWPSRRTARGGEASLHPSPPATAGPPPLRLPSCP

SEQ ID NO: 181393 - protein, 61 aa, Oryza sativa
  Clone ID: PAT_MRT4530_78671C.1.pep
MKEVRRMPTKRDGDSAYEWRPLQMSLAEDAMDDARVETGIAGVQDWLCSSVINYKCTKYTY

SEQ ID NO: 181394 - protein, 219 aa, Oryza sativa
  Clone ID: PAT_MRT4530_78672C.1.pep
MLMKMMQVMPGKFSSANVTTTGITSTNEKKGGLQGQHKEKRDSKVRTDKGGRRPAKEASTRPLKETVGQKKAAITPKTGTAAEKRNSPVPQRARRNSSPPVLPKELTPKAPARKSSPKPSPAPVTRSSWSGGSLTKATTAQKTKSSPGTVSAPTATSRRRTPVAPSSSQPTSKVERSAQPVKNKKETVAASKPAIKGIEEKKTKTATKTSRLAKSTPIR

SEQ ID NO: 181395 - protein, 426 aa, Oryza sativa
  Clone ID: PAT_MRT4530_78673C.1.pep
MAAAAAAATTPNSLLLRRPAAPKPASAAASPLRLPTRAARISCAAVATPAQSSSSPAAAAADRGVYNFAAGPATLPLSVLQRAQAELVDYRGSGMSIMEMSHRGKEFDAAIKKAEADLRALLAVPDTHEVLFLQGGATSQFAAAPLNLCASPSDPADFVVSGSWSDKAFKEAKKFSAASVAWSGKDGKYTSLPPFDAIEQNPEARFLHICSNETIHGVEFKDYPEPKNKSGILVADMSSNFCSKPVDVSRFGLIYAGAQKNVGPSGVTIAIVRKDLVGSAQPITPVMLDYKTHADNASLYNTPPCFAIYICGLVFEDLLAQGGLAEVEKKNAHKAGILYDAIDASGGYYICPVEKSVRSLMNVPFTLAKGGDFEKQFIAEAAKEGMVQLKGHRSVGGVRASIYNAMPLAGVEKLVAFMKDFQARNP

SEQ ID NO: 181396 - protein, 88 aa, Oryza sativa
  Clone ID: PAT_MRT4530_78674C.1.pep
FFFFFFFFFFFFFFFFFFFFFFFFFFFNKKNPLLGKTGSISNIKRNKLGPNSNHREKEERPLGGSEIYGGGDKITATGGPPGQRKLEN

SEQ ID NO: 181397 - protein, 85 aa, Oryza sativa
  Clone ID: PAT_MRT4530_78675C.1.pep
MAKFVRAPVHSCSCSNAHLSQTAAPAKMVFEDQVRGVVCYRDDKGNMICEGPMGVQVTDFIELSTLRVFEDVDSLQPRKDQKGKL

SEQ ID NO: 181398 - protein, 133 aa, Oryza sativa
  unsure (1)..(133): unsure at all Xaa locations
  Clone ID: PAT_MRT4530_78676C.1.pep
IASVAAEENFVTSDMVLRCKPRDIVRRASLNCIDDDESTGGLSQVRSLTVFGVLXXPMKSSIVYLQLLRVLDFKDAKGLKDEDVQGLERXFFLKYLGLGGKFVTKLPEKWKXXQNLEXLDVRETAVKELSEAI

SEQ ID NO: 181399 - protein, 126 aa, Oryza sativa
  Clone ID: PAT_MRT4530_78677C.1.pep
MSSCHHLSSSISTARGGTRKATMAKFVRAPVHSCSCSNAHLSQTAAPAKMVFEDQVRGVVCYRDDKGNMICEGYDEGPRLGMRLPEKACFPWPMGVQVTDFIELSTLRVFEDVDSLQPRKDQKGKL

SEQ ID NO: 181400 - protein, 43 aa, Oryza sativa
  Clone ID: PAT_MRT4530_78678C.1.pep
TTITELYLLSTPPSKKNPILAMSLNICVSRFVARICIFLEWSR

SEQ ID NO: 181401 - protein, 67 aa, Oryza sativa
  unsure (1)..(67): unsure at all Xaa locations
  Clone ID: PAT_MRT4530_78679C.1.pep
TXXLXRSXXXCVVXLLXXKXLXXYAPXXXLFLFSFXXXXXXXXLNWLGLKKKKKKKKKKKKKKKKKK

SEQ ID NO: 181402 - protein, 151 aa, Oryza sativa
  unsure (1)..(151): unsure at all Xaa locations
  Clone ID: PAT_MRT4530_7867C.1.pep
GRLGSWTAITTALALVVDNFHNTKPCLNTVSYSLLVFLSGMIITFIGFNKTDLPGAIWYLITPYSKVNSISSIYVLSIIILLLSNLSSNLPTVLLMYDDVAKAVVLISHTAXNNIXLMLSCEITVADNLSLMGSTANLIECHHATKAPSNA

SEQ ID NO: 181403 - protein, 883 aa, Oryza sativa
  Clone ID: PAT_MRT4530_78680C.1.pep
MARGSALLDGSVLPPSRIVSERQAGLSRRFMPESATGREIVTLGEGRPAPDYPGRSVFFLPFAMAGLVPPFSSFFMDVLEFYDLQMAHLTPNAVMTLAIFAHLCEMFIGVRPSLRLFRWFFTVQSVSPPSVVGGCYFQPRGPVLNRYIPCALRKKWDDWKSDWFYTPLADEARLRLPSQPPAQASSWRAPVDLGDGYDAVLDRLAGLRSQGLTGAMVYGDYLRRRIAPLQRRARGAWEYTGSEDFTRTHQGVRWDWAPEDFKILTSRYWSNGFVSHPSWLYSFSQREFSLTHLVRLLVFSFVSARSRRVPPAIPSPASLRPRIRRPQRPSGGNLTGERPRIAYGKPRRPPGLARPRKPLGRRPPGPARPGKPLGRRPDFARTRRWRLPRQLATRPRARRLGPLPQATTSGAAGDEAAGASLGPTPSGDAQDQPGPGDIPESGTSIGGPSRVASSPRRLFPTPSIALLNAEPLLQALAAANTTVLDGLSAQVEVLQAERAELDAAWARVEEGRRSVEAMVEVRRLQYGSWEAELGKKLDAAQGVLDAAAAREQRAAETEAASRRREEALEARAMALEERACVVERDLADREAAVTIREATLAAHEAACAEEEFTLRLREDALTKRERALEGAEAAAQQLAVNLSLREAAQEEQARRNLEGARAERAVLNQRAAELEARAKELDARARSGGAATGESDLAARLAAAERTIADLQGALDSSAGEVEALRLAGEVGPGMLWDAVSRLDCAGRQVGLWRGRTVKYAANQGGLAQCLSKMAGALQRLPEELEKTIKSSSRDLAQGAVELVLASYQARDPNFSPWMALDEFPPGTEDRARAQVRDAADHIVDSFEGSAPRLAFAPNSDEEGNAGGADDSDVEAGDPGASD

SEQ ID NO: 181404 - protein, 1003 aa, Oryza sativa
  Clone ID: PAT_MRT4530_78681C.1.pep
MWGQSATAAVDFAANPLHSVPAASVMTRPSRPVKKPLGDSLSCAPQNTRIIDLGGEMASALTGAMTSVIIKLSALLGEEYAKLKGLQREVEFMKDELSSMNALLHRLAEVDSDLDVQTEEWRNQVREMSYDIEDCIDGFTHRLGHIGIAEAAGPVQRVAQQLKVLKVRRQIASQIQELKGRVEDASKRRMRYKLDDRIFEPSIARAIDPRLPSLYAESDGLVGIETPRAVLVKLIMEGDDASFQQLKVISIVGPGGLGKTTLANEVYRRLEGQFQCRAFVSLSQQPDVKRILRNIFCQVSQQVYDSTSVWDEENLIDAIRGFLKDKRSAIVISYGRYFIVIDDIWSIQAWKTIKCALLMNNLGSRIITTTRSVTIAKSCCSPQHDHVYEIMPLSTANAMSLFLKRIFGTEDICPPQLEEISCKILKKCSGSPLAIITIASLLTNKASTKEEWERVHNSIGSTLEKDPSVEEMQRILSLSYDDLPHHLKTCLLYLCIFPEDCEIERDQLVKRWIAEGFINTGSGQDLEKIGESYLNDLISRSMIQPVKVRYDGQVDSCRIHDMILDLLMSKSIKENFATFLGEQNQKLVLQGKVRRLSLSYYSQENVMVPSTAIISSCRSLSIFGYAEEMPSLSEFRVLRVLDIEHGEDMDSNYLEHVRRLSQLKYLRLNVRSIDALPEQLGELQHLQTLDLVSTKLRKSPKSIVRLQNLTCLRINNLELPEGIGCMRALQEVSEIKISRNSSASSLQELGNLTKLKILGLCWCISDIHGGTKTLVNNLVSSLRKLGRLNLRSLCIQSSFKYSIDFLLDSWLPTPHLLQKFQMGMCYYFPRIPVWIASLENLTYLDINLNPVKEEVLEILGNLPALLFLWLTSKSADPKQRLIINSNMFMCLKELYFTCWSIESGLMFQEGCMAKLEKLHLPFHAATALEFGIHHLSSLRLLVVEIICSGATIRQVESLEETIRKTADLLPYRPTVEIRTWDEENMVEEQKEKDMGEEGTQTSC

SEQ ID NO: 181405 - protein, 920 aa, Oryza sativa
  Clone ID: PAT_MRT4530_78682C.1.pep
MARGSAPLDGSVLPPSRIVSERQAGLPRRFMPESTAGREVVELGEGRPAPHYPGRSVFFLPFAMAGLVPPFSSFFMDVLEFYDLQMAHLTPNAVMTLAIFAHLCEMFIGVRPSLRLFRWFFTVQPVSPPSVVGGCYFQPRGPVLNRYIPCVLRKKWDDWKSDWFYTPLADEVRLRLPSQPPAQASSWRAPVDLGDGYDAVLDRLAGLRSQGLTGAMVYGDYLRRRIAPLQRRARGAWEYTGSEDYMRTHQGHKWDWVPEDLRMVVQRVLNLSSVEASLIPQGVLPLCSDPDRASILSIMQAVGASEERAPRGHEGAGGSRRGEQSTPGGGRASGPRDGGPGGSRPADARGKRKQEGTPSPSPPRGGGAVRASSRRPEGAAPMSQPEGGRKKKRLRKMGETEPCRGNLISPPRWSFSRPPCSEIPSRPLRPSKSGRSEAEETATAETRRREADRREAADRLRESEEGAQEAVRARQAEEATREEARPRWAEESVREAETAHARQAAHRAPDPTPPEATTTSEATHDEAAGAPLGPDPSGGAQDEPASGRGRPRVRHALATANSTVLDGLSAQMEILQAERAELDAAWTRVEEGRRSVEAMVEAGRKAHRRHTSELEARRRDLAEIAREVEEERETALIATAVLDEVRDDLRLQYRSRAAELEKKLDTARGILDAAATRERRAAENEAASRRREEALEARATALEEHARARERDLADREAAVAIREATLAAHEAACAEEESALRLREDALTERERALEEAEAAAQRLADSLSLCEAAREEQARRNLEGARAERAALDQRAAELEARAKELDARAHNGGATAGDGDLAARLAAAEHTIADLQGALDSSAGEVEAPRLAGELEIKEAKVSNERGFLVDGSDLLTCYCVERGDREVTTKWFPRSMVTRASVIISQEGEPETDFSW

SEQ ID NO: 181406 - protein, 1659 aa, Oryza sativa
  Clone ID: PAT_MRT4530_78683C.1.pep
MAVIFQLGTGYRIKIEYLHEGSVGAPRRGSVKFLPTKCDGFRLQHRRLRLPPGQAFRFGSLNFITNNFGKLSLLDSDSNQSGRNQVLSPFGIPNSADVYSKIVSPELVSNHSDEIQSTPQRPDQDDGSYPSILMRLPDDLATVFTAKASPVRRSRRASASAPIQSRSREVGVILQSLGTVSTEELDGYLSSPDVSSRPTEILDYGDFDNFDDSYEDNYTPLFCGVFMADNETEEQRRAREADEERTRQETERRRLEEERQRQERERLQHEDHDRCLASSQLRKHPHPDWERRVERPHSPHRRRPVDLRDTINQLRAARGNHSPDRYDDDMDGVAAFTSELRRVDWPADFKPTGIEKYDGTTNPESWLTVYGLAVRAVGGDSKAMANYLPVALADSARSWLHGLPRGTIGSWAELRDHFIANFQGTFERPGTHFDLYNIVQKSGESLRDYIRRFSKQRNKISDITDDVIIAAFTKGIRHEDLVGKFGRKPPKTVKQMFEKANEYAKAEDAITASKQSGTTWKPKKDTPTAGGSGSNNHSNNHKDRKRKPEELVAITSPSSRQRSRVNTFNKIMNSQCLHHPNSNHVAKDCFVYKQFAEQYVKNARKPSDGDQGTSNKKDDEDDAPTGFQDHRKELNHIFGGPLSYESKRKQKLTEREINAVQPNTPQDLRWSEIAIKFDRSDHPDRVVHPGRYPLNNKDIFAWKPSDMPGIPREVIEHSLHVKEDTKPIKQRLRRFAQDMKDAIKEELTKLLAAGFIKEVLHPDWLANPVLVRKKTGQWRMCVDYTDLNKSCPKDPFGLPRIDQVIDSTAGCELLSFLDCYSGYHQIRLKESDCLKTSFITPFGAYCYITMPFGLKNAGATYQRMIQRCFSTQIGRNVEAYVDDVVIKTKQKDDLIADLEETFASIRAFRMKLNPEKCIFRVPSGKLLRFMWGPEAEKAFPDFKKLLTTPPVLASPRPQEPLLLYVSGTSQVVSMVLVVEREEEGHIQKVQRPIYFVSDVLANSKTRYPQVQKLLYGVLITVRKLSHYFQSHSVTVVTSFPLGDILHNREANGRIAKWALELMPLDISFKPRTLIKSQALADYLTEWTEYQEDMPEEKMEYWTMHFDGSKRLTGAGAGVVLISPTGERLSYVLWIHFSASHNMAEYEALLHGLRIAISLGIRRLIVRGDSQLVVNQVMKEWSCQDDNMTAYRQEVRKLEDKFDGLELTHVLRHNNEAADRLANFGSKREAIPSDVFVEHLYEPTVPRKEKIEAMNTQGVSMIEADWREPLIRFLTKQELPQDKNEAEQISRRSRLYVIHKTELYKKSPSGILQRCVSLEEGRQLQKDIHSGICGNHAAARTIVGKAYRQGFFWPKAVSDADKIVRTCEGCQFFARQTHLPAQELQTIPLSWPFAVWGLDMLWKKFSKWIEAKPVVTITANKARDFFINIVHRFGVPNRIITDNGTQFTGGIFKDFCEDFGIKICYASVSHPMSNGQVKRANGMVLQGIKARVFDRLHPYTGKWVEQLPSVLWSLRTTPSRATGQSPFFLVYGAEAMLPSEVEFESLRFCNFREERYEEDRVDDINRLEEAREAVLIQSARYLQGLRHYHNRNVRSRAFLVGDLVLRRIQTTQDRHKLSPLWEGPFIIAEVTRPGSYRLKREDGTLVNNSWNIEHLRRFYA
